United States Patent Application Publication US 2006/0123505 A1 - sequence listing, part 5

SEQ ID NO: 8912 - DNA, 1621 bp, Oryza sativa
  ref <308>: DATABASE ACCESSION NUMBER: AK106260
  ref <309>: DATABASE ENTRY DATE: 2002-08-28
ataagccattaggcaaggcaatcctcctcctcctccttgctcacagtcacagatgggaagagaggaattgagcaactcgtcaactcaagaattggagggttgagctagaattattaggaagtagagctagaattagagaagagcagagcagcaagagattattagtacaggaacaggagagcagagcagagtgcgatcgagcaagggcagggcggcggtaggctaggcatggaggaggagataaagggccgcgtcgtcgtcctcggcgccgatgccgccgccgacccggagctcgaggccttccatctcccctccgccgaccagcccccgcactcgcacctcctccaccaccaccattctccacaatcccatcctcaacctgatgcaccagcagcagcagcgccaccgccacctgctccccttactcctcctcctcctaagtcgccgccgccgcctccccacatccaaaccaccgaccttccaccgcccaagcccctcccgccggccccgctccgtcaactcttcagcttcgccgacggcctcgactacgtcctcatgaccctgggcacgctgggcgccctcgtccacggctgctccctcccggtcttcctccgcttcttcgccgacctcgtcgactccttcggctcccacgccgcccacccggacaccatgctccgcctcgtcgtcaagtacgccttctacttcctcgtcgtcggcgccgccatctgggcctcctcctgggccgagatctcctgctggatgtggaccggcgagcggcagtccacccggatgcgcatccgctacctccacgccgccctccaccaggacgtctccttcttcgacaccgacgtccgcacctccgacgtcatccacgccatcaacgccgacgctgtcgtcgtccaggacgccatcagcgagaagctcggcaacctcatccactacctcgccaccttcgtctccggcttcgtcgtcggattcaccgccgcctggcagctcgccctcgtcaccctcgccgtcgtcccgctcatcgccgtcatcggcggcctcagcgccgccgcgctcgccaagctctcctccaggagccaggacgcgctgtccgacgccagcggcatcgcggagcaggcgctggcgcagatacgcatcgtgcagtcgttcgtgggcgaggagcgggtgatgcgggcctactcggcggcgctggccgtggcgcagcggatcggctaccgctccggcttcgccaagggcatcggactgggcggcacctacttcaccgtcttctgctgctacgcgctgctcctctggtacgggggtcacctcgtccgacgcgcccacaccaacggaggcctcgccatcgccaccatgttctcagtaatgataggcggcctggctcttgggcagtcggctccgagcatggcggcgttcgccaaggcgcgggtggcggcggcgaagatattccggatgatggagcacaagccgacccggagctcgaggccttccatctcccctccgccgaccagcccccgcactcgcacctcctccaccaccaccattctccacaatcccatcctcaacctgctgccagatgttctaagaatgaattaatgaaatgaattactatactgct

SEQ ID NO: 8913 - DNA, 1376 bp, Oryza sativa
  ref <308>: DATABASE ACCESSION NUMBER: AK106261
  ref <309>: DATABASE ENTRY DATE: 2002-08-28
aaaaagaaaaaaaaaatttctccaaagaagaagagagcgtgtacaattcagtctcctcctacctccccggagcccgacgagatcccgccaccgccacctctcctcctcgccgcgcccggcgacctcctcctccacatgctcctccggtcggcgccgcgccgcctccaccacctccgcccgcaccacctctctaccgccgccgccctcgcggcggcgccgccgacctcctcgcctcccacgtcgccgccggccagttcctccccttccgcctccccgccgcgccctacccgatcttcctcgccatctcctcctcccctcccgcgccgggcctcgcgacctccttcgatttcctcgttaagcgactccccggcaccccctccgcgtgcctctgcgacctgcgccccggcgacctcgtccacgtcggcggcagcgtcgtcggccgcggattcgaggtcggcaggatcgctgacgcgcgcgatgtcctcgtcttcgccaccggatccgggatcagtccaattcggtcactcatcgagtcaggttttggcgaaaatgagaacattgatgtaaagctcttttatggggttagaaatcttcagaggatggcatatcaggagagattcactaattgggaatccagtggaatcaaaattatacctgttctctcaagacctgatgatcaatggaccggcgagcgaggctatgtccagaatgctttttcaaggatgaagaaggttgtaaatccttcatccatgggggcaattttgtgtggacataaacagatgtctgaggaaattactagagcacttgttgctgacggtgtgccaaaagatagaatcttaacaaacttctgactgcccctagcccactagaacacaattatcagccttctagatgttgtatccttattactcattacagtgattattctttacagcaagcgcgatggaaactcgcaacagagaaacagttttgtactacttacatataggggcttctttttccaattttcctgcacgatgcaacatgctgcgctgtaatctggattttgccagcctgatgtatcaatatcaacacttggtgggcattttcgcatttgaaccgaaaggccctagttcatacagttttgtacctcctgaaacaatacccccttggaaggtgttgatatactccaaattacaaaagctagctcaataaaaggggtagagatgagtggcctcatgtatttgccttataaaagaggtagagatgagtggcctcatgtatttgccttcagttataatttgtcttcagttataatttgtgtattatttccccgcaaaaaaaataataatttgtgtattagaaggctataacaggatcagttttgaattgatttg

SEQ ID NO: 8914 - DNA, 1385 bp, Oryza sativa
  ref <308>: DATABASE ACCESSION NUMBER: AK106262
  ref <309>: DATABASE ENTRY DATE: 2002-08-28
aaaaaaaaaaaaaaaaaatcccccgcctcctcggattcccctctcctcctcctacttcctctccggcgaaccccacgcggcggcggaatggggaactcctgctcctccgtcgacgagagcgccgccgccatcgccacattagcggagagcgctgctgcaggggctcgggaaaccgtcgccgacgagttcgccagggcagcggggtcgggagcgggagggcgaggcgacgtcgccggatcagcggccgcaggagtcgcctctggagcgggagggcgagacgacgccgccggggacgaggttgtgatcgctggcgtcctgtcgctggccgacgggcagaaagccgccgccgcgggcgccattagcggggtcgagtcgatgcagtcctacatgagaggtactcgattcttctgtttcggagagcgcgtgtgctcggaccagatggccgcgctcaagatggccgccgcgtgtggttcggccgccggcatgagggcggtagccatggttgccgcccgagctcggcacgccgcacggattgccgcgaatccagacgttgagaatcctctgcatgatatccccgaggatcgtcctgattacatgctatccgccgctgccactggagcaagagcaggggttctatgtgcacggatgaagatacaagcagctggtggtgattctacttcacatgcgaagtatgtcccttttctcgcaccgttcattggaggtgcactaccagggtcatatgcggcctatcacctcgtgaaacattctcctgaatgggtcatgggcgtggtctttggtagcatttctttgggtttcttcgcagcttgcacaggaactgtttctggtttactaggcacgtcatccgccacattccagtacagcagatttgctgccattacaaccttcacggctgtatggtttttattcagcttcgctatgacttccgtgttttcaaaaacatggcgcaagattctctgtggatttatatgtggtgtgcctggggtaactttcgtgggggcctggctatattcagggtggtgagaacgagttgcaacaaccgtttcatctgtggagactatagtctaccatagcttgttttctttgatgtggttgtagagacttccatccacatagtacagtctttacttcagtacattttcgtagtgattacagaacatgacaaagggagaacagaccatagttcctacccatatacagggtgaaaaggtggtgctaaaacctctctttaaatcaaatattttccaatatgcaaggggcctgtttgcaaatctttttttgcccttgcttttggatgggaccattcctatcaaaacagtaaatactgttgttctgggtgtctgaactgtgtttcttgatgtttacag

SEQ ID NO: 8915 - DNA, 2025 bp, Oryza sativa
  ref <308>: DATABASE ACCESSION NUMBER: AK106263
  ref <309>: DATABASE ENTRY DATE: 2002-08-28
agctccggtggcacgccacggcatccaccatctccgcgtactcgtcggggaggcgcgcgccgacggtctcctccccgagctcgcggaagaaggccaccagctccgcgtccgtcttgcgcatgctcgacagcacgcctcgccgccggaggaacgccgcgtcctgcgggcaccggacgaggccctccatcctcgccacgtgagccgtcacgcacgcgccgtgcgcccagtggaagtgcttctcgcaggcgatcatgttgtgcagcacggtggcgctgtactcgtgcacgtcgaggcaggggatggtcatcaccgccacggggctcgccgtccggccccagaaccacatgtcgaggtcgccgcagctcgccgccgcgctccggaaccacaccgccgaccggcagagctccatggagctcgggaacagccgctccgactccttcttgatcttgagaagcttccgtggcgtcgacaggatgcagtacttgctcgtcggcacgcgcgaccagtgaaagaggtgtagcacgtgctggaacggctcggtgtcgccggcggcggggctcgctcgcttcggcaagatgtcgtcgaagcagccgagcacgagctcttcgacggggcgcaggagcttgagcttgctgcacgaggcggcaagcagcttgacggcggcgaagggtacctggttctcgagcaccggcatgtccagcttgatgtcctcggcgtgctgcgacaccgccatgtgaagtatgaagtactcccggctgatggacgccgcccgcgacacgcagctggccttgtcgccgtcggtgcagaccttgctgagcatcatgctgaccacgaggatgaagcagctgtcaagaagaaccatctgcaggaacttctcctcgtccccaagtatctccgcggcgacatcgtccccgacgtcgtcgtcggcgaactcatcgcggaggcggtcgctctcgtcggcgagcgccgcgacgtagtgttcgacgtcgaggccgcactggtcctgcaggtagcgcaggaacggcagcttggcgtcgtcggggaaggggagccagtggtcacgacggtggaacgggccgatggccacggcgcgcaccgcgtgcagagcgtcgacgccggcgcgccgggagcgcggccggaggatggtgccggagcgctcgccgaggtaccacagcatgggcgtccgcgggataaggtctctcagcacggcggtgttgacgctcgacgacgtcagcttgcgcagccactttgtctccgctgcgccgccggcgccggcgaccgcgccgcccagctccttcttgtccgcggcgccatcgatggaggccgtgccgcccaactccttcatctcccctgcgccatggacggcggcagcgacgcccaattccttcatctccactgcgccatcgacgatgcccaactccttcatctcctttgggccatcgatggcggtcgcgccacccaactccggtgagatgtcgatcaggtggtgatggttgatcgcgttaattttcgtttcctctgccattgtgactctgtttgtccacgaattgggggaatttctctcaattaagcttgtcttcattagtttggatcatacaattatctgacgaaaagggaatctgaaagatcagcgtaatgtggcaagtatgacaagtcacgttctagctcaccaaatcgacaaaatcagacggctatcttgaattaattaaaaaggccaataatgaaggagaaattatgctaatttgattatattatagaacattgggagtaaagatatggtcagattttgaaaaaaaaaaatctactgtcatattatatggacaaacagcaagaggacgaaactgacactgatggctttgtggagaaaagtagtccttgtcgatgttgttggtgtctcgtgatctctccatccgaagattaaaaaattgatgcgaattgacggcgaaatgaactcagttgtacacagttgtaaggccatcactaaccctacatatcaacgagtgtcaatagcattaaatacattgt

SEQ ID NO: 8916 - DNA, 1488 bp, Oryza sativa
  ref <308>: DATABASE ACCESSION NUMBER: AK106264
  ref <309>: DATABASE ENTRY DATE: 2002-08-28
catagatgcgattttgtcctcaccgccgacggcggccttgtcgtcgccgacgccgacatcgggttactgaaggtgagcccggacaaggcggtggagctgctgaccgacgaggcggagggcgtcaagttcgccctgaccgacggcgtcgacgtcgccggcgacggcgtcatctacttcaccgacgcgtcgcacaagcacagcctcgcggagttcatggtggacgtgctcgaggcgcgcccccacgggcggctgatgagcttcgacccgtcgacgcggcggaccaccgtgctcgcccgcggcctctacttcgccaacggcgtcgccgtctcgccggaccaggactccctcgtcttctgcgagaccgtcatgaggaggtgctcgagataccacatcaacggcgacaaggccggcaccgtcgacaagttcatcggcgacctgccgggcttccctgacaacatccgctacgacggcgagggccgctactggatcgccatctccgccgggaggacgctgcagtgggacgtgctgacgaggtcgccgttcgtgaggaagctggtgtacatggtggacaggttcgtcgtggcggtgccccacaacctgaagaacgccggcgccatgagcgtgacgctcgccggagagcccgtgtcgatgtacagcgacccgggactcgccctcaccaccggctggctcaaggtcggcgactacctctactacggctcgctgaccaaaccgtacctcagcaggatcgacctcgccaaatcgccagctgagaaggctcaggagtgagagagaccgtgcatccttggtcgctttgttctctgacttctgctggtgatttgtcatttgtgccttacccctccgttccaagaaaatgacatcgacaaacactccaatataagaaatatccaactttcttaaaatatcattatacaagcgttttttctcaataatgccatcgtcgttagatttttgtcagtagccctccgttaattactaacgtaagagcaagtttaatagtatagctcactaccagctccaaatcatctatagccgatgtaatagctaattcatataatagttgcttgctatactattaatatctggtcccacctatcatacacatattgtgtcttggaacccgtgctgcagctggctatagatctgtagtccgctgctcttctctctcttcctttatctctttaaaatatgtttatagctggcttataatagtacctgctctaagagaagctatttttcttagccagcacaaaatcaaaacctgaataagagagatgagcagtctcgggaacgcaagcaattgaaccacccttgtgaattgtgcctttgtaattttttttttgaacattgtgcctttgtaatggacttgttttgtgtccagaactcgagtttgtgtcagtttactatttaacttaattgcaattgggcctgtatattacatagatggaataattccattttgactccctt

SEQ ID NO: 8917 - DNA, 1573 bp, Oryza sativa
  ref <308>: DATABASE ACCESSION NUMBER: AK106265
  ref <309>: DATABASE ENTRY DATE: 2002-08-28
atcccatattattcgtctccttgcttgcttctctgaatatcatcagagcttgttcagactgtgtccctgttcttgctcagcttctaatccagggatacacagagatatcgcccttttttggcagtgattatctctctctctagcttggttgagagagaagaacagcagctcttgcttgcctccttactttcttcttggtgttcttggagagagagggagaggattagaggttgtgatagatgggtaattgctggtttagagggagcttaattgttaacagagtctcttctaatgcgaagccagagactcccaagatccagagcccatcggagagggaccggagcgacgagagcaagctgccatcgaacgccaaggaggtggaggcgatgcggttggactcgtcggcgcgcaacccgctcgtcgccttctccttcgaggagctcagggcggtcaccagcaacttccgccaggactccctcatcggcggcggcggcttcggccgcgtctacaagggcgccgtcgccgcctccgccgccggcgacggcgacggcgccgagccccagcccgtcgccgtcaaggtccacgacggcgacaacagcttccagggccaccgcgagtggctggcggaggtgatcttcctgggccatctgtcgcaccccaacctggtgaggctcgtcggatactgctgcgagggcgaccaccggctgctcgtctacgagtacatgccacgcggcagcgtcgagtcccacctcttctcccgggtgatggcgccgctgtcgtgggcgacgcggatgaagatcgcgctgggcgcggcgagggggctcgcgttcctccacgaggccgagaagcctgtcatctaccgcgacttcaagacctccaacatcctcctcgacgaggagttcaacgcgaagctgtcggacttcgggctggcgaaggacgggccggtgggggacaagtcgcacgtgtcgacgcggatcatgggcacctacggctacgcggcgccggagtacgtcatgaccggccacctcacggccatgagcgacgtctacagctacggcgtcgtcctcctcgagctcctcaccggccgcaagtcgctcgacaagtcccgccccccgcgggagcagacgctcgccgactgggcgctccccctcctcacccacaagcgcaaggtcatgtccatcgtcgacccccgcctctccgccgccgccgccgccgccggcgcaggcggcgagctgccggcgagggcggtgcacaaggcggcgatgctggcgtaccactgcctgaaccggaaccccaaggcgaggccgctcatgcgggacatcgtcgcgtcgctcgagccgctgcaggccgacgacgaggcgcgcgacgccgccggcgcctgagaagaagggagagggacgcagatgttgttgggattaattaattaaagctgtatcataatgaaaatcaaaagatttggtagtgcagcaagggggtaggtgtagtgattagcggttgagttgagctgagtgtacgaacgttgttaatgtgcagggaagatgattaattaattaattaattacttaattttctg

SEQ ID NO: 8918 - DNA, 1559 bp, Oryza sativa
  ref <308>: DATABASE ACCESSION NUMBER: AK106266
  ref <309>: DATABASE ENTRY DATE: 2002-08-28
gcaacgaaagaactcctggaacggtttttgtacccttgtgccggccgagacggcaccacgcctttctcgtctcgtctcgtctcgtctcatctcataccgcaaccacctccaccactccacgcgcctatatcaccacacgtcacgcttccacctccacctccacctcactgtcgatctcctcccgcttcgatccatccatccatcgccatggcggcggagcgcgtggtggtcgacgagtgccgcggtgtgctgttcgtgtacagcgacggcgccgtggagcgcagggccgcgcccgggttcgcgacgccggtgcgggacgacgggagcgtggagtggaaggacgcggtgttcgacgcggcgcgcgggctcggcgtccgcctgtaccggccgcgggagcgcggcggcgggcggctgccggtgttcttctactaccacggcggcgggttctgcatcgggtcgcgcacctggcccaactgccagaactactgcctccggttggcggccgagctgggcgccgtcgtcgtcgcgcccgactaccgcctcgctcccgagcaccgcctccccgcggcgttcgaggacgccgagaacgcgctcctctggctcgcctcgcaggcgcgccccggcggcgacacgtgggtcgccgaggcggccgacttcgggcgggtgttcgtctccggcgactcggccggcggcaccatcgcgcaccacctcgccgtgcggttcggctccgcctccgggcgcgccgagctggcgcccgcgcgcgtcgccggctacgtccagctcatgccgttcttcggcggcgtggagcggacgccgtcggaggcggcgtgccccgacgacgcgttcctcaaccgcgacctcaacgaccgctactggcggctctccctgccggcgggcggcgccacggcggaccacccgttctccaacccgttcgggccggcgagccccgacctcgccgcggcggagttcgcgccgacgctggtggtggtcggcgggcgcgacctcctccgcgaccgcgcgctggactacgcggcgaggctggcggcgatggggaagcccgtggaggcgctggagttcgaggggcagcagcatggcttcttcaccatcgacccctggtccgccgcctccggcgacctcatgcacgccgtcaagctcttcgttgacaccgacggcggcggcggcgcccgcctcgacggctgatcagccgccgcgtgctcctctctcgtgtgtgccttgtcggcaataataaatcgattcggatttcaaaatgctagaaaattcatttatcaaatgttcaaagttcagaagggggtatatgatccattgccagccatttgcgtatattgcagcttgatttgcgagaggctcctctaactgatgggtgtccctgacatgagtctacgagagtgactcctatctgttaaagattcatgtccctctaaaaattagagaacttattctgctttatttggtaacgctatctattaaggatctatgtccctctgaaagttagcgaaactttctttaatcgaatcagtataagatggtgctatttcatt

SEQ ID NO: 8919 - DNA, 1442 bp, Oryza sativa
  ref <308>: DATABASE ACCESSION NUMBER: AK106267
  ref <309>: DATABASE ENTRY DATE: 2002-08-28
gagtccattgcatcgcccatttcgctcatggatcagtaggcagccaatcattctagcttccatctcaaaaaccagtagcacatcatcatcatcatcatcatctcaacctcaatctcaagctacaaaatcctccaagaattccaagaaaccaaaggcttgacactattgcattggattggcggcatgaggagaggaggcttccatggcgcggcggcggcgtcgccgacgacggtggcgagggcggggagggtgatgagggcggcggtggcggcgttcttccatggctaccattgctacacctccgtggcggggctgctggtgctgccgttctcggccgccgtgctggcgtcgggcgccatggcgtcgccgtcgtcgggagcgctggcggcggtgtcggcgaggatacggcgcatgttcgacgccgccgggttcccgccgtcgtcgttcttcgcgctgttcaacgccaagctgtcgcagacggtgttcacgttcgccgccgcgctgccgttcacgctcacgttcctgctcctcgccaaggcgtgcgtcgcggcgatgctccggccggacgacgatggcgaaggcgtggcgcggcgagggcgcggcgtggcgagggcgacgcggctcccgccgtgcgggagcgtggcgggcgcgtacccggcgatggtggcgacgcacctgttcggcgcgttcgtgatgctgtccgcgaacgccgccgtgttctccctcatgttcctcgccttcaacggcgccgacctcctgggcctcaccaccacctcccacgccgcggcgacgctcgcgctgtccgccgcgggcgccatcgcctactcggtggccgtggggatcgccaccgtggtctgcaacctcgccgtggtggtgtccgccatggagcgccgcgcgggccacgccgcggtgctcagggcgtgcgtcgtcatccgcggccgcgtgcccaccgcgctggcgctcgcgctcccgaccaacctcggcatggccgccgcggaggcgctgttccagctccgcgtcgtgtcgcaggcgcaacgccaccgcctcgccggcgccggcgacggcaagaggctcgcggcgggcgtcgccggcgaggcgttctccatcgcgtacatccacgcgctctgcgtcgtgctcgagatcatcgtgagctgcatgttctaccggagttgcaggagaagcgaggtcgacgagctcagagagctcgagccagaggagaagggtgacctccaagcttgagctcaagtgtaaaagaaagtgttaaaaaaattttaaaaatgaatagatgtagcatttgaaaatttcaaataggtttgaaattatgatgagcatatatgaattgagatagaattattctggaaattgtttttttgttttgttgggagtaaattaatggtatattggggttaataaataatgaatggatgattctcttgtacagt

SEQ ID NO: 8920 - DNA, 1371 bp, Oryza sativa
  ref <308>: DATABASE ACCESSION NUMBER: AK106268
  ref <309>: DATABASE ENTRY DATE: 2002-08-28
ttaacgagattcccactgtccctgtctactatccagcgaaaccacagccaagggaacgggcttggcggaatcagcggggaaagaagaccctgttgagcttgactctagtccgactttgtgaaatgacttgagaggtgtaggataagtgggagccctcgggcgcaagtgaaataccactacttttaacgttattttacttattccgtgagtcggaagcggggcctggcccctccttttggctctaaggcccgagtccctcgggccgatccgggcggaagacattgtcaggtggggagtttggctggggcggcacatctgttaaaagataacgcaggtgtcctaagatgagctcaacgagaacagaaatctcgtgtggaacaaaagggtaaaagctcgtttgattctgatttccagtacgaatacgaaccgtgaaagcgtggcctatcgatcctttagaccttcggagtttgaagctagaggtgtcagaaaagtaccacagggataactggcttgtggcagccaagcgttcatagcgacgttgctttttgatccttcgatgtcggctcttcctatcattgtgaagcagaattcaccaagtgttggattgttcacccaccaatagggaacgtgagctgggattagaccgtcgtgagacaggttagttttaccctactgatgaccgtgccgcgatagtaattcaacctagtacgagaggaaccgttgattcacacaattggtcatcgcgcttggttgaaaagccagtggcgcgaagctaccgtgtgccggattatgactgaacgcctctaagtcagaatccaagctagcaagcggcgcctgcgcccgccgcccgccccgacccaccgaaaccgtcatcttcatcctcccccgggccggcgtcgcggcgtggccgactccgacagccgccggacgcatcggccccgccttcctccacctcggcgccttccctccaccgccgcgacagccgccgtcttcgtcttcctccgttgtgccgccacgccgcgtcgagcaccgcctcctcgcgtgcccctctgcctcgttgcattccccgtcgccgcatcggctgtcgttgccgcgccggcaccggtcccgcctcgtccgccgtcggaacgccggctgccgccgcagcgccccgcgcccacgccggtcttcgccctgcgccgctcggtggagaggagcagagaggggaacgagaggagagatcaagaagaggagcaggaaagaaaaggggataaaagagaggaggtgaggcacggacatgcgggacccatggttccttaatcatgtgtgcacagtaatcaccttgttaatcctcctctaaggtctccatgacacgtgggccctattgtgctt

SEQ ID NO: 8921 - DNA, 1676 bp, Oryza sativa
  ref <308>: DATABASE ACCESSION NUMBER: AK106269
  ref <309>: DATABASE ENTRY DATE: 2002-08-28
attcctcccggctccccccacccaacgcacacgcttcacctcctcctcctcctcctccaccaccaccaccatggcggagacgaagatcgaagggccaaccatcgccgtgaagctgttcgtcgacaaggagaggagccgggtgctgttcgcggagtccgacaaggacttcgtcgacgtcctcttcggcttcctcacgctgcctctcggcaccgtcgtccgcctcctcggcaggcagtcgcaggtcggatgcctcgacgagctgtacaagagcgtggaggatctcagcgccgactacttccacaccaaggcctgcaaggcgatgcttatgaagcctcacgacaccgcagcggagcagtgctgcctgctcaaggtcaaggtagatgacaccgatcagtcggcggtttatgtttgcagagatgcaaactgcagcgccaatggcgattgcggggtaacctcggtcgctggttccgtttgcaaatgtggcaaggtcatggagtacattggggagtggccacaggatggtggtagcactgctgctgctggttccgacggtggagtttttgtcaagggatgctataagttcatcgtcactgatgatctccatgtcgcacctgcagcgacatctctaatgatgtccatttttgacaagtatggagtgcgtgatccggctaatcttgaacaaaagattctccagctcaatgcagaaaagataacttgcttgctcaaaagatcactgacatccaagcaaactttaactgggtactacttcgatgtccctaatccaaacgatgaagcaaatctctatgtgctaccagagagcttgtattctgaacaagatgctgaagtggatcacaagctaaacaatatgaagataaaagttcttcagaggaaaaacaacacctccctgctgtatgctgaagttggtgaagattttgtcgatcttctctttggcttgctaagcattccacttggctccatattaaagacttatggtaagtggtcatcaaatggatgtgttgataatatttacatgagcatagatgggagcgccaaaggttgtatgaatccagaacgccagatgttgctagcatccccaaatgtggcttctttctttggctgcagcgctactaatatgttaatacaacttggagaagcagctccaaagcagagaaatatcagtggctgcttcaagtgcttcaagattgctgggttttggccattgtagcgaccaaatttggaacactggtaaaaaggcttacgtatataaaaattgcctcggcactacaaagacttgtaagctttgtgagattaatccaaaagtaccaagcggaggtagtcacaagggcgaagggtatgtcaagccaggggttcaaaaattcatggtcactgatgatctgcatattcttcctctgtccttgacaagcaccctacaagtagttagtgaatccaaggtacaggctaaggatctcgtggagaaagaattcactctaacaaaaatccaggttatggagcttctaagggctgttctggtgactcgcaacacactcagctccgtgcttctgcctcccaagaagaagaagagactgcatctccagtctagtctgtattaggttactgcctcgtcgttccagtatttctgtatcctcaagtactaatccgagtatccaagttgccgt

SEQ ID NO: 8922 - DNA, 1521 bp, Oryza sativa
  ref <308>: DATABASE ACCESSION NUMBER: AK106270
  ref <309>: DATABASE ENTRY DATE: 2002-08-28
agcagcaaaaccacccaaatccccaattccgaccccaaatcgcacagaaaccctccccatggcggacgccgccgccgacgacgatgcgcctccctccccacccccttccgcgttctaccccgcgtccgccgatacccccatgtccgacgccaccccagccgccgccgataccccaaatctccccgacacccccgcctccgcctccgccgaacccgagacccccttctccgacgccgcgccgccgatgcatccgatgctgatgcctcgggcgtcgccgcgccacccgacgacgacgggaccaacccgttgggcggcgccatgaagcacatggccctcgcgcccccggcgccgccgagcaagaagtccaagaagaagaacagcaacagcgtctggaccaggcccaactcccgcaagggcaagaagaaggccaagcagccggccaacgccctcgccggcggcagcggcggcgccaacggccgcctccccaagccctccagcggcgaggatgagctcgtcctcaccccggcgccccgattcgccgccgagcgcaacgacgacgcgcccgatcggcccgtgctcctctcccgcgtcttcaagtccgacaaggtcgaggtctccgacgaccgcctcaccgccggcagcacaaagggctaccggatggtgcgcgccacccgcggcgtcgctgccggcgcttggtacttcgaggtcaaggtccttcacctcggcagcaccggccacacccgccttggatgggctaccaacaatgctgacatccacgcacccgttggctacgatgtgtttggattcggataccgcgacatggatggcaccaaggtgcacaaggcatggagggccaattacgctgagcaaggctatggcgatggcgatgtcctcggcttctacattcatcttcctgacggggagctgtatgagcccaagcagcccttcctggttcactacaaggggcttcctttccgcgcagaagctcccaaggcggctgagcagaagacgccggatccagttcctggtagcgagatatgctacttcaagaatgggatatgccagggcactgcttttgtggacattcctggagggcggtactacccagctgcgtcaatgtatacactgcctgaccaaccaaactgtcaagtcaggttcaactttggtcccaattttgagttcttcccagaagattttggaggtcgattgattcctcgaccaatgagtgacgtgccttatagaccatttgagctggcgaatggcgggcctgctgaaaatggtactgctgaaaaaaacatttaactgcagtgaaaattctgctttagttatgtagaatagagcataatcatgtaatccggttaaagagcgcgcaggctgattggttagtttgtctggttattaaatattttatcacctgaggttcttctggtttggccatttgaccttcgtgtagcaacgcatggcttcaatctttcccatcaacgcatggctttaatactgttaacacaagatttcgtcaat

SEQ ID NO: 8923 - DNA, 2320 bp, Oryza sativa
  ref <308>: DATABASE ACCESSION NUMBER: AK106271
  ref <309>: DATABASE ENTRY DATE: 2002-08-28
agcagcgaagactgatatgtataatgagcttacagtatgccaagaggagaaaaatgcagcactcctacaggtacaacagctggaggctaatctgaagaatcttgaaagtgagttggaacagaaacagagccaagtttcagctctagagcaagcaaatgaagaattacgagagaaaatttctagtttggagaggcaactagaagaggctagaagtaagctgcaggacgagatcattaagctacaaggagaaaaggaacgagcacttgataatttgcagcagtcaaacacttcaattaagacatttgaagaggaattagagaaacagagagaacataattctattcttcagcttgctaatgacgatctgcacaagagcatcgctaacctggagaaggaacttgaagacaccaaggttagttctcatgctgaaattttagcactacaagaacagaagaacaaagcactgtcagacttgcagcagtctgaaatctctatcgagaacttcagaatggagttagagcaaggaagagagaaaatttcaatcttggatctatctaatgaagaaatgaaggataacaattatagactgaaccagcaattggaggagataaggactagtctgcatgctgagattgcagctctacatgaagagaaggatgcagctcaattagagttacagcaatctctggcttctgcgaggaacttggagacggtgctagaaaagcaaacagagaacctttcaactctacagcacgctaatgataacttaaagaagaacaattgtaccttgactgagcaattcgaagtaatcaagattgagctgcaggaggaggttaagatggcacatgaagagaaggatgccacactaacacaactagagaagtcagaggattctatcaagaatcttgaaagtgagttggcacagctgaaggaggaactatcagttcagatggaaagcaattccagcttgaacaagcaattggaggaggcaatattgaaagtgtcaaacttaactgaggagctcgagacagttcaagctgagactgccagtaaaattaatgacatggaaactaacacaaaagatttggtaaatacaattgttctattatcttctcagaagaacaaagtggaggagcatatgaaaattattaccgaagcatgcatggagaaaatgtcatttatgaaagatttcgaagatcaagtaaagcaaaaaattacagatcgtgagatagcaattgcttgcctccagcagagcctcagaggaattattggcagctgccagagactccagtatgcatatggagaggtatccacaaaggcatcacaccttgaggtacttaggaggaatcacctcgtgcagatagatacattggagaacaaacacacagaaattatggagaaacatcgtcatttaggggaggaaaatacatctgcaaacaaagagaacagaaagctacaaaatcatgtccaagaacttgaagctcagctccagctagccaggcagaagcttagagttactgaggcagaaagcaaaagcaaagaagacagctatgtgatggcagtggaaaaatcacatagagagatccagtatcttgaacagaaaatacagaaatattctggacagatcaactcactggaagaaactctcgtacaaataaaaggaaatgctgagtccggaacctccacactggttgatcaattggatcagctagaatcacatttcaataagagtttttcccacttctctgcccgttcatttgcatgcagtgaagagctcaagctcttaaggaacaggttacagcaccatcttgctgaacagaaagaattggtcaagaagaatgatgtgctaggtatgaggttgagagagaaagaaaacgttttgtcagaaatggtgagaagtgcttccgaggcgaagaagaagatggctcaccttgagaagacaattgacgagaaagaagaagagatatcagctagggtgcaagagaaaagagaagctatcaagcaactgagtaatgcaattatttaccacaagaacaatagcgatgatctgatccgctacattcgcaaccataaccgccgtcgccttccattttgtttgtaattttgattaaaaatagtaatgccagtagatgtaaagcttgcgtatattctagctttgaactgtggcagaaagggaactgttgccagatattttttttctcatcatctcatgtatcatataaagttctgaaatactcatcgaagtagtcagacaggttgccctttattctttgggcaactggaagtgctgaagatatttttgttgttctttgctcttgtc

SEQ ID NO: 8924 - DNA, 1765 bp, Oryza sativa
  ref <308>: DATABASE ACCESSION NUMBER: AK106272
  ref <309>: DATABASE ENTRY DATE: 2002-08-28
ataagataatgtagccttcaaatttcagggaaaagaaaagaatctggtggattagattcgtagctgcaagatcaatatttttacagaaatgaagtgaagcgactgattggccgccgattcagcgatgattctgtacaaaaagatatcaagctttggcctttcaaagtcgtggcaggtcaagaggacaggccgatgatcgtggtgcggcatgaaggcgaggaaaggcagttcatgcccgaggagatctcctccatggtgctcgccaagatgagggagacggccgaggtgtacctcggcaagacggtcacgaacgccgtcatcactgtcccggtctacttcaacaacgcgcagcggcaggccaccatggacgccggcgccatcgccggcctcaacgtgatgcgcatcatcaacgagcccaccgccgccgccctcgcctacggtctcgagaagatgcccgtcagcaacaaggggaggatggtgctcgtgttcgatctcggtggcggcacattcgacatctcccttctcaacatcgatcccggtgtcaacatcgatatgggcctcttcgaggtgaaggccaccgccggtgacactcaccttggcggagcggatttcgacaacgagttggtgaagcactccttgcgagagttcaatcggaaacatgggtcgatggacattgaaagcaatcagaaggcgttaaggagattgaggaccgcctgcgagagagcgaagaggatgctgtcatccacgatgcagaccaccattgaggtagactcgctccatcaaggcatcgacttccgcgtcaccctcacccgatcccgatttgaggagctgaacaaggatctcttcagcaagtgcatggaggctatggagaattgcctccgcgacgccaaggtggacaagtggagtgttgacgatgtcgtcctcgtgggtggctccacccgcatacccaaggtgcagaagatgctgagtgagttcttcgacgggaaggagctctgccgcagcatcaaccccgatgaagccgtcgcgtatggcgccgccatccaggcctccattttatgtggtggaaccgatgataagaggttggttgatatgcttctccgcgaagtcacgccgctctcgctaggtgttgagactgaagataattgtacaatgagcgtggtgatcccaagaaacactgcaatcccgaccaagaaggtgaaaaacttcactactctctacgacaaccagatcaacgtgagctttccggtgtacgagggtgagagcgcaaacaccaaggacaacaacctgctcggcgagttcacgctatatggcatccccccggcacccaagagagtgccatctatcgatgtcactttcgacattgatgccaacggggtcttgaacgtttctgccgagcacaaggtcaccggacagaagaacagcatcaccatcactaaccgcagcggacggctgaacaaggaggaaatcgatcgcatggctctggaggccgagaggcacaggatgaagcggatcaagcaaaacgaagtagtctaaatgaactgaacattgaaagtgattctgcgacctaccatgatcaaagaagtatcatcggcatcctaatgcaatgggctagctgctacaggggtttgattattgggtgcttaacgctagtattgtcatgcaacttctggcttggcacatgtatggccaaatcctagcttaagcttttattaattgtttctgggacaatgttttaattgctgatattggagtaatcttctgtatc

SEQ ID NO: 8925 - DNA, 1336 bp, Oryza sativa
  ref <308>: DATABASE ACCESSION NUMBER: AK106273
  ref <309>: DATABASE ENTRY DATE: 2002-08-28
ctccaccacaggttcagctcgcctcctcccgtagccaacttccacgcagagatcgccaaccaccatgccgccgccgtcgccgcacccacctcaccgcaacggcaaccacgtcccggcgccctccggcgagtcgttcgccaagttcttcgagtgctggatctccgagcagtcccgcgacctcgccgcgctccgctccgccgcgtcggcggcgacgaaccccgcggcgccgcccgacgacgccgagctccaccgcctcgtcaaccgggtcctcggccactacgagcactactaccggaccaagtccgccgccgcctccaccgacgtgctccgcatgttctccccgtcgtggacctccaccaccgagaacctctacctctggtgcagcggatggcgccccactgccgcgctccacctgctctactccaagtccggcgcgcagctcgagacccagctcccggtgttcctcgccggcggcggcctcggggcgggcgacctcggcgacctctccgccgagcagctccaggccgccgaccagcttcagcggataaccgtcagcaaggaacgggagatcgagaacgccgccgcgagtgcacaggtgagtgatggttaatttgttctttcatcagtgaggtgagctcgatcagcatccggatgcaaacgtgaacaatgcaggagtcgttggcgacggtgaagatggtggagctagccggaggcggcgggatggacgcggaggggatggagatggagatgaggagcaaggcggacgggatgaggcgcgtgctggagatggcagacgggctgaggctggagacgatgagggaggtggtggcgctgctccgcccgtcgcaggccgtgcacttcctcatcgccgccgccgagctccacctcgccgtgcacgagttcggcaggcgcaaggacggcgacggcgccgcgtcgccgccgccggcgtgacgcgtgcgcgctcgtgtcgtgtcgttgccgttccaagtgcgcggcgtggtctccgatgcgtaggctcgtcgtctagctctggtcaactcaagtcgtcgcgataagctttgaccgatatttatttatgcagtactcgtacactagtatttctctctctctctcttttttttctgcgatgaagccgatgatacctgtagggttttttttttctttcttttttgcgtttgcatgtgatggaattttactaccgtactttggagcagctgtttctatatagacagtgagctaacctgcgtgatatttctaatcaattcgggaagggaaggataaaattgttttttgttgctatgtgttcgaatcttaatgttaatcacaccgcttaacc

SEQ ID NO: 8926 - DNA, 1772 bp, Oryza sativa
  ref <308>: DATABASE ACCESSION NUMBER: AK106274
  ref <309>: DATABASE ENTRY DATE: 2002-08-28
aactaagctaagtgggcagtgggcaccaccatgtcgtcgtcgtcttcctcgccggcgccgccgcacgtcgtcgaggactgcctcggcatcgtgcagctactcagcgacggcacggtgacgcgttccggcgactactccagcatctcgctcatgcgcgacgtcccgatcgacctgcccgtccagtggaaagacgtcgtctacgacgccggccgcggcctccgcctccgcatgtacgcgccggcgaaccacggcggcgaggaggggaagcttccggtgctcgtctacttccacggcggcggcttctgcatcgccagcttcgagctgcccaacttccacgccggtgcgctccgcctcgccggcgagctcccggccgtcgtgctctccgccgactaccgcctcgcccccgagcaccgcctccccgccgcgtacgaggacgccgtggccgtcctctcgtggctccgcggccaggccgccgccgccgccgacccgtggctcgccgcgtcggccgacttcgagagggtgttcgtctgcggcgactcgtgcggcggcaacatcgcgcaccacctcaccgtcggctgcggctccggcgacatcgcgctcgacgcggcgaggctcgccgggtgcgtgatgctctggccatacttcggcggcgaggagaggatgccatccgaggcgccgccgccgccgccggagggcgacgcgtcgccgtcggcgatgggcatcacgctgttcgaccagatgtggcggctggcgctgccggcgggggcgacgagggaccacccggcggcgaacccgttcgggccggagagcccgccgctcgacggcgtcgcgttcccgccggtgctcatcgtggaccccgagctggacgtgctccgcgaccgcgtcgccgactacgcggcgaggctgcaggccatggggaagcgcgtcgagctcgtcaagttcgaagggcagggccatggcttcttcgtgctcgaccccatgagcgaggcctccggcgagctcgtccgcgtcgtcaggcgcttcgtgcacgccggctaggtgatcgtccgaagtaaaccaagatatggaactcggatgacttgtgtactactccagtgttctagcgcgggagatttgcagcttgatcctttcgtcttcatcttgtcatccgtagccaatatttcaattttataaattgtttttatagttgattttgatgttttcttatcgtagtttattttttaaaatattggttttaagtcgttaaaaacacgtgtacacaaattttgatccttaattagtttttaatatcgctaataaatgttatggtataatcctcattttagatgttaggatctaccaactacttttcacttttaagcgctgtttgggttaaaaaaaataattaaagcgaaatggtttgtagcctaatggttacaatagcctccctaacaccttaggtttttggttcgactctccatgggagctgtattttgatctgtgttctctacaagtttgcaactctacttgctaacagttatgcatttgaaaatataaatgaaatcgtgcagagacaagcgacgatatatgttggacacaattgttcttttcatttatttattttcttgttgatttatactcgtgatatgatatacacggttggaaaatccgagttttttctctctttttttttttttgctctctacaagtttgcaactccacttgctaacagttatgcatttgaaaatataaatgaaatcgtgcagagacaagcgacgatatatattggatac

SEQ ID NO: 8927 - DNA, 2572 bp, Oryza sativa
  ref <308>: DATABASE ACCESSION NUMBER: AK106275
  ref <309>: DATABASE ENTRY DATE: 2002-08-28
tataatatatacttccttgaccactttaagacagatcgatcttaagaagatcattgcctactcctcagtagcccatatgaatttggtgactattggtatgtttagtcgggcggcggccgttaggtcacctatttgagttatggacacacaagcaaggccaaaacatgtgtgccgggcgtgcgacccatcaacctactagcaatagggggaaaacttagcatgtcgcaacaaaagcgtcgattcgaggcgtcagcaaaacaccgccgtctgttcctaaaacaaaaccccttagcgccccggggcgggagtgggggacggccctacgcagacagcagcagcaccggctctacgaagtccgaatcgaatctttcggttcccgtgaataagaattgttgggcgcggcgaagcgagcgcttctagctgtttcgcttgcttctttcttattgtggcggctattatagcgtggctgaaatgaccgaaaagcgagatgaaccttttaaatcgattgatatagatggcctgatctgttctgatagatcgaaagggaatctatcaataataagggttgacctctttctatctattgatgatacaagatatctatctattctggatccatcagaaagaaatcgatatgtatctgatggagtctacatcgtatgtagagcgcccaagcgcttttttggccagctcagttctattatccatcggtccaatgcactggcgcatctcatggggggaaaaagcaaatgtagttagttgtcttgttgttgttcgccgcctcgacacattccccggcatcgtcccacacagaaagaaagagcgtggagccccggcccgacctgtaagtccgctaacgtaaagcgaggagttgagcctgaactggcgaaccgaagtcactttcgtaaccatacttcctacagctaacacgtgtccggtccagcgggaacgcgcagcgcaaacgaacgtgagctgctttaccgaatatcccccgctggccatcggggacctagtggtaaggccatgatccgcagcgcaggggaagggatcactcattcttctattggggacaggtgcacgaacgacaactccaaacgtcagacatccgccgcctatacctaccgtttaggtggcaccagcgagatccagctaaggtaaggaacttcgtgtcgcggctgctccactccgctgcggtcttttgaacagaacttcgttgccttcccgcgcgcgaaacgaatgggcgcagtgtcgtgggtcagttttggggcggggggcagagagagaccagaagaatgattcatttggatcgacgagccatttcgcgattcaatagaatgtctctctatccatatctattctatctttatatgacgggccataaaaaaaagaagtatttttttatggcatgtgagatgatcgcgcctagtagccacatatcagctgcgctcaatatgcgggatttccgttggatctgatctttcgctttgacgaatttggacctagcgaaaaggactctaagccttcgcgcaaacaagcaaagtagaagcaagacgaggaagcggagctgtcgtagaagcagtagcttcccccgacaatatacaatacaacagccatgaataaaaaagcccctagtttaacgagttcgctgcttttcctaggccggagaagggcaactacttattgattgatcgcctttctttgatatgtgttcaatttagtacaatacaaactacaactagatcaaagcggaagggccactcactatagaagctataactagcctagccctagccaatagtatagtttagtagtcggccaaacccccatgctcacgacatgttcttgatattgattgagttggagggagtcagagactaccacggaatccttccatagtcaccccggtgaccttcgtcaccaaagcgtcacgacagtttccaagacccctcatataatctcctgtggggatcagtcggagcacgtaggaatgccgaccactacataagccgcaggcggagaaagctcgaagagcttcccttcattcgcttcgcgggagtcgcacacagcacatagctggaagtcagagggcccgtactacctgcctaacccttcgctccgagggaccgtagaacggaaagcgccttctaaacaactcggcagaagggaaggggcctatgtatttgcatgacccctgcggatttgaccctacctacacccggagccaatcccctagcggtcctgccaccacgccgcagaacaggagctcgtgtggaaccttggatttctggcgtaacagcggtggaagttataaaaatattacggccgcataacataggggcctacgctaaggtcggccaaaatatggacacccgaagggcccggcgcgcacaatcctatcctatccgagcccgtcattgcatgcacttcggacagccgtccgtagcatcataaagagcacctccctttcgaggtacccaaatggaacgggctttatttgtgttgttggttggtctttctcaacgtggtctatagcacgaaaaaccattctttacaagatagggccgttcacatg

SEQ ID NO: 8928 - DNA, 1621 bp, Oryza sativa
  ref <308>: DATABASE ACCESSION NUMBER: AK106276
  ref <309>: DATABASE ENTRY DATE: 2002-08-28
accttcccctccccttgctttctccatctccggagatcggagctcgcgtttttacctcacgaatagcgcgagctcgcacaaattctattccgcgacgcgatagtcttgcactcttgccccgcgctgagtccttggcatctgatgctttatctctccaaaagttgcagcttaaagcatagcaagtgcggttattgggaggcttttgttgcaagaactggatttttcccgccggttattcgaatcgggaacgctggaatcactgacacctattcgtcgtgaggattgattccgcgagaactcgattcgggatcgagttctttggaagctggttccccattgctgcgccgtgcgcgcgtggaatccaataataggcgcggcttctgtgctcgtagataagctgcggcgaccggagacggcgagagggagcatatgggcgcgggcgtgtcagacctcgcggcggggatggaggccgtcggcaaggtcgcgggcggcgccgggctgggcgagctgccggagctgtgcgccgccgaggtgctgctgcacctggacgcgccggagatatgccggctcgcgcggctcaaccgcgcgttccgcggcgccgcggcggcggacttcgtgtgggaagcgaagctgccggagaattacgggtatctcctggacttcgtcgatggcgccatggagggcggaggaggaggaagagagaggagcgtgatggggaagaaggaagtctacgcgaggctcgccaaggctgtgccatttgacggtggcaagaaggaattatggttggagaagagcaaaggcggtgtttgcatagccttgtcgtcgaaatcactggtgataacgggaattgatgacaggagatactggtctcacatgccaaccacggaatctaggttccattcggttgcatacctgcagcagatatggtggtttgaggtggttggagagctcgaattctgcttcccggcagggacctacagcctctacttcaggctccatcttgggaaggcatccacacgtttcggtcgccgcgtctgcagctcggagcagatccatggctgggacaagaagcctgtgcgcttccagctctcaacgtcagacggccagcacgccttgtcccagtgctacctggacgagccaggaagctggattctttaccatgttggtgatttcgtcgcatcgacgactgaacaacccatcaagctcaagttctccctggcacagatcgactgcacccatacgaaaggtggtctctgcgtcgattcagtgctgatttatcccaaaggatttcagcaagagaaggtgattagttctcagaagtgaaagtgagtttgtgcactcgaccaaagttgctctacattagaggattagagctgtagatagtgtagtgtagacaatagcctaccgtttttaacttgggcttattgtatgcaatggaagaatggagtgagttttttttgtgcggcggcgtgatgagtgagcttcgttgctctttctcacagtggtggccatggtgctgaggggaatgtcttgagctcacttaccttcagtcacggctccaaagtgcttgtactgatgtaagcatacgagcatagttttcaggttttgctttttttgcatt

SEQ ID NO: 8929 - DNA, 2330 bp, Oryza sativa
  ref <308>: DATABASE ACCESSION NUMBER: AK106277
  ref <309>: DATABASE ENTRY DATE: 2002-08-28
aaccatggatacaagctagctttgcttcttcttcttcgtcttcttgtaccaaatcattcaaagttttctttcttcaagccttcaatcttctatatatatctccctccatgatcaaccagctatagctacctcactccaacaatcgccgaccacgatggccaccacgaggagcggcgtcggcggcgccatcagcgacccatttgcgacgccggggttccgcttctacccgacggaggaggagcttctcggcttctacctccgccaccgcctcgccggcacgaggcccgacgtcgagcgcgtcatccccgtcgtcgacgtctacggctaccacccgtcccagctcgccgccctggccggggaggcgagcgcgcgcgacacggagcagtggttcttcttctgcccgcgcgccgagcgggagctccacggcggccggccggcgcgcaccacgccgtcggggtactggaaggccacgggatccccgtcctgcgtcatctcctccgccacaaacagggtcatcggcgtcaagcgcaccatggtgttctaccagggccgcgcccccaccggcaccaagacccgctggaagatgaacgagtacaaggccgtcgccgacgacgccgacgccgccgccgccgccatgctccacccaatggcgcctcccaggctgaggaacgagctgggagtgtgccgggtgtacatcagcacgggcacgctgagatcgttcgaccgccggccgctcgataatcaagcggcggcgcccaccaagcaacaggtgatgccatctttgacggcggcggcggcggtgaacacgaacctctgcggcggcggcggcggcgtcgtgttcgccggtgcacaaggagacagctcccgcgactgcagctcgtcgtcggggtcgcgagaactcgccggcggcgccgatgggtctgaagacgacgccatcgactggaactcgctcatcagtagcgccactgctgatgatctcggcttcaacaccgtcgttggttttgatcctagcatcgtcggatcatggccacaagtctagtgcttgattacgcgtaatataaaattaatcgagtttagtgatcagttagttttttgttttttttgcaagaagttcaaaaattattgctgtgtgttttgcactgagtagcaaagatgggaggattagaagatgaatcgattagtttgcaaatcaggtgaattaattagagtaattaacatctgtagtaatagtaagtagaaaatcaaaatgagaagttgtagcagaaagtgtatactaccacaaatccgttcttagtccgactccgaattaatcccagacggaagatcgatcgagaccgattcggagatggagccgattttgcttggaaatcaatggagaggtgaaatgggatcggattcatgggcggctacataagcaggagtcgagaggccgcaccagctcatcatcatcatcatcatcatctcattccccgcggttcgatcctcctcgcgctctcgtcgtcgtcgtcgtcatctccggttgatcgatcacttcacttcaagtcgatgtcggccatggcggctctccctgtgctgctcccgaccccgccgaggagcaagatgctgccgctgctcccgacgccgtgcctcgtcatcctccccgccaacttcgccacgtcggtggcctccaacgcgcccaagcccggccgcgccgacgccgccgacaggtgggacacgcacaagaaacccaccagctcgtcgtcgtcgtcaagctccagcaccgggagcgccagccgcgccgccgcctgcgagcgcaaagaacccggcagcccagcgtcgtcgtcgtcaagcagcggcgggaagcccggccgagccgactcctgcgagcgctgggacacgaacaaggccaagaaccagatcatcagcagcggccgcctcacgccggcgtcgtcgtcgtcgacgaacgcgcgctgggacatgaacaaggtcaagaacacggcgccgccgtcgaacagcaacaagcggccggtgagccgcgggtccgcctcggccgagcgctgggacatcagcaagaagcatcgctcgcaggacgccgccgccgccgctctcggctcggcgagtgatcggaagttgacgacggtggcaaagccgcagcagccgctgttctctgggccggcgttcctgacctcgccggagccaagcatgcttcccatgcccaccttcttgatggcccgatagcttctgcttgtgcatttcaacttcagatgaatcggactgtagttaggatgggatttgatgaagcatgttattctttgtgggtctgtttgtgatcaattgaattgaattgaact

SEQ ID NO: 8930 - DNA, 1366 bp, Oryza sativa
  ref <308>: DATABASE ACCESSION NUMBER: AK106278
  ref <309>: DATABASE ENTRY DATE: 2002-08-28
atcatggcgctgctgagcccgcgtgtgccgcggctgccgctcgcctccgcctccgccgctggagcggggctccggtgctgcgtcagcggcggcagggccgggtcggcggcgtggtgccacgcgtcggcggccagcagcgtggcgtcgtcgtcgtcggagctggaggccatccggtgggggaccgccaagctgcagggcgcgcgcgacgagatggaggacgaggtcgtcctccgccccggctccctcctcgacggcttctccttcgccgccgtcttcgacggccacgccggattctccgccgtcgagttcctcagggacgagctgtacaaggaatgcgcggcggcgttggacggcggcgcggtgctgagcaccaagaacctcgacgccatcaccgactcgatccagcgcgccttcgccaccgtcgacgccaacctctccacctggctcgagcagatggacaaggaagatgagtccggcgccacggccacggccatgttcctcaggaacgatgtccttgttgtctcgcacattggcgactcctgcttgcaggtcgtatcacgcggtgggaggcctcaagctgtgaccaacttccaccgaccgtacgggaacaagaaagcgtctcttgaagaggtgaagcggatcagagcagcaggtggatggattgttgatggacgcatatgtggagaaatttctgtgtctcgtgcttttggagacattagatttaagacacggaagaatgagatgttggtaaaaggagttaaagaagggagatggactgaaaagtttatctcacgaataaattttaaaggagatttaatagtctcttcacctgacgtatccctggtcgaacttggaccagatgtggaatttgttttgctagcaacagatggtctttgggattacattaaaagctctgaagcagtagcattagttagggatcaactacggcaacatggggatgtccaggttgcctgtgaggcacttggtcagatagctctggatcgtcggtcgcaagacaacattagtatagtcatagctgacttggggaggacaaactggaaggagctgcctgctcaaaggccaaatttattcttggagttaactcaagcagttgcaacagttggggccgtctcattagggatttatatttcatcgctccttgcgttgcagtaggcctaggtagttctttcaagtgtgtatagtacttacagttttacggtctgcaacttctagctgcaaataatgtacattcttatagggtaaatgcataggatatccgttgaatatgtacttcagctcctgctggccaagatattaatggggctcttttttttttctggaagatcctttgattcatctcaaaaat

SEQ ID NO: 8931 - DNA, 1946 bp, Oryza sativa
  ref <308>: DATABASE ACCESSION NUMBER: AK106279
  ref <309>: DATABASE ENTRY DATE: 2002-08-28
gatgcataaactcctggccctaaatcagaggcagaaaatggttttacagcggaaaactgaagaagcagcaatggctacgaaaagactgaaggagtcgcttgaagcaaaaaagtccacccgtgacacatatggaagtgcaagcggttctgggattcaggctttaatgcgggccattgatgatgaacttgaagtgactgtaagggcatacgaattgcgttcgcactacgagcgacaaatgcaagagagagcagcaatctccaaggaaatagcaaagctgaaagagtgtcctcaggctatgtctcctagtgctagaagttctaggatatcagcgctagaaaacatgctgtcatcatcctctagtgcaatggtgtctatggcttctcaactgtctgaagcggaggagcgagagcgtgcattcaatggtaagggcagatggaaccatgtaaggtcccttcctgatgcgaagaacacaatgaattacctttttcagttggcatcatcttcaagatgtcaacaatttgacaaagaggtgatgtgtaaagagaaagaacacctcatttgtgacctgaaggaaaaggtggttgcacttaatggtagaatcagacaattagaaactcaagtgaaggatttgaataaccaaaatatgctgttatttactgctataagtgaagcaaaaaatcctgttggcacttccagaaagggtactgttggttctgaagatggtcaacattatgctatgcgaaagagcattcgagcttcccatagtttacattatagtaagaacagcttcttgtggtctgatgacatggatatatcagattctgagaaatcggaaggatctgatgcagattgggaagcatctgatgcagactacggagcatctgatgcagattgggaatgttcgaagaaggtcagaagacgtcggcaaacagtgtccagccatctgaatcctaacccgggtagtggtactacacaaaaaagtgcaaaatcagaaatggccagtcaagaaaagtctacttcactggaccttgctccacagtgctgctcatgctcgaaatactcatcctgcaagacccaaaaatgcgaatgtagagcttcaggttcacattgtgggggtgattgtggatgtattacctccaggtgttctaatagggtggatatgaaggaagaaaaggaaggtggtggggtggttgaagtatcttcttcagatgatgtggatgatgcaaaagttcaggaaattgtgaaggagggcgtcatgcttcttgagaattctatgtcagagaaggaagctcaagagacaaaatcaagaaaaccactggctgatattggaaaaggtgtggtgaaacaaactggggcaaaaccaaagcaaaggaagaattggcgcaagtctaccgttcagctcgtcccttcagcgccacctctcccacccacggcgccgcagaacaccgagccggttccacggaacagagacatacccctcaggctgccccgagcaatgtcctcaccagctgtggacagcatccctctcacggaccgcaacgccgcgaagcctgacgaatccatgagcagcaacaaggagaacgtcactgccgttcgtgcgagatctcctgctcggccgagaaagaacgccaacgagaaagagaatcacttgcgatgattagttgatcaattggctcactcgagcctgtgaagctgcaagcatccaacggctttgttgcgaggccttttgatgttacttggtggtggggatgctgcctcggtgtccctcggcatggccggctgcggaggcaaatagaagtgaacctctggagttcctgtgaactgacccgctcgtgatgcaccgttgtttcactttgttgtcttttgttaagctatggctgatcactcaacgttgaatgtagacactttgtacaactcttgttgagatgaattaagttggttaattt

SEQ ID NO: 8932 - DNA, 1630 bp, Oryza sativa
  ref <308>: DATABASE ACCESSION NUMBER: AK106280
  ref <309>: DATABASE ENTRY DATE: 2002-08-28
agcccgtttgttttgcagcgggcgtgcgcccatcaccattcctgcccccgttcgcgacaccatccatggcgcgtttctccgtcgccaagccgttcgccgccaccgccaccgcggctgctccgcgcctctctccccgccgccgccgccgccgtcttctcgccgctaacgccaccaccgccaggggagcgctgccgctgccggccctgcggaaacccaccaaaccaccaccgccgccgcccctgcacccgcgtcccagtctccccgtacccaccacctccagcgacgacgatggggacataaggaggaagccggcgacgggcgcgagggcttctctgtgctcgtccggcgccggcgacgtgctccgcctgctggacgcgctccgcctcccgcccgacgaggacgtctacgtctccctcctcagagactgcgccgacgccgccgaggtcgcctccgtccacgcgcacatcgccggaaaattcgccgtctctggcctccctttgcccctcgccaaccggctggtgcttgcatacgcggcgtgcggggacatcggggctgcgcgccaggtgttcgatgaaatgccagtcaagaatggcatcacctgggcgaccatggtctcggcctactccgatggttgcttccatcatgacgcgttacagctattcgtgcagatgtgtcaccaagtgcgggggatcaccggtgatcactacacccatgccattgtggcggtgctgcgttcgtgtgctcgggtgaacgagcttcagttcggtgagcaggtacatgcttttgttgtcaagaaaaatggagtctgtggcgatgttggtagctcgctattacagctgtactgcgacagtgggcagctcagcagcgcacggcatgtgcttgagatgatgaggttctcatgccaagaaccagttcctgaggcggcctggaccagcttgatcaccgcataccatcgtgacggcattcttgacgatgccattgatgtcttcaggggcatggcttcctcgggcattgccaggagcagcttctctctgtcaagcatccttgcggtctgtgcagaggcgaagaacaaaggatgctatggccagcaggtgcatgctgatgccatcaagcgtggcctggacatgaaccagttcgtcgggtcagggttgcttcatatgtacgcgaaggaagggcagcttgcagatgcagccagggcatttgaggctattgatggcaaacccgacgcagtgtgctggaacgccatggccatggcatatgctcgcggtggaatgtacagagaggccaccagggtggtgtatcagatgaaagctgctggaatgaatccttcgaaactgacgatgaatgaggttaagctggcctgcttcagatgagatactgaagaatgatttccttgtttttgtactgtatgatctgtgtagaaaggaagtaatttagagacttagagttgtgcccagatctttttagaagatgttaacagccagtaatggtatccagaagtgcccttctacttcacttagtcagcttggagtgttagtgtgagaatataatgtagcatctggaggtgttctttttcgcctaacaatgtctccaaatatgtactcttttatagattgtgctggatagctac

SEQ ID NO: 8933 - DNA, 1510 bp, Oryza sativa
  ref <308>: DATABASE ACCESSION NUMBER: AK106281
  ref <309>: DATABASE ENTRY DATE: 2002-08-28
ctttccaagaaaccaccaatctctctctctctctctctttctctctcgctcccggcggagaggaggagcagtctcccatctgcggcggccggcggcgtgcgtgcgtgcgggtggctggtgttgtggattccgtttccgatggacgacgcggtggagacggccgccgagattctggtcagcttccagaacaggaggctggtgcggtggccggagtgggttccgcggccggatgagaagggcgccgccgctgaggagaagaagttgccgggatggaaggaccggcggaagcggacttccaagtccaaaccgccgccggccattttggtgtgtggcctggagctgagggattccggcggggagaaggcggcgtcgattccggccccgctcccgccccccgcgaggaagaagatgttgttcaagatgaaggtcaaggacgagccgacggcggcgcgggggccggagacgccgccggagtacggggccggcgcgggatccggcgcgaatttcagccgggatggcgtggcgaggcctctgccgccacgcgcggtggtgaaggccgagccgacgccggcggcgcggatgcccgagtcgccgccgtactacgtcgcggcggccggatccgccccttccacggccggcggcgaccggcgtccgcgtcctcgccccgtcgagagggcgcacgtcaagacggtcctcgcggcggcgaaggaggccatggaggcgtctagcccagagacccctctggactacgccgccaccaccggatccggcgcgtcctccagcggcgacgagtcgtcgcggaagcggaaggcggcgccgggggcgggcggatccggcggcgcctcgtcgagcggcgacgaggggtgcagctcaccggagaagcggccgtgcctggtcgccggcggcggcgctcagaccgccgcagcggctaaagcagaggtgagtcccccccacttttttccccatttgtttttggcccttttacttttgtttccgtttggattcagaactcttgagctctttcttgtgccctgaaatcttctttcttccagtcccttcctcgtgcgattcgcttttatttttctcttcaagttccttcctcgggcgatttgcttgtgatctgtgttcttgcttgtgtgatgattctcgcaacgattttttgttaggaaatcagacgacaagttcccttttttgacttaaaattccaccttgatttgatttgtgtatgggagatgtgcctgcaacgatttttctgacgaaatccgtttgcttttcacctcttttgttcacttattatagaaaaaaatagtcgtactaccatagtgtttatctgtttaatctcaacagaaatttaaacatttactttggacccgtaaattcagcttatttgccaagatgaagcattttttaggtccgttcaaaaaagctcttcctttgttttttcactatatcattttagtagtggtagttttccttgtctgttacgatttgtgtatttgtaataataggc

SEQ ID NO: 8934 - DNA, 1413 bp, Oryza sativa
  ref <308>: DATABASE ACCESSION NUMBER: AK106282
  ref <309>: DATABASE ENTRY DATE: 2002-08-28
actagctcatgcgcatttcggctctcgccttcttcgccttcttctcctcctcctcctgttcttgattttcagtatattcaattcatggattcgtggattgagcagacttccctgagcttggacctcaacgtcggcctgccgtcgacggcgaggagatcatcggctccggcggcgccgattaaggttctcgtggaggagaacttcttgtccttcaagaaggatcacgaggttgaggcgctggaggcggagctccggcgagcgagcgaggagaacaagaagctgaccgagatgcttcgggcggtggtggccaagtacaccgagctgcagggacaggtcaacgacatgatgtcggcggcggcggcggcggcggtcaacgccgggaaccaccagtcgtcgacgtcggagggcggctcggtgtcgccatcgaggaagcggatccgtagcgtcgacagcctcgacgacgccgcccaccaccgcaagccatcccctccgttcgtcgccgccgccgcagccgcggcctacgcctcccccgaccagatggagtgcacgtcggcggccgccgccgccgccgcgaagcgcgtcgtccgcgaggactgcaagcccaaggtctccaagcgcttcgtccacgccgacccctccgacctcagcctcgtggtgaaggatgggtatcaatggcggaagtacgggcagaaggtgacgaaggacaacccgtgcccgcgagcctacttcaggtgctcgttcgcgccggcgtgcccggtgaagaagaaggtgcagcgcagcgccgacgacaacaccgtcctcgtcgccacgtacgagggcgagcacaaccacgcccagccgccgcaccacgacgccggcagcaagaccgccgccgccgccaagcactcacagcaccagccgccaccgagcgccgccgccgccgtcgaccggcagcagcaagagcaggcggcggcggccgggccgtcgacggaggtggcggcgaggaagaacctggccgagcagatggcggcgacgctgacgagggaccccgggttcaaggcggcgctcgtcacggcgctctccggccggatcctcgagctctcgccgaccaagaactgatccatcgttagaacgccgatgaactttgctcgatttagctgagatcgatcgatcaatttacacggtaaaattttagagttgatcgatttgcatggctttgatcggagttaggctagagagagagaggattaactgtgtatatttagtgattgattttaattagctcgctctacacgtgccaaggtggcagtttaagcaaaacgtacgataattcgttgcaatttgtaattcagctagaagattagtgtattcatggagatctattcagagtctcccagatatatatatagagagagagatagtagcattgatgtt

SEQ ID NO: 8935 - DNA, 3253 bp, Oryza sativa
  ref <308>: DATABASE ACCESSION NUMBER: AK106283
  ref <309>: DATABASE ENTRY DATE: 2002-08-28
taattttttttattctaaattaccagtctgtagtttctttttgcacacttttctcctctgttacaatctgtttttttttttggagtgattgcagtttgattacatttgtcttggaacaaattttcagctttgcatattcactagtatcataattcaaggacgagcacaattgtgttgcactctgacacttcctaggaggacccatagggcatttccaattagaaatgacttggccatttctataggatttcatatcacccaggaacaatgatagtaacagccattacaaagggttccttgaagaattactgattggtaggctttattcaaaatttattttgaaataggatgggttcagtcctataaatatgtgaggtgtgatttgtttaagtagtttcataagtcgaaggagctaatagcattaattgtttcatggaatctcttagtgtagtgaatttggtgttggcctaggtttctttttgtttctatccccaaaagagttctctctatagagaaacaacttgcttctctctcctctccatctctctgcctaataaaaataatgatgctgggcttatagaaactaggatacaaggttagtatagcatagggattatcgattaggaaatagaacatcgattagtaggaacatagaaatgttttatatgcatcaattattacatagatccttttgaaatgctgcacttggaattctgggcgcacctagaataatggaccagcatatggtttttttggtacatggtataatacgtggttaattgtaatgggagcattgcgcttgtgaactgcacaaagcaatgtcttggcagagtattagcattggcctcagtttgttcttttaacgtgagtagttttacctttggccttgtttgtgaaatcttgtttatgacttagaacatataagtatcttatgcaggactgaagtgtccagtgaagtattggatgtactacaatgctgtattatctagccatttacattctaggaaacaaaatatagatcttagacacctagagctttcctctcctttattctaagagcttctgtgggatgtgcagttattttatgatgtcacttttcagagtaggtgttgataagttaaccatattgcatctttttactcctgttagctggacagcactactggtttcttggatacatgagcaccattttttttataaggatgccatagtgctttgcagatcctagccttgttatgcttcttaaagtaatgcaaatttcataaccactccgtatgttgcttttttcatagtagaggtttgactaccttgttcatactatcaatccattagactaaagggtacatcaatgtaataggagagaaataaatatggaagggtaagtgggtaacccgattgtttagtctgaggggagagatcaatagtgctattcataaatggttttcttcaattggggcatgtttatatcctttaattgaacagctaatatttgtgtatccttcgaacattgaacttcttactttattgacacataatctcttgtgacaatgaacgttgcccaaaccaattatccaggtttctgctggagataattttaatctgttaagtcctcttaacggaatgggggaagagttcaaaaaaatgagggcgaaaccacaaagttgggaaagtaggggtaaaaatcacaattggagttgaaaacaggctcaattgtcgctttactaggggttttattgcttttctttatccaaactctaaaacatgtctcaaatccacagccagtggttacactaatagctggtcgtatttgttagggaaacactaggtcactagttatccttgcggtgacacatttttgtattgttcattctactgtcctatcaactcaagttttcacatgcatcatgtctattagcagttattccttgactgtgtacctccatgatgcagaggctggagatatcttctgttatctaaaaaagttatgttttcctagggacaggaaatgcattatcttgatattgtgaaatttggagcttctcagttcacatgttgttttttcctcctagatgcttgagcataattatgacatcaataaatcattccatagaaattattagttctggttgctgatatacttacaaagaatagctattatcaattgatatgctcagagaaaataagggtcctacttaactcatgacatgtgatcaatatagttgtagtttagtatatatgaagagccatgatacattcctgggaatacaacgaatattcccttatgtgccggtcgaggtaacttagcctggtaaaggtggtagggatggagacgagtagcagaaggatgaaaagggagtgaacagctagggaactagcacaaggtatgttgcaaggtaggaggggagagtttagttgtgagacgagcatatgcataggttgacatgggaagtccgaaacaatatattgaatgcaactagcagataacaaatatttatttgttttcaactaaaaaatcagcttcgagcacaccacatactgttgctgctggtgtgatgcttgtccttgggccttgttgagttattctatttctataggctacaagaagtttttgcattgatctataaaaaaatgctggatatgggaggaggggctctcatatcgaaatttattaagagcggtgaggctcgaacttgcgtcggctagcccacaccttgtggtgctagccggaaggcccccaggcctttcttgcattgatctatctgtttaaagtaaaaataggtgactgtttgaatttgagtaagttggagacaaatgaaaaaaaagtgactgaaacaaaatactctgatctcatggagttaatctatatgttggaagtaaatgcagatgactgtttgaatttgagtaagttggagacagatgaaaaaaaaaagactgaaataaagcactaagatctcatgggattaataagttggttctggaaattttcctttttcccgagcaagtttcgtgacaattcagttggtttcccaattggcttagtttttcgtatttcaaccctaagttcattcgtccatccttaattattccgcatctaccgatctactccctccatcccaaaatgtaacaacttttgaacggatgggacacatcctagtaatacgaatctagataagggcctgcacagattcttagtactaggttgtctcatccattcaaaaattgctatactttgggacagaggtagtacataaat

SEQ ID NO: 8936 - DNA, 1962 bp, Oryza sativa
  ref <308>: DATABASE ACCESSION NUMBER: AK106284
  ref <309>: DATABASE ENTRY DATE: 2002-08-28
tcacatattcacattacacgatgatttctgacaatgcattttgtcatgtactccaatgctgattgatttaaaatagaaagttgtatagtcttgagttagcactattctgttaatgtggaggcagcagtgcccaatacaatatgtttaattcagggcttatggctattcactttgtcttccatcaacaaagtgatttcggaatgtttttcatgtctgatcatttttggtaaattgaatggtttttatgtctaaaatagcagtagcgaaggtttcaggtaacttaacaacaaaacctgatttttgtctttatccagcgattgtggtgaagtattggctgatgctctgaagacacttctctgagaaggcaaaccgcaggatatgataagagcagctgctttcattaaacgcctagctacctttgctgtcctttggttctccagaagccatagcaggtttgagtttcttttgtcttgcactgttccatctggttgagctaataattgccagatttttcatgtttgacttgtggtcagtatgagcagtgatgcacattctgaacgggcactcatgtgcagagcattggtggaataattcataatataatgcaataaatcaccattatatgagccctacttgtatgtagttcgtataggttgctcaaggttgacccagtgtccttaggtagagtagctcatcaggatcgatatgtaatgtgtatgacagtagaacaagtttttctgccttgattgtagtccaaatactatagatccattgtaacctagtcacaattttggcatacccactttgtaacctagtttcgtagagtttggcgtctattacaaagccttgctagtcatgattttgtggacaatttacggtcgtttaatagttatttcgtaatctgtcttcatagttttcttgtgtgcaaccaggctaacaaatttgttgccgctctgcgagatatagcagtggcaggcttctgctatttgtttcttgttagacatggtcgcatggacaatgccatcccctgtgcgaaactacaaattggtagtcgtaaagtgctagactgcccgagcagaggaaagaaagaaaaaacagcagtttttatcgtctattttttatcatcgtgctcattgaggctaacgcgaactgcataatgatattaacatgtcaatcgagatgcatatgacatttcttctgaacatgctctgctattctcacaatttggtaaatttgctcggaccctcgttccgttgcacgcacggaaacagggtgtttatcagaagttacaaacacaagttacaggttttcaacaggtaaagaatgtgaagaaaaacctccctaggttgtgattacaagaacaccgatggcgagggattgacgacgatatgcctaagcggatttgagacgtctccccctccagcgtgcttcacaaactctgcaggactatggaatttaccatggcagacacacattatactcacatcctcacctttcctgtacttgtacaggaagccatctatcttcctaccattgggcccttccaccttggaagacaccattggcatgtccatcatgatcttcccgatgtcgccagtgctgctcgtccgcattgtcagtgacccaagcgttcgcaacggggactgctgtgtcacggtgccgtttagcggcttgccagttgatgctgttggaggaagtgcactgttttggttggtatcatcagaggttgatgggcttctcgcctccgtggattggcagattgcacttccatcaggacctgagaacaacattgaaagttttgagtttccttgatgtacagcctcaagcataaatttgaccacaaatttatttttcactttatcaaccatctcattttgataacacaattttgtactagccacaacagattcttccaagtaccaatcacgatgaatcaaatatcaaatatatatatttgcatgc

SEQ ID NO: 8937 - DNA, 2679 bp, Oryza sativa
  ref <308>: DATABASE ACCESSION NUMBER: AK106285
  ref <309>: DATABASE ENTRY DATE: 2002-08-28
atgggtgtatcaaaggctatactggagaatgttatattcgtgcaccaagatgagtccaattggcctttgcaggatccatcgacacttaagaagaagtttgacgatatcttttctgcgacccgctataccaaagctctcgaagtcataaaaaaacttcacaaggatcaagcacaggaaatcaagacttttaggttaaagttggagaaccttcagactctaaaagaccaagcatataggctccgtgacaatattgctcaagatcaagagaagtcagatgccttaaaaattcaaatggaggaactgagaacaaacgttcaaggtgttgaagacaaaattcgtcgtactgaaaaaagtttagctgacttgaggaggcttcaacaggaaattaactccagtacatctgctagaactacatattttacacttcagcagcaacagtatgctgctctttctgaggaaaacgaagataccgatgatgaactaaaggagtggcaaacgaaatttgaagaaagaatggcattgctgcaaaataagatcagtaaactagaaagagatgtggatgatgaaaatacaacaagctccttcctttccaaggccataaatgatttgatgcgagaaacaggaaggctccaggcagaagctgacgctcacatgtcagtgaaacacgaacgggattcagcaatcagaaagatcttcaccaaacataatcttgggccaatacctgatgctcctttaactgatgctgctgccatgcaccttacaaacataactaaagcaaaactgtcaaatcttaatgatgatttgcaggataagaagaaatctaatgaggcacagaaacagtttctgtggggacgctatcttgaagtaaatactcgctactctgaagttgttggccagatagaatctaaggttgcctccaagaaaggtatttcaaggcgcatgaaagataaagagagtgaacgcgatgccgcggaaatggacctttcaaagtacaatcttccccgtattgatgaaaaggagagacatctgcaaattgaagttgaaaggaaagcacttgcgctgggagaaaggaactatgattcaattgtaaatcagaagcgcacagagatatttagcttggaccagaagataaaaacacttcagtgggaaaaagacagcattattagtgattccaatgacagggtactactagacgtgaagaaggatgaattggaagaaagcaagaagaaacttaaaaagatgcatgtttcttcctctctccttttataaccctacttattttatgattcacttttttatatttcccaatcttaaatcttgctgtgtgagaagttcaagtagcacatactgtgtaaaatgcagatttgatgagcataaggacaaaatcagaattgtgtttaaagggaggactccttctgagaaggaagtcaagaaggaacttagtcaagcctttgggtctgtagacagagaatacaatgatttgaactcaaaatcccaggaagcagcgcaagagctgaaactggtacagatgaaaatacttgatgctaggagccacttgtcaaagcttcaaaaggaattggatgcaaagagaagctatgtggagtccaaacttcaatccattacgaagatgtctgctgacgttaacatgtttcccaaacatctgaaagatgccatggatgaaagagagaaacaaaaaaacaatttaagttacgcgaagggaatgcggcaaatgtatgagccttttgaaaatttggctcgtgagctccacatgtgcccttgctgtcaacgtgctttcacacctgatgaagaggatgaatttgtaaagaagcaaaggacaacgtgtgaaagtactgcagatcgcatgaacaagatctcattggaatgctcaaatgctgaagactttttccagcaattgaataaactcaatgcaacttatgaggaatttgtgaagctgggaaaagaggctatacctctagcagagaagaacttgaaacaacttttggcggaggaaatttgtcagtgttcttgctcaagttaaaatggacaaggatgcagtgcaggtattgctacagccagttgaaacgattgataggcacgtacaagaaatacagcagttaggaccacaagttgaaaatcttgaatataagcttgatgttcgtggccaaggtgttaaatctttggagcaaatccagttggagttgaactctgtgcagaggacaagggacacattgaacaatgaagtggatgatctaagggatcaacaaagaacacttaccgatggtctgactaatgctcagatgcgatggcatgatattagggaagagaagctaaaagcttcaggtgcagtgcacaaatttcaaaaagctgaagaggatttgggacatctagctgaggagaaagaaaaactaacattagaagagaagcatttagaggagtctcttggtccgttgtcaaaagagagagaaagcttgttgcaagagcatgaagctttgaaggaaaagcttgatcaggagtatcatcagctggcagaaagaaaaagggaattccagcaggaaattgatgcactcgagacacacaatgagcgtatcaaagggtacctgaattcaaagaagggcgagaagcttaatgaactacaggaaaaacatactcagttgcagtctgatctacagaaaagtaagg

SEQ ID NO: 8938 - DNA, 1629 bp, Oryza sativa
  ref <308>: DATABASE ACCESSION NUMBER: AK106286
  ref <309>: DATABASE ENTRY DATE: 2002-08-28
gaacgccattctcgaagtcctcgcagtgccggatgtgccggacaatcttgccggtgtcgcctttggccctcgtccggcagtcgtagtttggtgggttatggaagcacggctcgatggtggcggccagccggcacggcgggtcaggcaccttcttgtcgagggggctcatgagcacccacggcctcagcccggcgagcccgtggccgacgtacccgaacgtcgaggcggcggacgtgaccaccacgtcggagaagctcagcagcatcatctcggcgagcgccttctggttgtgcagctgctcgccggagcgctgccggtccaggtgcgtcggctggaacacgctcacggactccccgcccgccgcgccgtgctcgtagtacaggtccttgatcctctcggagtaggcgccgtgcagcgacaccacgagcaccgccttgcgcctccccggccgcgccgccggctgcggctggtctccggcggcggtgaagttgggcccctgctgcgtcacgcgggggaggatgttctcgccgtgcgcgcacgacatgatctggccgtagagctcgtcggtggagatgcgcgcccagtagaaggagcgcacctggatgccgacgcgctcgttggcgcaggccatgtacgaggcgtggtaccgcgccaccatcccccacaccgtgttgctcgggtggagcaggtagcggccgaggtggtggaacgcggcgtcgcggcgcggcagcatccgcgacagcgcgcgctcgaaccgcgggaccaggaacagcccgggcacgaagtagtcgtcggagaggagcaccacccagccgacgcgccgcagcgcgtcctgcccgtcgtcgcagaagaagcgcgggtcgttggcgttgcggttgtagtcgtgccgcaggtgcacgcacatccacggcggcggcggcggcgggtggtccttggcggcgccctcgccgcgccgcagcgcgttcccgaggctctcgcgggtgcgcgcgttgaagccctgcatgccggagaacgggaagtccccctccgggagcgtccacgtggagcccgggaacggctcgcagaagaggtccctgaggccttcgccggcggggtggtggaagaggaggacgcggtcggtgaggagcgcatagaggaaagccgacgtgagcgtgagcatgcggttgccgagcccctcgagcggcgtccacacgaggtacctgcactcggcgtcggaggtgttcgacggcggcggggagcggaggcgctccacggcgcgctcgtaggcggaggtgccggggccgcagcggcggtggatggactcgtagcgtcggagtgaggcgaccaggtgcggcgagacagcgtggggggactgccggcggtagagcccggcgcggtagcggctgaggcaggagctgtcgtcgaagtccggcgagaggaggccacccaggagcctgtcgttccgcggctccaccgccgccgcggcgggatcgtcgccgtcgcgttgttggccggacactgcgcatgcaggaacgggagaaaattaaaaatgcttggtctcaggctcagctactcaaattacatcacgcggtatctctgccttgtgcgtgcatgaaaatctgcgtgcaacgtgtgcacacttggtgcttc

SEQ ID NO: 8939 - DNA, 1910 bp, Oryza sativa
  ref <308>: DATABASE ACCESSION NUMBER: AK106287
  ref <309>: DATABASE ENTRY DATE: 2002-08-28
tcgcatgccactgaccaggacggcaagcggcaagggcgaggacggcgggcaagaaggcacagacgccggcgagctcggacgcggcctcaacctccggtgagcttctccgacgaggacagtggcggcggcgcggaccgaagcggcgtggcaacgagctccccggcgacaccgaggtcggcgacgcggagcggagagcgtggacgacgacgaggccctccctcactcggctccacggcggcgcacgacggcgaaccgcccgccccctcctctccttgtcgggccggacggcagtgacctcgacggtgggacggctgcgcgcatggcgaggtagcgggtcctgtggcggcggcgtcctcggggccgagtggcgccggctgtcccctcctccctccgccggcgccgactcccctaatcccgaagcggaagaagccggcgagggtggcagtggcgccgaacgatgccggggacgcggcggacgggaagccccggggcgaggacggcgggcaagaaggcatggacgccggcgtggcggcgcctctcatcgttggggccggaggccacagacgccggcgcctccctccccctaccccgctccgcagcaacgggctctcggtggggtcttcctcgcggaggtcgccgcgcgacctcgtcttcctcgcggacgacgagcggcggcacggtcgtcgtcgaccggagccacgcgaccttgtcttcctctcaaagccgggtggagcggcggcccgagcggcgacggcgacgacgctgggctgagcggccagatccggcctaggcccactggatcaaggcgacgacggcgaggtcggacgcggcatcgacctcgagctcctctccttctccgcgctttccccatcgagccggcgagcttctccgacgaggacggtggcggcggcacggatcgaagcggcgcagcgacgagctccccggcgacatcgaggtcagtgacgcggagcgggagacggcaacgaggtcgacgctggagagggcgcgaggggacgacgagttggaggcacgccctccacagcgcgagccctaggcgttccctctgcctcgcgcgagcgaggaatcgcgtttccttgcttgggagcgagcggctcaacaaggacgtggtgctacgcgacacgtcggcgaaattcctagctagcacaacaaggcaacgctctacctaggagcactgtgaagggcctaagggatggttaagggggttaaatatactttttcctaaaaaggataggagcgagacagacggcgctgggggacgaggcttgttgggccggccttagcccagactcacgacgcggttgtgcgctttctaggtggacggatggatctgctcgactgctctctgccgtcgtgagggctgaagtcagacgtcacgagctgattccgcctcccctcgcccctgccatctcaagcgccgccgttgtttgctccatccctcccacgccaaccgcagcgcagccgctgctgccgtcgattccgacgcccagccttcgccaccggcacccctccccgctgatcgcctccagaccgacgccgcccctccccaccgaccgcatcgcccccacctcaccctggatcacgacgggatctcctccccttcctctcacccggtgccagaccgccgtggcttctcgctgctctgcctcttccttgtgcctcatcaccctggtgttgaaaggaagaaggtgttagaagtagtgatagttcagagatatgcatgcatgcatatgcagggagtccggtgcatgtgatatgaatgagattgatttggttgagataaaaccggatcacaacagattttgtttcctgattgtaagccacgttggaggctatttccaactgagatcaatatattcgtgcggcctcgacaagaggtgataacgcttcct

SEQ ID NO: 8940 - DNA, 1251 bp, Oryza sativa
  ref <308>: DATABASE ACCESSION NUMBER: AK106288
  ref <309>: DATABASE ENTRY DATE: 2002-08-28
aaaaaatttccgtgaaataatctaattaagagaaggccctcgtgccgctcagctccagggcggcacgggcggcgaccagacgagcgcgccgccgccaacctcttcctcttctcccctccaccttgccgccgctcgagcgcccgccggcaaagccggggggacgcaatgacagcggcggcgaggctccctacctcctctcgcaggcgcggcggctggggcgatgccatgaccggagagaggtctcgcgggtgcagcggtcgccggcggccagatccggcgtcggtaggaccggatccggtccccacacggctggatcgggcgtctcagccggtggcgacaggaaggaggcgcacgctcaacgaggagcgcggaagaggcggcggaagtggcgacgtgcgaggaggacgacgttcgcgcgcaggccggtgacgctcccgtcaccggcggcccaggttcccgtccagatccgggccgggcgaggcgctgggaggtggcggctagcggcgggggagaggttaacgtcggggctggagagggtgcgaagaccggtggcaggcaggggtggcttcgcggtgggcagcagcggcttgcgccgaggtcgcggtgttgacgggaggtcagcaacggggctggagacgacgcggagatggtggcaggcaggggcggcgtcacggtgggcgggcagcggcggctcgctcgcgccggtcgcggcgtcggcgtcggcgtccgtccgcgcggggtcacagcggtggcgatagaggctgtggcggcgtggtggttgcgacgacgacggagctgcagcggcgcggatgtcgagccggcttgcgccgccctggctggatctggccgtccgcgaccagttccgtcgcctccgcgccggagggcctgtctttgccgttatggtcgaggtatgaatgcttgtgagacgtcatggactattctgtggccgtcattgtgggggtgcttgtgtgggtgatacgaagacgtcggcgaaagccttgccgtgcctttggccggttcgacgacgacggcgcccgtgggcgccgttttccttcttggaggcgttgtcatggcgtttctttcatatcccccacaaatctccaggtgaaaaccttgttccggcttcggacgagcggcggcggcggagttacgacgtcgtgtcctcctttggggcgtcgcttcggagaagttccaacacattgacgactgttgatggtccttttcggttcaaaagctctcatacattgtgtt

SEQ ID NO: 8941 - DNA, 1768 bp, Oryza sativa
  ref <308>: DATABASE ACCESSION NUMBER: AK106289
  ref <309>: DATABASE ENTRY DATE: 2002-08-28
atgtctgggcctctacctctccgcatcacctcgggccgccgccgccgccgcttcgtcgccggcctcgcccactcggaaatggcggaaatgggcgccgccgccgccgccgcggtgccggttattccggaggacgtcgtcatcgagatcctcgcgcgggtgccggacccgacgtccctcttccgctgcgccgcagcgtgcaagcggtggctccgcctcatcgccgaccaggccttactccgccgccgctggccgccgggcacccgggtgccctccctcctcggcttcttcgcgcagcgccaccagatccaggccaacgcgaggcggaagctcaccaagctcttcccgacccgcgcgccgccgctcgtcgcagcgccgagcaggggcacaggtgacccacccgttagcaccgggcggcggcggcggctgttcctcaccgacttcgtccgcaacgccgccggcgccggcctcttcgaccaggccaagccgttggcggcgcgcggcgggctcctcctcgtgcgcgtcctcccctcgccctcgccggcgccgcagaacgcgctccacctctgcgtctgcaacctgctcaccggcagccacgacgtcctgccccctctacccatggattgcttcgagaaagacggcgccagaggctacgccatcctcacagccgccgaccaccgcgtcagccgcaacccatcaggtggctacaacaccttcttccaggtgctcctcctcagcatccaccatggcaaccatcaggtatacctccacagattctcctcagccgctgccagtgccgccgcggcggcggtcatttttgagatatcctggagcacgcccagaaattgctctgaacaaatccggggctatgtctggggtccctctggaaacagagttgcagctgtcagccatggcggcgcacactggctcttcagttggggagaagaaagcctctacacccttgatgtgagcattgacacagacaacatcggcgcaaccaatatcccaattgatcctccccccactgtcttccaccaatcttggttgtacgtaagcgtcgacgagaggctttcgcttctttatctttgtgacaacaaacttcatatttggaccaagctagaaacacaggagagtggtcgtttgctctggaattgcacccaatcgatttgtgttggcgtgaagatggggttgtttggaacggagtcgctttccactgtgtgcataggggaggagagtggcaccatgctcaccctctacctttcggaccctaacagcgcatatgtgctcgacctcccatctgggtcgattaccagtgtggacgattggaaacgctggttcaactacatgacggctgtgtcctttgagatcaactggcattcattcttcttgactcggctaggggacttctgtggaagattctgctgaagctggaagaagtacctaccctggaacaaacaactaaggcgattcaggaagcaattgatgccctgcgaccttcgtgagctggaattggttagccttctctttaggatctgttttttttttctccttcctgttagtgtgttttgctgctgctcagtcagtttgttctgaaaggttgtgatgttgtgagggttgatccctttcacccttctgcttttgttttctgtgcctatatgtcaagctggcgaccccagcgctatataaggatcagtttgcaaatacttcatgctttctataaaatgcagggcctcgcgtggcctttcctctaaaaaaaaaaaaaaaaaaaaag

SEQ ID NO: 8942 - DNA, 1760 bp, Oryza sativa
  ref <308>: DATABASE ACCESSION NUMBER: AK106290
  ref <309>: DATABASE ENTRY DATE: 2002-08-28
acttcaccaccgcacagcgggctcgccacggagagctttcgccggagaggtagacgacgacggcgacgacagtgtcacgtgctcacgttcatggtggcggcggtgcgcgcgccggtgaagccggagatggtggagctctcgccggcggcgatggagaggtactcctccgacgccgacacgacggcgccgaactcgagccttagctcggcggcgagcagcacggggagcctcgcgcggtgctcgagcctgtcgcgcctgtcgttcgactgctcgccgtcggccgccgtggcggcggcggcgacgtcgtgctcgccgccgcgggcgtcggtgctgttgcggccgcacaggtccggcgacgtcgcgtgggcggccatccgcgcggcttcgacgacctccgcggcgccgctaggcccgcgggacttcaagctcgtgcggcgcatcggcggcggcgacatcgggacggtgtacctgtgccgcctccggagctcgccggagagggagagcccgtgcatgtacgcgatgaaggtggtggaccggagggcggtggcgaggaagcagaagctggggcgcgcggcggcggagaagcggatcctgcggcagctggaccaccccttcctccccaccctcttcgccgacttcgacgccacgccgcacttctcctgcgccgtcatggagttctgccccggcggcgacctccactccctccgccaccgcatgccgtcccgccgcttcccgctcccctccgcccgcttctacgccgccgaggtgctcctcgccatcgagtacctccacatgatgggcatcgtctaccgcgacctcaagcccgagaacgtcctcatccgcgccgacggccacatcatgctcaccgacttcgacctctcgctgcagtccaccacctcgccgtctctcgacggcgacaccgacaccgacgacgaggccagcggtggcgcgtcctgcttcccggaccacctcctccggttcaagcggcggcggaacgccgtggcggcgccgcgtccgcggttcgtggcggagccggtggatgcgaggtcgtgctcgttcgtggggacgcacgagtacgtggcccccgaggtggcgagcggcggcgcgcatggcgcggccgtggactggtgggcgtacggggtgttcctctacgagctcatctacggccgtacgccgttcgccggcgctacaaacgaggcgacgctccgcaacatcgtccgccgcccgctcgccttcccctccggctccggctcgtgcggtcccgccgacgccgacgcgcgcgacctcatcgcccgcctcctcgccaaggaccccgccgcccgcctcggctcccgccgcggcgccgccgacgtcaagtcccaccccttcttcaagtccctcaacctcgccctcctccgttcgtcgcgcccgcccgtcgtccccggcgccggcgccggcgccgcgccgctacaccggtcgcagtcgtgcaaggcggcgccgacaacgccgccgccgccgacgacgacgaagccggcgaacgccaccgcgcggttcgacctcttctgagcatattgaccgttgctgtctgctactacctacccgcgtcgtcgccgacatcgccggcgggagacacgctccggccaccgtgacattaatttctcgttgacccttagctaccgcgttgaatgtacacactgttaattaattactactcctagttaatcactgctaatcaccttgctgttagtactactaaactaatataatctagtggcttaatt

SEQ ID NO: 8943 - DNA, 1532 bp, Oryza sativa
  ref <308>: DATABASE ACCESSION NUMBER: AK106291
  ref <309>: DATABASE ENTRY DATE: 2002-08-28
agggctgaatgatcctgcagcaaaagcctgcgagggcccgtcgaccgccgccgccattccacgctcgccgccggcggctggggctccgccctagcgagcgtggcatcggcaacgcaactccccctcgagccgccccgccgccatcgccggctggctctgccgggtgcgcgcgcttccggtccacgcgccggttggggattgccccgtcgtgctctagcttaaccgcgatcctggcgcagggaagggttgtggggctaggaggttgcaaggtcgtcttcttccccctcttggcggcggcggccggtgattcgaggggaaggcagaatgctggggttctccaccggccagttggtggtcatcctcggggcttgctccctcatgatgacgacatgatcaagatcgcaagggtggcggggaggatgaccgggagggcggtcgggcgcctcatgttgttccgcaggcagatggatgagatcctggagcagactgcagcaaagcaggttaacaaggagcttaaagatgctatgacacagctagattcaattcgttatgaagtccagaacttatctaggtttactcctggacagttcatgaggcagcataaccctgtaggcgtggatcatgaagcagaaaaaaatgatgccgttgatggctctgcgcttaatctagaagaacttcgtcatcaaatccgcagtatggttcatgatgaaattgaaagcttttataaaacaaatccagataagttttccgggaggttggataatgctgacaccgttaatagatctggcccagttgaaggtaaagaagctgatgtagctgttatccccacaatgttggcatcaaaggacatgaaattggcaaacacaggctctacagatctacacagcaaagcaacaatgtattcaagattaactgaatccccagaaatgagtggcagttctggacatcaattcaaagagagtgatgggttattaaatatactaccaatatcagctgaaagtgctggattacttccaagccgctcagataaaccacaaggctcagacctattactggaggcaacacttgaagcagaggtcgcagagcacgcaaaatccttcgcgcagcagcatcatgatgaactgcacaaggagtgatgcgatcttttgataggaactggtagacatcttgtacattaaaaacttcaaaaattctgactactattggagtattctgatgcccgttgagatgtaagtggacataaaggaatataagttgttgaccggcgcaaaattggtgtcaactttcataggatgatgatctgcgatggtgataccaagtagtagtagtggaaatcttgttgcttatttgattgcagcggtattatattgtcctttaattgttaagtgttcctttggcacaatatttttataggaattttgtaggatttaaattgtacggaaaactttcctattctgtcgtttgtacaaaggattgtgacatcaagaattctatggaattcctttggaatggctaagagatgggaatgttgg

SEQ ID NO: 8944 - DNA, 1473 bp, Oryza sativa
  ref <308>: DATABASE ACCESSION NUMBER: AK106292
  ref <309>: DATABASE ENTRY DATE: 2002-08-28
ctcgcaccattccaccctatagaaacgagataacaagacgctgtttgcactagctatttgacagccgacaagaaccagttaggtaaaactcagtaggatgcaggtttgaatggctgaatgccaacctctgcaactgcaagaaggcaagaaactgcaagagctgcagccatacgatggctgcaatccttcagtgtacagaggcccaattctgctgccccggcaggccaactcggcgccgccggccgtgccgccggagatgtcgtcctcgtcggggtcagggagaagcgcgacggaggcgagagcgttgaagatccacagcgaggctgaacggcggcggcgagagaggatcaatgctcatctgacaacactgaggagaatgatccctgatactaagcaggtttgtgcaagtttttaccgttgtgaagcattcagaaagaaaaaaaatatgcatcaacatctgagccatttcagagagtttgctcgcagttcaactataaactttttttgtgatcttgttagctaacataattgttgaagctaaagatgagagaggttagatatctatttaaaaaactgtttttctgtcgtagttcgtgtagaactttgatacttgcaagaaagtcgaaaccaagaaaaagtcatctgaaagaaatcttcaggctcacatttgttcacatttcaacactccttttctaataagtttggaattccctcacaggacaaatgctacaagcctagaatgccatgactcctgaacacaaattttcttaaaaaaatttctgcactgcagatggacaaggccaccttgttagccagagtggtggaccaagtgaaggatctgaagaggaaagcaagtgagatcacacaaagaacacctctccctccagagaccaacgaagtctccatcgaatgcttcaccggagacgctgccaccgccgccaccactgtcgccggcaaccacaagaccttgtacatcaaggcttccatcagctgcgacgaccggccggacctcatcgccgggatcacccacgcattccatggcctgaggctgaggacggtcagagcagagatgacatcactgggaggaagggtgcagcatgtgttcatattgtgcagggaggaaggcattgcaggtggtgtgagcctcaagtctctgaaggaggctgtcaggcaggcactagccaaggttgcctctcctgaattggtatatggcagcagtcactttcagagcaagaggcagaggatcctggagtcacattgctcaattatgtccatatagatttgttcctcttctggggattttgattttatttttctactagctgagaatatgtatgaaataagagagagaatcttcttcttctgagagctatataggcctgagaattgtgtgcctgaaattgctgtgaaagaattgatgtctgaactgttgctagtgctagtggttgcaatcaaccgacaagatcatatggc

SEQ ID NO: 8945 - DNA, 1830 bp, Oryza sativa
  ref <308>: DATABASE ACCESSION NUMBER: AK106293
  ref <309>: DATABASE ENTRY DATE: 2002-08-28
accgctcgacatgaacggcgaggaggctccggccgggagcggcggcggcggcggtggaagggcggagatcgacacgtcggcgcccttcgagtcggtgcgcgaagccgtcgaccacttcggcggcggcgccgccgccgtctggagctcctgcctcgtcaaccgcatgctcactcccccgaaggaacatgaccagatgaatgggcagaccttgcagctagagaaggagctcatcatcaaggaaagccagacgcttgatgtgctcaaagaattagagtcctccaaaaggatcatttcggacttgaagctaaaagtgcagaatgattcagccatcactggacacccgggccaaactgaagcaccaggtgcagggcctgaggagaggcgctcttctgaaaatgttgaaactgatggggaattgggtggcctggattcacagaatctgcagcctccaagttcagtgctaatgcagcttgagcaggcaaaagcgtacttgaccagaaccacagctgatctagccgagataagagcctccgttgagtcgctgtgcaatgagatagcaaaagagaaaatcttggtggagagaagtcgagagaaggtttgctccaacacatccttgatctcttcgctggagggtgaattggatcgcactacacataagctgcaaacgctgaatgataggcaaagaaggcgcgaggattcgtcacacattctgatggagatcaagaaggtgacatcagagatagagcagctcaagagcgcatcaaatgcatcgaaatctgaagctacgatgttggctgccgaaattgagcagacaaaggcaagcattgcaaccgctgaggtgaggtgtcttgcagccaagaagatggaagatgcagcaagagcagcagaagctcttgcacttgctgagatcaaggccctacttagcggtgaagcttcagctggagatctccagggtactgatggagtgaacttgtccttggaaaagtattttgagcttgcttcaaaagctcaagagtgtgacgtcagctcgaggaagaagattgaagcggcaatgttgcaggtggaagaagccaaccgatcaaaatccaactcgctcaacaagctggaggaagctaaattggaatttgagaaatgcaaaattgcactgcaggatgctctgaagagggcacacgctgccaatcgggggaagctcgcagtggaagagtctgttcgtagatggctatctgagagtggctacaagaggcactcatttcatgattcttccaagttaaaaaatgcagcagatatcactgacgtttcaaagagcttcttgaagccaacactgtcaattgggcagatattgaatctgaagctaatgggacctgatgggtatgacaaaagcgtttgggatgatacaactgaagcttcaaatgtttcacttggtcagatcctgaaccggaggaatgctgttttctgtaacagtgatataacttctcagaagatattgtcaggaaaaaggaagaaatttgccttcacagggctttcagttttgttggcaaaacaagccaagaggcaagagcaagagaaatagaggatcagattagagcctatctgcccaaggtttacctaagcctgaaacagtaggtgatgaatgttgtgaccactatttccatgttcatgtatgttagttggttctggccctgcgtcctctgaatctgttattgccctctcacacatgatttctctaggatgactggttgcggattaggaacgtaaaactgacggtattgcagtcctttctataaatttgcaactatgcttaacatgagtgaggccacaagatgagctgtt

SEQ ID NO: 8946 - DNA, 1804 bp, Oryza sativa
  ref <308>: DATABASE ACCESSION NUMBER: AK106294
  ref <309>: DATABASE ENTRY DATE: 2002-08-28
agcaaaagcagcttaaaaacagcgtcgtcacgctgcctcccgcttccccctcttcgtcttcttcttcttcctccaatggcggtggcgcaggcgtcgctgctgcagagcttcccgttcagggcggcggtgttcgcggcgtgcgtactgctgctccccctcgtgccgtcgccgcaggcgccggcggcggggggagatggtggcggcggcggcggccgtggggaggcgtttcttgccaaggtgtgggagctgctccacctgctcgtcgtcgggatcgccgtgtcgtacgggctgttcagccgccggaacaacgccgggaggcggggcgacgagaaggatgccgcggcgcaggcgaaggcggactccgccgggtacgtgtcgcagatgatccacgactcgctggtgttcgacgacggtggcggcgacgtggcgctcgacagcccgggtggcaacagggtgcggtcgtggagcgcgatgcaccaccccgacgagcctgtggtggtggtggcgaccggcggcgcaggaggcggccggagccacgccgtggaggcggcgcagcaggcgccgccgctgtcgctgcccgtaagaacactgaagccgcagggcgagtcgtcctccagcgcgggctacggcgacggcggcgagccgtgggcggcgcggccgcgcaggatctcacaggacacgcccggcggaggcggcggcggccatgaaaccgtgctcccttcgccgatcccgtggcggtcacggtcggggaggttcgacgcgtcggcgccgagccccccttcgccgtcgccgaagaggctctccccggcgtcgtccctgtccaaggagacactagccaaggccagtgaggactactcctccaggcggaggagcccgtacaagtcatccccaccggcgccgcctccgccgccacctccgttcctcgtccacggctaccatccgccggcggccgaacgccgcacggcggcgaagagcttcaaggaggagctgcaggagcaaacctcccacagcttcactacctccgaattcagccgtagcagcagcaactcctcgtcggcgaagccaagaatctccatagatagctcctcctcctcctcgtcgtactacccagttgccaaatcggtgagaacaatcagaggaggaagagaatcactccagagccagagccaagaacaacccgacgtcgccgtcgccggcgacgcgccggctcttcttcacggatcggattcagacgatccgtacggtggctacagggcgtaccaatccattcccaggttccagtacgagagaggcagcagcgaccccgtcctgggcaacgtgacggtgtcctcggagagcagcgacgacgacgacagcgacgtcgacggcgacggcgagctctcgacgagggggaactcgccgaggagggagtcgtcgccggaggtggacgagaacgaggtggacaagaaggcggaggagttcatcgccaggttcagggagcagatcaggctgcagagaatcgagtcgataaagaaatccgcggggccgcgtggtgtcaagcacggcaagtagctcgcccgccgcccgccgccggcgatcaccggcgccacttttttacttttttttttgttctcgttttgagcagagatagatagtacggtactatttgtatttgtgatagctaattagtagttatcaagaaccacctgtaaacaaattacattcatgtagatgatgaatgagagtgagtgcatgttcatgctcaatttctgggcaaggagatcgactgttgcatctggcaatcaaactggatatctgttccatt

SEQ ID NO: 8947 - DNA, 1601 bp, Oryza sativa
  ref <308>: DATABASE ACCESSION NUMBER: AK106295
  ref <309>: DATABASE ENTRY DATE: 2002-08-28
aaaaagaattaaaaatcagaaaaaaaaactttaatttccagtcttgctctgcgccgccgccggcgaccaccgcagcaacctccgccgccgccgccgccgtccaggaactgaccggccgagctgctccgtctcgtggggcgcgcgtggcggcgatggcgaggcacgaggcggcggccggggtggtggacttccacctgcccgacgagatcctggctgtgatccccaccgacccgtacgagcagctggacgtggcgcggaagatcacctccatggccatcgcctcccgcgtctcccgcctcgaggccgacgcggcgcgcctccgccgcgacctcgccgaccgggaccgcgccgaggccgacctccgcgcccgcctcgcggactccgacgcccgcctcctcgccgccctcgacgagaacgcgaagctggcgaaggagagggactcgctcgcctccacggccaagaagatggcgaggaacttggcgaagttggaagcatttaagaagcagttgatgaagtcactgagtgaagacaatttattacaattgtcagaaataggtgatgaccgtgattttgatgcaaacaacaatttgactgctcgagttccctcttgggaagatgaagtttcaagtagtcgcacttctgcagatagttccagcagatccacaatgactgaatcagcccaagaacatcagttctcagtcacaccatacacagctcctaaattaactcctggttcaacacctaagttcttatctggtccaacatcacctacaaaatctctgtcagaagtccactcaacattttcatcatggcatggatcgtcaagccatcagtattcagcacccacctcccctcctcagcatcgttcgttcgcagggcggccccgtatagacggaaaggaatttttccggcaagcacggacacgactttcgtatgagcaatttggggcatttttagctaacatcaaggagttcaatgctcagaaacaatcacgagaggacactctctcaaaggcagaagagatttttggaacagaacataaaggtttgtacatttctttccagaatatgcttaaccgcaaccattcttgaatgcttgtcacaggcttcagtctatttttgtctcttaaacaagcaggaagtatgtaactgttggaagataatcgttgttccttcatagacgtaaacaacaaattgccagagatttgtaaatagatcattataatttaagctggccatcctcaatatcactatgtaaatggacccagtcatgcatcccaaaacagggatctgggaactgaaatattacacctatggcaaattttggtctgtgtaattaagcatacattcacattccattgtagcacttcctgtgttcctgcggatttcttgaggtgtcctccatgcagaaagttgtacaatactcaaaaactgctcttttgtatctgtgttaacaagtactaaactgctcttttttgacacggtgtattgccttaatccgtgtcaaaaaaacatgtattgccttaaaagagttcaggcaatgatagtatgtattgcttgttctccttgtctgatgaacaaagtaattgctagaattgcact

SEQ ID NO: 8948 - DNA, 667 bp, Oryza sativa
  ref <308>: DATABASE ACCESSION NUMBER: AK106296
  ref <309>: DATABASE ENTRY DATE: 2002-08-28
gaagcgcaactcggcagcggaagccgcgcgcgacgacgatggccgccgccgccgccgactacgagtaccgcgcctacggggcccccgccgaccacgaccgcccctaccacggccgcgaggtggtgccgtacggggaccgccgcatcgacgtcgtcgtcaagcccccgggcaccaccaccaccaccaccacgaggtcgcctccgccgccgctgccggtgaccaaggttgggggcgggggaggaggcatgggatccgcctggtgcttcagcgacccggagatgaagaggcggcggcgggtggcgagctacaaggcgtactcggtggaggggaaggtcaagtcctccctccgcaggggtttccgctggatcaaggccaagtgctccgagttgatccatggctgagccgtgggatcttggtggagttcagtttgggttggaacacgatacaagcctgcaaccatgtgcaaggagtgtactcgctactactaattttctgccaaaaatgcggaaggatttgtccaagagaccgaggggaactgttcttgggtggtcaggttataggaaaggaaaagaaaacttgttaggagctttctgatgagattgcttctcttgccgatgctgttgttactgtctgctaattctagcctaattttttcaacaattttcct

SEQ ID NO: 8949 - DNA, 1641 bp, Oryza sativa
  ref <308>: DATABASE ACCESSION NUMBER: AK106297
  ref <309>: DATABASE ENTRY DATE: 2002-08-28
agctggaggatgagctcaatcagctccgcgccgaggcgggctgcgtcgagcgctgcctcggcggcggcggcggcgggagaggcaactgtgagctcgtacgctggctgcgccagctcaaggaggtggtgtacgaggccgacgacgtcctcgacgagttcgcctaccggaggctcgcccccaacgacggcaaggtcagcctactagggtcttcttccattggcaagatcggcaagcagctcgttggcaaggacgagtcggtcaataggctcaaggccgtcgtggagaaactgagcagcatccgcgcgaactccggccggctgatgcaggcggcggggctgaccaagccaggttccggcgagccgagcagcacgctcctaacctcggatggtccggtcaccggctcgattctggaggatggtgaggtgtttgggcgcgacaaggagcgtgagcaattggtgtcttggctaatcggcagcacgcccgaagccgaaggcgaggatcggagcgccgccgccgatgacaccatccccgtcgccgctatcttggggctcggaggcattgggaagacgacgctcgcacgcgtcctgtgccatgatcatgaggtgaaggaggccttcgatctgatcatgtgggtgtgtcccgcaggcaattacagcaagctcgatctcgcgaagcaaatcctgcagtccgcggaactccccgacgacacgaatagcttcgatcggctgcagcggcggctgaaggaggccgtctcgtcgcgccggttcttgctgattcttgacaatgtctggaataaagatgagaatgagaactcgtacagggatatgtgggctgatgtgttagctcccctcagatttggccgagctgggagtaagatcgtggttaccaccaggaagaggattgtggcagacttgctgaatgcgagcaagtttgtttggctgaatgggctggagttcgctgatgtttggttgttgttcaagaagtttgccttcgacaacaatgatgttgacaggcacccggaattgaaggaaattggggagcagattgctgtgaagctcaaggggttgccattggctgccaaggttgtcggtggcatgctaaagcggaaaccaagtttgactgagtggaagaggatcttgaagatggaaatatatgacaatgttagctccacactggagctgtgttatcagaacctgcaggagcacatccaaccatgctttgcgatatgcagcatattcccaaagaactggaggttcaatcgtgacaagttgattaagatttggatggccctgggttttatccagttcaggccagatgatacgaagaatcaattggaggaggatgtagggaaggagtactttaatcaacttgtggcacaatcattcttccatgagcgcaaggaaggccgccgaacttactactacatccacgacctgatgcatgacctggccgacaatgtctctcgaattgactgcgcaagagttgaaagtgtagagtttgagaaaaaagacatacgcatacctgaaatatgtttcgttttttttcctacgttagccggtgcacttcacctgcgcatgttcaaatactgtcttgcttcagtttactgagctgtgaacaattgtaatatcggtctaccgtgag

SEQ ID NO: 8950 - DNA, 1450 bp, Oryza sativa
  ref <308>: DATABASE ACCESSION NUMBER: AK106298
  ref <309>: DATABASE ENTRY DATE: 2002-08-28
aaacctaatctgatctgcctcctctccccacctcgacccgctccacctagggtttcagccatccccggcgtgccccatctccggcggctgcttccccgccgcgagcccgttctcggcagcggcttcccgttgcgcgcgcgtcccatcctcgccggcgcttaggcggcatcccgactcgcccccttgaaggaggagcccttagaacttgggcacctcgatggccgacggcggcggcggcggggaggccgggtccggtggctcggcgccggtctgcagcttcgtgaggaagccgccgaagaacatccggaagcgcccgaccgcgcccgcgggctccgacgacgacgaagacgggtccggcgccatcgccgccgcgcgcgccaagaaggcgccgtcgtccaccagcaagctcttcttctcctccgcggacggctcgtcggagccccgccggttccagtacgagtcgtcgcggacgatccaggcctccaccgacagccgcgccaccgccacgctcgagacggagacggagttcgaccgcgacgcgcgcgccatccgcgagcggcagctcaagcaggccgaggagtccctgaagaagaacccctccgctcctgcctccagctccggctctggctccggggaggtgtacaaggggatccacggctagacggattacaaggccgggttccgccgggagcacacggtgtcgtcggagaaggccggcgggtcgcacgggccgctccgcgcgtcggcgcacatccggctctccgctcggttcgactaccagccggacatttgcaaggactacaaggagacagggtactgtggctatggcgattcctgcaagttcatgcatgacagaggggactacaagtctggatggcagatagagaaggagtgggaggaggcggagaaggcccgcaagcgccgcatcgctatgggtggggatggtagtgattacgaagcaggggaggaggatgacgatgatgatgaagaagcgttgccctttgcctgctacatttgcagggagccttttgttgatccagtggtcacgaaatgcaagcactatttctgcgagcactgtgcattaaagcatcactcgaagaataagaagtgctttgtctgcaacaaaccaacactcggcatcttcaacgcggcacaggagatccgcaagaagatggcacaagacaagaagcaatagtgcccactgacagttgaagaatgtgacttgtacgttagagagttgaagaatctaaatgatgtggaattttagatgacaaagaaaactaccaattagttttgcattctgtttatgtaacaatatctgctagcctactctcacttgctcggttcagctcagccttttgtatggcaaatgtattgcttctgtgaggatgtgaattgtgcagagcccaaatagatgaggcaaacataaaaggttcttgatttccttatc

SEQ ID NO: 8951 - DNA, 2552 bp, Oryza sativa
  ref <308>: DATABASE ACCESSION NUMBER: AK106299
  ref <309>: DATABASE ENTRY DATE: 2002-08-28
aacaaccttagccccttctccagcttccccttcctcaccggccacgcctctctcgccacgcctcttctccggcgaccgccgccgccgccgccgaagaggattcgtgaagtggtccatgtccatgtccacggccgcgtcgtcgtcggcatcggcggtccggccgccgccgacgtggggggcgccgtcgcagaggcggctggtggagcagcacctggcgtcgctgccgcgcggcctcccgcgggccgcccacgtgcgggagctccacgcgcaggtgctcaagcagggcctccacctcaacccgcgcgccgcggcgaggctggtgtccgcctacgcgctcctccgcctcctcccgtcctcccgccgcgtcttcgacgcgatccgggacccgcacgccgacgccttcctcgccaacaccatgctccgcgcctacgcgctggggggcgcgccgcgcgacgcgctcgccgcgttctccgccatgccgcgcagggacagcttcacctactccttcctcatcaaggcgctctccgccgcgggcgtcgccccggtccgcgcggtgcactcgcacgtcgtcaagctcgggtccgtcgaggacaccttcgtcgggaacgcgcttatcgacgcctactccaagaacggcgggttctcggacgcccggaaggtgttcgacgaaatgccggagcgggatgtcgtgtcctggaacacggctatggcggcgatggtgcgggagggggagctggctggcgtgaggaagttgtttgacgagatgccagagaaggacacggtgagctggaacacgatcctggatggctacacaaaggcaggggaggtggaggcggctttcgagctgtttcagcgcatgccggagaggaatgtcgtgtcgtggtcgacgatggtttctggttactgcaagaagggtgacctggagatggctcgggtgatctttgacaagatgcctagcaagaacttggtgacatggactataatggtctcggcatgtgcacagaaagggcttgttgatgaggcaggtaagttgtttgctcagatgaaggaggcttccgtggaacttgatgttgccgcggttgtgagtatcctggctgcgtgtgcagagtcaggctctctttcacttggaaagaggattcaccgatacgtgcgaaagaggaatctagggagatcaacccatgtgtgcaatgcactgattgacatgttttgcaaatgtgggtgtgtgaaccgagcggattatgtctttgacactgagactgttcagaaggattcggtgtcatggaacagcatcattggaggttttgcaatgcatgggcatggagacaaggcactggagctctttgctcaaatgaagcaacagggatttaaccctgatgctgtgacaataatcaatgttcttagtgcatgcacacacatggggtttgtggatgagggccgccggcatttctccaacatggagagggattatggcatcatgcctcagatagagcattacggttgtatgatcgaccttcttggccgtggagggctcatcaaggaagctgtcgacctcatcaaaagcatgccttgggagcctaatgaggttatatggggatcccttctcagtgcatgccgactgcataagaatgtggagtatgcagaaatagcagtgaacgagttgagcaagctgcagccgtcgaatgcagggaactatgctgtcctctcgaacatctatgctgaggctgggcagtggagtgacatggcaaaggcaaggatgcagatgaaaggaactgggtcgcagaaaacagcaggatcaagctgggtcgaactcaatgagacgttccatgagttcaccgtgggggatagaaagcaccaagattcagaccagatatctgagatggttgacagattgagctcgcatgttaagcatgttggctgtgttccagcaggccatgagctgcttgtgcagtgagtcgtttattagggcaatgcatgcttataggctattgcaaatttgggaacctctgcctggtcattaaccttgcagatcatgtgatctgaagaaaggaagcaccattccttgtactgcctgcaatcaagaaggtggtaggacatggtacagaagcttctttgattgagtgaacagccttggatgtgttgaaagcttgaggcattcatcagcttctgcgcatctgccatcaggtttgctctgttaatgactgttaccatgacgacagatgatgatgggggtgactgacaaaacactgacaatggtcggatagttcatggttagggccttcacttcatctggttagacaaaaccgaaacaaaggtttatggttagggccttctgaaaaagcagaagacaggaactcaagattcaacagagcagcatttttctctttccactgcaacagtacaatgttagcgcataagaatagtatattttggaggttttacagttcttgacttcatattttacatgtatcatccttttctaaacgaacgtatgaatgaagaagtatatattgttctatcaaatttcaatgcagatatcttcatgcattgagaac

SEQ ID NO: 8952 - DNA, 1420 bp, Oryza sativa
  ref <308>: DATABASE ACCESSION NUMBER: AK106300
  ref <309>: DATABASE ENTRY DATE: 2002-08-28
gtgagtatctgcgcttatctggcctatcatctgatcatctactgtcggctagctcgatcagtagctgggaccataattaatttaagttaagttcaatcaagaagtcgagaggcgatgtcctggtggaagaaatccagcggcaaaagcagcagcagcagcagccagtactacgctggctctgacagctcgtcgttcgccggaggaggaggagacgaccggtacggacgagccggcagcggcaacggccgctcgccgtggacgacgtccgaggagtacccgaggtacaccagcgacgacgacaaccgcagcggcagcggcagcgacgacgacgacgaccacggcgaccggaacaggcgcaggggaaagaagagcaacaagaagaagagcagcagcagcagcagcagctacaagtacgacgacgacggcggcgagagagaccggagctacagcaactacggcggctacggcaacaacgagggctacagcagcagcgcccccagcggctacaacccctacaacaacggcggcggctacggcggcccttcctacggcaacggcggcggctacggcggctctacctacggcaacggcggcggctacggcggctcttcctatggtaacggcggcgccatcgtagccggaggcggcggcggcagcgcccctgcctcctatggctatggctctaattccggctggggtgcgccggcgccgccgcggcaggagggtggctcagggtcggcgccgacgtacctcaacgtcatctacatgacgcagccagggtcgtcgtcgtcgcagaacgagaactccggcgagaggagagacaacggcggcggcggaggaggacgaaacgggctcttcggtccgacgttccaagccgtcggcggctatatggaccgtaggttcggattcgactgagcctgatagattcctaaattgcttcaattcaattcgtcgatgtctcctctccgttctgcatctcgatcgactccatcgatatctactgcaactctgcatgtgcacgcatgcatgcatgttggcacatacttaattcgtacgtactcaaattctacaagcgttcgttggttcagttaagttaagttattattcagaagaaataatcacggaaggccgccaaataatttgtggtaatgagtgctcgtgattctatagttttgttatttttttttcaactgccgaagaagtgtaaaccagtagtaccggctttcctgcttcaaggaaaaatgaagttgctaatgtactatatagtatatacacatgtgggtagctagctagctagtattgtgttgtataattgtactagccggagactgttttttgtgttgtactctagctatctgtatgctgtgtgtatgttcagtgtgctgctggctagctactcaatatgcttccatactactgt

SEQ ID NO: 8953 - DNA, 2284 bp, Oryza sativa
  ref <308>: DATABASE ACCESSION NUMBER: AK106301
  ref <309>: DATABASE ENTRY DATE: 2002-08-28
ctcgcctccatctcacccgcacgcctctccgcctccgcctcccacctcctccgcgcgctgccccgcatccgcctccgccgcccgctcgcgtcggcgccccgcatgtcctcctcctcctcctccaccaccgcggcctcccccgccgctgccgccgccgacggtggcggtaccggcgagaagcccgtggcggcgccgtacggatcctggaggtcgcccatcaccgccgatgttgtctccggcgccgacaagcggctgggagggatcgccctcgccggtgacgggcgcctcctctggatcgagggccggcccgaggagaaagggcgtatggttatagtcaaggaggatgataagcctgtggatatcatacctcaagaatttgcagcacgtactctagctcaagaatatggaggtggtgcattttcagtcaaagataatgttgttgtgttctcaaactacaaggatcaacgtctgtacaagcaaagtactaaaactggtgtgcctgtgcctcttacacccgattatggtgggcctgatgtcagttatgctgatggagtctttgatcctcacttcagccgttatgttaccgtgatagaagaccgtcgaaagagtagcttgaatcccaccacaacaatcgcagctataagcttgagtaatggggttgttcaggaaccaaaggtgctgattagtggcaatgacttctatgcttttcctcgtattgaccataataacaagcgtatggcatggatagagtggagtcatccaaatatgccctgggacaagtcagaactttgggttggctacttctctgaaagcggagacttgaccaaacgggtctgtgttgctggtagcaatccaatgttagtggagtccccaactgagcctaaatggtctccaaaaggcgaattgtttttcctaactgatagagggagtggattttggaacatctataaatgggttgagcacaccaacgaggttatttcagtttacacgctagatgctgagttcacaaggccattgtgggtttttggtatcagctcttatggttttcttggtgaaagcaatcacattgttttcagctacaggcagcatggaaggtcatatcttggtgttctggactctgatataggttctgtttcattgcttgacacccccttcactgatttatccaatgtggttactggaaatgattacttctatattgaaggtgcatctgcaactgttccaatgtcaatcgcaaaggtagctttagatgaggacagaacaaaagtagttagtttctcaataatttggtcatcctcattagatgttgtacaatatagttctttcttcagtgcaccagaatttgttgagttttcaacatccagcaccggccagaaagcttatgcatatttctacccaccttcaaacccaaattttcaaggtttgccagacgaaaaacctccattgcttgtcaaaacacatggaggaccaacagcagaaacacgtggaattctggacctgagtgttcagtattggacaagtcgaggatgggcatatcttgatgttaactatgggggaagcactggttttgggagggagtatcgagagaggctattggggaaatggggtatcgtcgatgttgatgattgttgcagctgtgcaagagtcctggtggagagtgggaaagtagatgagcgacgcctttgtattactgggcgatcagcaggtgggtacactacgttagcttcactcgcattcagggacacattcaaggctggagcttctttgtatggtattggtgacttatctttgttgagagcagagacacacaaattcgagtctcactatactgacaatcttgtaggaaatgaaaatgcttactatgagagatcaccgatcaactttgttgacaaatttacatgtccagttattttgtttcaaggcttggatgataaggtagtcccaccagatcaggcacgcaaaatatacaaggccttaaaagagaaaggtttgcctgttgccttggtggaatacgaaggagagcagcatggtttccgcaaggctgagaacatcaagtttactttggagcagcagatggtgttctttgctcgattagtcgggaattttaaggtggcagatgatataactccaatcaagatcgaaaactttgactgatcgctcgaagaaagtgtagcagtagcttacatttcgtggaacatgacctcttacagtttgcatctgtttgaattgtccatgtactccgactaaatgttcattaaaatcaatcaatgttggagtctggggc

SEQ ID NO: 8954 - DNA, 1842 bp, Oryza sativa
  ref <308>: DATABASE ACCESSION NUMBER: AK106302
  ref <309>: DATABASE ENTRY DATE: 2002-08-28
aaaaacacacacaccagccgccgcatggcagtaccagaaaccaacacaaaacaagatcatggggagcatgagcacaccggcggcgagcgccaacggcgggcaagtgctcctgttgccgttcccggcggcgcagggccacaccaacccgatgctccagttcgggcgccgcctcgcgtaccacggcctccgccccaccctcgtcaccacgcggtacgtgctctccaccacgccgccgccgggggaccccttccgcgtcgccgccatctccgacggcttcgacgacgccagcggcatggccgcgctcccggaccccggggagtacctccgcaccctggaggctcacggtgcacgcacgctggcggagctcctcctctccgaggcgcgcgcggggcggccggcgcgcgtgctggtgtacgacccgcacctgccgtgggcgcgccgcgtggcgcgcgccgccggcgtggccaccgctgcgttcctgtcgcagccgtgcgccgtcgacctcatctacggggaggtgtgcgcgcggcggctggcgctgccggtgacgccgacggacgcgagaggtctgtacgcgcggggtgtgcttggcgtcgagctggggcccgacgacgtgccgccgttcgttgcggcgccagagttgacaccagccttctgtgagcagtcgatcgagcagttcgccggactggaggacgacgacgacgtgctcgtcaactcattctctgacctcgagccaaaggaggcagcatacatggagtcgacatggcgcgcgaagacgatcggcccgtcattgccttcgttctacctcgacgacggccggctgcggtcgaacacagcatacgggttcaatctcttcaggagcaccgtgccatgcatggaatggctggacaagcaacctcctcgctctgtcgtccttgtgtcgtacgggacagtctccaccttcgacgtagccaagctggaggagctcggcaatggcctttgcaactccggtaagccattcctttgggttgtcaggtccaatgaggagcacaagttatctgtccaactccgaaaaaagtgtgagaagagaggactaattgttcccttttgcccccagctggaggtgcttgctcacaaggccacaggttgtttcttgtcgcactgtggatggaactcgacattggaggcaattgttaatggcgtaccgcttgtggcaatgccacattgggctgaccaaccaaccatttcaaagtatgtggagagcttgtggggcatgggcgtgcgagtgcagctggacaagagcggcatcttacaaagggaagaggtagagagatgcatccgggaggtgatggatggtgacaggaaggaggactacaggaggaatgctacaaggttgatgaagaaagctaaggagtcaatgcaggaaggagggagctctgacaagaatattgctgaatttgctgcgaagtattcaaattgacaaaaattattgctgaaatctcaagcacctagctatcagagatattctagttctgacttctgaatacaattggtttttcttcctagagaagttcatggaggtcaaggtgctgatgttttccacgagtcagcagaagtaaattaagtttacagtgtgtgtaaaatggtaatttatactacttacaatttttattttataattgaagtgtcgttaacttatgtcctcgtcgagggcaacaagctaccttagagatatcacgataacaaatgaattatgtaagctttacatactttgagagtaccgggcatagcttgcttaccaaattacagaacatatatatgtgcatgcatcaatttcctctgataccggaaaaactgttattt

SEQ ID NO: 8955 - DNA, 2585 bp, Oryza sativa
  ref <308>: DATABASE ACCESSION NUMBER: AK106303
  ref <309>: DATABASE ENTRY DATE: 2002-08-28
atccccatccccattccccaccgccgaactcggcccgttctctcaaaaaaaaaaaaaaaactcggctgggttcttctcagttctctcctctcctctcgtctcgtcctccgcctctagcgagaactgagacggtgaaggggtggatactggagactggaaaatccatgaatccatccagagtcggattggtttctcgctctttccctccctcctgatcttatttcaaaccattcagtttttgttgcgattttgctgcttgggtggtggtggagcaatggaagggtttctgcatcgccggaaaccaaccacgacgatgacgacgacgaggaggaggaggaagatgccgttgcttccggcgagtctcccgagcagcggcggccgcctcggatctccgccatcccccccgccgagctgcgcctcgccggcgttggcacggaggccaccgcttcggcagccgcagatgccgcgggcgcatgcggcggcgggggatgggggaccccgtgcgtcggcttcctgctcgggggcttggcccgggcaacgaaatctgaccgccattgatggttttcccccaccatttggtcgccattttactgtacattgcctgcgccgatctccatccatcccgcgagcatcctcgctcgctggccagtatctgtactttgtctggaatttgcttgcgttaaccctagcttctcttctagatctggaaactgccttttgtcacattttatttcccccaaaatgtgggggttcaagttcagctgaaccccatgctcagcgagtcgcgaggcgattgcaacatcggccatttcatctccgctagcggtggctgatgatggcattcgctccaaaaaaccgcggctcgtttgaagagttgcaaatagtttacacccctggatctaaacacaccctgaattccccgcggcgatgaggaatgaggccggtttagctccggcgcctctcctgatcggtggcggccgcctcggatttccgcttttcgggggccaatccccagccgcgtcgcgcacgccgtgcggcattggtctggaggccactgctttggcagctgccgatgtcgcggcgcctgcggcggtggaggatggggaccgtgcgtggcggtatccgcgttggcttcctgcccagggttggccgagcaacgcaaaatctgagccgcaattgttggatttttcactagcccgtgcgttgcaatggaaaaaaaaaacaaattgagtttctagcttatttagtataagcacagcaatacttctatgatgattttccttattgaacaagtaggtgatttcgaaattcaaaagaaccaacggtgaaatggaaagggctctttggagggtggcgtgataatattgtgggtaaacattttaagtaggattgatttagtcgccattttgttgcacattgctacccctctttctcctccctctctttctccgcgtgcttgcgtgagagagaaagctggtactacttactctgcttagagcaagtttaatagtatagctaactactactccctccgtttcacaatgcaagtcattttagtatttcccacattcatattgatgttgatgaatctagacatatatatctatctagattcattaacatcaatatgcatgtgggaaatactagaatgacttacattgtgaaacggaggaagtactatcttcatgggtgtgtgttttgagctcgagctgagctttgactgccctacttccaagttccaaccggtctctgcatcagttccccacctgtatggtgctgcctctgctgctccattgccttggattcgtagcagccaaggctgggaaccttcagtggagtctgatgcggcttccgcgtcgggatttggtgggtagatgcgcgatctgatctgatctctgaatatctgatggatggatggatggatgtgtggtggtgatggattttatttgctagttgctcctgctattgcgcttgctgttgtggccgacacaatctcctcttgctcgtctctgtatatagtgtgctctgctgcctgtgttcctccggggattcttaaacttgggtcagaattcctggcagatgtgcaatattacaataatttccagttcacttcgtattgtggtaatgagcagtgatgatcacaaaagcatgcttgctgttggacattcaaggtggccatctgatgccaaagtacctggaccaacttctccagaatgttggaaacatggaatggaatgtgagagtgtggatgaggggcgatgatgatcagccttttctgacaagcatgcctttgaaaaatcaaggcagctgagggtgtcaattagacttgatcctatcatctcttgtgacctattcactcactaatgttaggtggttcttgcacctaggatggtcattctgttaatgataaccaaggaaggtccacttacattaggatgagtagattgtggagcaagatatataggggttgggtctgtatgattgatcaaaggcaaatctgagcccacttaggcctcttttggagtggaaaacacaatatgagaacacacttagatgaacaaaaaaaataaagaaattttaaaaat

SEQ ID NO: 8956 - DNA, 3899 bp, Oryza sativa
  ref <308>: DATABASE ACCESSION NUMBER: AK106304
  ref <309>: DATABASE ENTRY DATE: 2002-08-28
gtttctttcccctctcttttgagatgatcctcccttccttttcctttattttcttgagagatgagatgtgttcgatttcagctttgattatgccaagaagaactccgattatatactactccaccgtactagtagtatagtagttgtaaagaaagcaagttgggtcaaagaaatcgaaggcgatctcgatctatctatctatccgtgtagcactagcagtagcagtagcaggcagccatagatcgatcctcgtcggcgtcgcgctgtggttgcggcggatgctgcagcgggcggcaagcaatgcctactcgtggtggtgggcgagccacatccgcaccacgcagtccaaatggctcgacgccaatctccaagagatggaaaccagagtcaagatcatgctcaagctcctgggagaggaagccgatacgttcggcaagagagccgagatgtactaccgcaggaggccagaggtgattaaccatgtggaagaggtttacagggcctacagagctctcgttgaacgctacgaccacttatccaaggagctgcataaggccaaccacaccattgctactgcatgcccacaacacgacgtctccttgttacaagaacaagacgatgctgaattcacacccatcagaatacaggaatccactactactgtacaggaggttttgaacccaaaaggacatgcgcgcccctgtgctcctcacttcaccaaacagaatgcgcaacaagagatcgacacacttcaaaaggctatacttgtcctgcaaaccgagaaagaattcgttaagagctcttacgagactgggattaccaagtatcgggagatcgagaagcagattgcagatatgcaggaccaggtatgccacatccaaaatgagtttgatgcacatgcgtccatcgaggatgatgaagcccgtgccctgatgaccattacagctcttagatcttgtcaaggcacagtagctaatcttgtgaaaatatttgaagagttagtcagggttgcagcaggggagtccgaaaaagtaaattatctccgacaaaaactgtatgctatgaactacatcattgacccgtctaagggagaagttggcacaacaaacatcgcagtgaaaaatagagtttatcctaatactcaggaaatactggagctgcaacctatatatgaaaaaatcgaaaagttttttgagctcaactctgaatctgttgtgcaggagatggcagagagagttgatgagcttgttgataaggtcatgaacttggagctcaaattcccaaagcagtccgctcaaatcaagcagctgaaggaagataatgatagcctcaaagataggttggatgatctacaagatgagatagcacttcgagatgatccaagtgacttaagtgaacagctcaagttagcagaagatgagttgaacagagtcaatgctcttgaaagatctgttattgaggaagaagttcttgttagcacagtcttttctgaagttgttagttgcatcactaatatctcaaaggcctttggatctattgatccagaggacatgactagtttatcagctgcagttgaaaatgatggggaaataacatcagatgatatcagcacctcactgccagaagaagaattcaggggtacagaggaagcaactacagatgataatttgggcagagacaggtgtagaaaagaagatgcctcaggagttgagggtcatgattcactagatggtactgatggcattgatgactgtaagaatggcaacgaggaaaactttcaaagtgaaaatcgcttaatccaagaagacttgatggataaaaggtcaatacaagctagcaataacattgatcgaattgttattccaggcaaagaaaatggttttaacaacgcatgtgaaggcaaaatagattgcagcccatcaggtaatacgaagaaatatagagacataggaaatgatgttattgacaactctgttcaaggggaaagtttgaaaggtgaacatccaccaacggtaataagtcagactcacctcccacactcagaatgtttagatactttaaccaataaaagtgactccgatgagaaagggtcatcagtggttgttactgtgaattcattcggaggcagcaagagaatacaaggcttaaggattggtggcgatgaaaattctatgtctgggaacagcttgatccaggaagaactcagagatgacaaatcactaaaaacacctggatatgttaatttggttggttctacaaaccaacatagtttgagtgatggaagcaccactgaagaaatctcattacccaaagtttctaatagttgtttcagtgatgcagatatgagactggaattatgtcatactgaagaagcaatatctgttgaagaatggccaaaacaagatggtcagctgattgccccagaaactatgaaaagtttgaacggaggcagcaaagttgactcatctgagaaaggtggccgcacttcattagagcatatgaacagcatacaggatttgaagactagtgaacttgtggatgcacattcgtcaagagtgtatcagcaagtacccaaagtaacaacaaaatcaaacaatattgctagttgcattcctcatggtgagctagagatgagaagttcggatggcagagaacatacaagacaagcaagtaccttgagcaagcctggaagcatgagcttgcgcgtcaattctagtttggttgcagaaagagatgcacctagctggcaggagtttctccttgatggcattgaaggtagagaagcattattgctagacgactacactttaattctccggaactataaagaaacaaagagaaggcttgctgaattggaaaagaaaaatgagcaacatcccaaagagacaaagacagtaataagggagttgaggaatgcaaattccatgaaatatgttgagatccagtccctaagagatctcctggatccttcagaagatatatcatccacacatagtaaaatgggttttaacagatcaaatcatcctttggacacagaaatttctgtgctggagggaatcgatgtaagacacactggtgtacggaagaatacttcacctttcgaagtgaagttcagatctgagattgatgctctggttgaggaaaacttgcagttcttggtaaggtttagcatggcttgccaccgcatgcaggactttgacagcaaatatcaggagctacaaaagggaatgggggattttgaagttaagaagacaggagaacctgatgctgcagccgagtctgatcctgctgaaaagaagttgagagagctaagaactgaactggatgtatggtttgaacagaatgcacttcttgatcaagacctgcagctcaaaaccatgtctctttgcagattgcaggaggagatagctgaagccttgcgtgctagcgcagagactgatggtggtaggtttacaccatacgaagcagccaagtttcaaggggaggtactgaacatgcaacagtctagtggtaagatcgagagggagttacagtcagcactgaagcgcatgagagaacttgaaggcaaggtcaatgacggcttgcagaagctgcgtgagagctttgatctttcatgcaggaggtcatctttggtggaggaagaaagcagcagcaccagctaccacagccaattcaaacacttcccgactagaacaagagtgccattgcggaacttcctattcggcacaaagccgaagaagaaatcaatatttgcctgcataaatcctacgttgcagaaacagttcagcgatctgtgagttggcagacactgtagaatacatgtactccctctgttccaaaaaaagacaaaccctggttccgtacccgtttgaccgtccgtcttatttgaaaaaattatg

SEQ ID NO: 8957 - DNA, 2423 bp, Oryza sativa
  ref <308>: DATABASE ACCESSION NUMBER: AK106305
  ref <309>: DATABASE ENTRY DATE: 2002-08-28
gtgatgcatctggtagaaaagttgaggcgatggatgaaaatgatgatacgtgtggtttctgtggagatggtggtgaattactttgctgcgacaattgcccatcaacatatcatcaaacttgtttgtctgaccaggaacttccagaaggcagttggtactgccataactgcacatgccggagttgtgggaatccacttagtgaaaaggaggtttcaacattctcggctatcttgaaatgtttgcagtgtggagattcataccatgatacttgcattgaccaggagatgctcccctgtggggataaacaatccaacatatggttttgtgggagatactgtaaagagatatttattggattacacaatcacgttggaatagagaattttcttgacaacgagctttcgtggagcatattgaagtgcaacactgatgggcagaagctacattcttccaagaagattgcgcatatgacagaatgcaatacaaaattagctgtggctcttactatattggaggaatgttttgttcgcatggtggatcctagaactggtgtagacatgataccgcatgtcttgtacaataagggatcaaacttcgctcgcttagattaccaggggttctatacagtaatcctggagaaaggtgatgagattttatgtgtagcatctatcagagtacatgggaccaaagcagctgagcttccatttattgctacttctgtggattatcgccgccaaggaatgtgccgaagacttatggacaccattgaaatgatgcttagatcattccatgttgagacattggtcctttctgccatcccagagttggttaatacatgggtgtcaggatttggtttcaaacccattgaagataatgagaagaaacaacttcgtaatgtgaacttgatgttatttcctggaacatccttgctaactaaaagattggatggaattacagctgccaaatcagaagaggacaaggatgcatacaatgtttctggattacctaatggtaagtgtttgcctagcaggaaaggaaacgggcatcttgaactccatgatcttgacttgttagaggccgagttgaatactgaggatgcaaccaatgcttctttcagagcactgaaacatgaatgtggtcctgcaacatggtttaatcatgccaagctagctgttggggaagtgtgattttattttaaatcgaatttctgggctgtctctggctgttactctgtgttgggcaactgttcaggctactcatccttccagttccagtccagtactatgcaatgaattctcccggatgcaatttaccggaccacagctcttttattgcaaaacagaaagacatcttccaactgcagttcatgattcaattccctcagaggtgcaggttaatggatcaaattgagctggtcgagctagattttatattgaatacagtgaagctaagaaatctgagggacacaagatggcatcatcagatactcaaatgttcccgcctatcactgaaatatgaaaaatgagggtatcttccaactgcagttcatgattcaattacctctgagcagctggttaatggagcagatagtcatgcaagaaataacaagggatggatagatggtctcatctatccctgcaatatgaaaaatgaatgtttgagatgcaatgcgaaactgtatttttttgctttactgagtgaagcacctgagtcgcgatcacttggacaaaagcagaacatgactgacccttttctgagtgatgttgatagggatttacctaagctgtatgcagtcactgttgatgggtcgtataagctgcatggtggccagaagggttacttgcagaaacatggttaacatttaaccctgcggaagatatgaatggttgcacctagcagccattgaagctgttttgagtgaccatggtggaccatagtggatattgtatgagtgactatttaatggggatcgcgttgcaaagtttaatgaaactgagcggagaaactaatgcaatttcgtcctcgaaacaagcacagataccaagctatcgagacaagtatcacaatgctggtgatcaacagatcatttgtcagatgtttcatttgagtcttcctcttcctgggtgcagttcctgcctgcctggtaattttgatcagctgctggggctggcgcgtcgcattgcagtggagattttcctttgctggtctgcagccagagattagttttctcacacctgatacatcccgggccatcaaatcttgcaagttacttacagtagtagtactacactagagaagtttttccgaaccaaagaatactactatttagattgttacaaggcaagtatttttttgccaatttaacatgcagctgttcatgcgtttcttgcacattggaaatcaaaacgttgattcgtatttgt

SEQ ID NO: 8958 - DNA, 2510 bp, Oryza sativa
  ref <308>: DATABASE ACCESSION NUMBER: AK106306
  ref <309>: DATABASE ENTRY DATE: 2002-08-28
tccttttgcagtttttttctgctcagctcaccgggtcccctctctcatcttcctcgtcgtgcaccttgcatggatgtagaagtagcgagctagcgcgcggcgactgcgagccgagagagcaacgcaagaacggcacgagaggctggcagcgagcgagcgtgtgcatggttggtgcgagcaaatggccagcggcggcggcagcagcaactggttaggcttctcgctctccccgcacatgccggccatggaggtgccgtcctcctctgagccatcgactgctgctcatcatcatcatcatcatcatccacctgctgctgctgctgctgccggagccatgtcgtctcctcccgacagcgccacgacctgcaacttcctcttctcccctcctgcagcacagatggtcgctccttcacctggctactactacgtcggcggcgcctacggagacgggaccagcaccgccggcgtctactactcgcacctccctgtcatgcctatcaagtccgatggctccctctgcatcatggaaggcatgatgccgtcgtcatcgccaaagctcgaggacttcttggggtgtggcaatggcagtggccatgacccggccacctactatagccagggccaagaagcagaggatgcaagcagggcggcctaccagcaccaccagctagtcccctacaactaccagccattgacggaagcagagatgctgcaagaggccgcagcggcgccaatggaggacgcaatggcggcggccaagaacttcctcgtcaccagctacggcgcctgctacggcaaccaggagatgccgcagccgctcagcctctccatgagcccagggtcccagtccagcagctgcgtcagtgcagctccccagcagcatcagcagatggcggtggtcgctgcagctgctgctgctggtgatggccagggaagcaacagtaatgacggtggcgagcagcgtgtcgggaagaagaggggcaccgggaaagggggccaaaagcagcctgttcaccggaagtccattgacacgtttgggcagaggacatcgcagtataggggcgtcaccaggcacaggtggactggaagatatgaagcccacctctgggataacagttgcaaaaaggatggacagacaaggaagggaaggcaagtatatctaggtggttatgacactgaagataaagctgcgagggcttatgatctggctgcgctgaaatactgggggctatctacgcatataaatttcccgttagaaaactaccgagatgagatcgaggagatggaaaggatgacaaggcaagaatatgttgcgcacttgagaaggagaagcagcgggttctctcgcggtgcttccatctaccggggagtaacaaggcatcaccagcatggaagatggcaagctcggattggcagggttgctggcaacaaggacttgtatctcggcactttcagcactcaagaagaagcagcagaggcatacgacattgctgccatcaagttccgtggcctgaacgcggtgacgaactttgacatcacaaggtacgacgtggacaagatcatggagagcagctcgctgctgcctggtgaggcagcgcgtaaggtgaaggcgatcgaggcagcgccggaccatgtgccaataggccgcgagctcggtgcgaccgaggaagcgagcgctgctactgtcacgggcaccgactggagaatggtgctccatggatcacagcagcagcaagctgcagcgtgcaccgaagcaacggcagatcttcagaagggcttcatgggtgacgcgcactcggctctccacggcattgtcgggttcgacgtcgagtcggcggcagctgacgagatcgatgtcccgggagggaagatcagtggcatcaacttctcgaactcgtcttcgctggtgactagcctgagcaactcgagggaggggagccctgagaggcttggcctcgccatgctctacgccaagcatcatcccaccgccgtcagcctcgccgccatgaacccctggatgccgatgccggcgccggccgcagctcacgtgatgaggccgccgagtgccattgctcatctccctgtttttgcagcctggacagatgcttaattagagccatgttgctgcttgctcgatcttgcttttgatcggctctttttgtaaactaaagcaagatcagcagcaatcaggtgcttatggtacttaaattagctggaagcctggagtagcatacttggttatgatggtaagcactaggctggtggtgtaagtgtttaaccagtaaacccataggtaggacattcaagcaaaatccaaatctctagagcatccactggtagtagtagtagtagacctttagtgttagaccggtagtgttctttgcttcttttgagcctctttttttgggggaaatttggttggaatgtatggctttttaacacgaaatcaggaatgtatggcttttaacacgaaatctggctgtggcattaaaaggaaaaggttcagtgag

SEQ ID NO: 8959 - DNA, 1419 bp, Oryza sativa
  ref <308>: DATABASE ACCESSION NUMBER: AK106307
  ref <309>: DATABASE ENTRY DATE: 2002-08-28
agtgactcgcacgcatatcgctttgctctgcttcgccttcgcttccgcttccgattgccgtttccgctttcgccgcgcgaagacgtaaagaaggaggcggcggcgacggcggtggtggggttgagggatggggtacgcgcggacggtgaaggcggcgacggcggcggcggcggcggtgctggtggcgttcggggtgaggatggcggcgccggctgcggcggggttcgtggcggacgagctgccgcgggcgcaggcggcggcggccacgtggctgacgccgccgtacctgtacctcgtcatcaacgccatcatcctgtccatcgcggcgtcgtcgcggttccagcctaaccgcccgcaggccgcctccgccgacgcgtcgttggtgcggccggctccggttccggttccagtcccggtggtggcggtgcccgcgccggcggtgacgatgccgatggaggtgcccgttgtgccggtgccggaggcgatggctcccgagcccattcccgtggaggtgacggtgccggaggtggtgaagacggcgccggaggcggaggaagcggaggagaacttcacgatctcgaggtcggcatggacgccacggcggaggagcaccgccgaggcggaggcagagcatgaggcgttgtcccccttcgcggacctgacgaactcgagggagaagccactggtgtccactcgattcggccggaagccggtcaaggcgagcccagaagggagcagcagggcgctgggggtgtcgcggccgcggaaggagcagacgctggagagcacgtggaaggccatcacggaggggcgggcgccgccgctggcgcggcatctcaagaagtcggacacctgggagacccggcccggccgccgccagtccggcagcggaggtggcgaggacgcgccaccgccggcgacggcgatgcggaaggcggagacgttcaacgaggccgccggaggaggaggaggagggaagaaagtgcggcgggagccgtcgctggggcaggacgagctgaaccggagggtggaggcgttcatcaacaagttcaacatggagatgcggctgcagcggcaggagtcgctcaagcactacaacgaaatgatcagcagaggcagcgtctactgacgatgcagagcagcaatagcagcaagcaagagcttgcttttttgttttgttttgtagttttggccttttttttcttcttttgggctccctttttttttttaatttcttccttcaactatcagttgtgtaagaaatggttttgttcaaggatgatagtgatagtacacaaaagacaagactgttcatattaggggcgacagattagtgaagaaaagaacaacccaatttctattggggtcttgtgtattaaatattaattagcctttgcttactgagattgttcatggcac

SEQ ID NO: 8960 - DNA, 785 bp, Oryza sativa
  ref <308>: DATABASE ACCESSION NUMBER: AK106308
  ref <309>: DATABASE ENTRY DATE: 2002-08-28
aagatcatctctctccacttcctctctcgctcgtttcgcatccgaagaaaaagggaagagttggggtttcgagagggaattaagggaaagggaaggatatgtctgcgccgtggtgggacaacgactacaatggccgcaccggctccgactcgaaggggcaggagagccgcgtgtacgtcggcaacctgccgtaccgcgccgacgagcgctccctcaaggactccttctccaactacggcgccgtcagctccgagatcgctgtggaccgtgagacggggaggtcccgcgggttcgggttcgtgagcttccaggacagcaagtcggcgagcgacgccatcaagggcatgaacggccaggacatcggcggccgcaacgtcatcgtccaggaggcccagccgcgctcccgccgctgagcgcacggcgccggcggaccagccgccggcgtgaagactacgcgctcaagcctacctatctagatactgctactagttgtgctactatcagtttcagtttcagagtcgcgttcgtgttcgtagtttggttaattaatgtagtagggtttaagagattgatgccaatgaggctctgttggtaatctccttcgtagtttgggtttaataagagatatgggtggttaattatcaggctctgttggtaatctctcgttggtagtttggtcaatgtactagggtttaagagatggatgggatggttaattgtcaggctctgttggtaacctcctggatatgaatccttttgtcgtcgacggcagtcggcagcaccat

SEQ ID NO: 8961 - DNA, 1584 bp, Oryza sativa
  ref <308>: DATABASE ACCESSION NUMBER: AK106309
  ref <309>: DATABASE ENTRY DATE: 2002-08-28
aaaaaaaaaacaaagaaagaaaatcccccgatccccttctctctcccgcggccggcggcgcgagcgtcggcggcggcggagcggcgtctctgctgctggagctgctctgagctgcttgcttgcttgcacattgctggttgtcgccgatgaagctgcttcagcgcgtcaaccccacggcagcggcgtcgctcacggcgctcgccgtcgtcgtgctgctcacggcgtcggcaagccgcccttcgttcctccggaggttcgagcccagcatcgcgtcgctgccgagggccgcccggcgcgccgcgccggcggactgcgacatcttccgcggcgagtgggtgcccgccaccgccgccgacgacggcgcggcgccgtactacacgaacgccacctgcggggagatccaggagcaccagaactgcatgaagtacggccgccccgacctcggcttcctccggtggcggtggcgcccggagcgctgcgagctcccgcggttcgacgcggcggcgttcctggacctcctcaggggcaagtccatggcgttcgtcggcgactcgctctccaggaaccatatgcagtctctcctgtgcctcctctccaaggtggagaatccgagagaagtccccaagacggcggatccagagttcagggcggtgcggtacgagtcccacaacttcaccgtcgccgtcttccggtcgccgtacctcgtgacggcgaaccagtcggaccccgccggcgggatgtgggacctctacctcgacgagccggacgccgcctgggcgaccgccgtggcgggcttcgactacgtcgtcgtctccacggggatctggttcaaccgcccgaccatgttctacgagcgcggccgcctcgtcggctgctacagctgccgcctcccgggcgtccccgacctcaccctccgctactccctgcccctggcgttccgcaccgcgctgcgcgcgctcaccgccgcaagcgtgttcaacggcacggtgatcgtgcgcacgctgtcgccgacgtcgcacttcgagggcggcgagtgggacaagggcggcgactgccggcgcacgcggccgaccgcggcgagcgaggcgcggatgtccgggctggacgtggacttccacgcggcgcaggtggaggagttcaggagggcggaggcggcggcggcggcgagcgggagcgcggtgaggatgctgctgatggacgcgacggcggcgatggtggcgcgggcggacgggcacccgagccggtacgggcactgggcgcacgagaacgtgacgctgtacaacgactgcgtgcactggtgcctccctggacccgtcgatgtgtggaacgagatgctgctccagatgctgctgcgtcatcaatcgtgaagagttttctggttcatctttgtaatttttctctctcaaaattttcatatagaaataagtttatttaacccctcaaattctatatatggtgtttaactatgacatagaagtaccctccaatattcacagacaagtgccctgccggtgcactaggaatttagtacttgtacttgcttttttctatccgtgagttttgagtgggagcaactctttttct

SEQ ID NO: 8962 - DNA, 1950 bp, Oryza sativa
  ref <308>: DATABASE ACCESSION NUMBER: AK106310
  ref <309>: DATABASE ENTRY DATE: 2002-08-28
gaaccatttgctacagctctgaagaacttgaataaaaagaacccacctaagtttgatgctgctgactcagcatccgctacgctgaagggaataaaagcactggcagagctttgttctgaggatggtgcatgccaaaagagaattgctgatttaggagttctttccctgttgaggcgcatcctccttggtgatgattatgagaaactcgctgcgatcgaagcatatgatgcatcacgaattcgagaagtgcaagacaagaatgtgtctacttctaatgactcctctaatgacactacttctgatccctccagtgtacgggttcctccagcagctcatattcgaaggcatgctggccggctggttaccattctctctcttctacccaattcaaagaaggaaattatttctgatgatgtatggtgcaagtggcttgaggaatgcgcaagtggacgagttccttgcaatgatttaaaattaaaaagttactgcaggttaactttgttaaatgtattctgttctgaggatccaaatacaggaagcacttctgatgaataccctgattcaaaaagtgagtataaaagaaaatgtcctcagtttggagatgctttgttcttgttaaatccagagttgcctcttgaggttcatttggacaacaatggtcatgaaatttcaagaaagaaatttaaggatgactgttgcactgaagaaggtggtgactctgaaactggagatgctccaagcaacagagccaaatatacaccccctttaatggatgtcgtgttcgtccatggtcttcgtggtgggccattcaactcatggcggatagctgatgacaagtcatcaaccaccaaagcaggtctggtggaaagtatagatgaagatgctggcaaagagggaacatgttggccaagagaatggctttcagcagattttcctcaagctcgttttttgacagtcaagtacaagaccaatctgacacaatggaccggagccagcttgccacttcaggaggtgagctctatgctgttaaggaagttaattgctgctggcattggcagccgtcctgttgtttttgtaactcatagcatgggaggactggtggttaagcagatgctgtatcaagcgaagctgaacaattatgacaagttcctgaacaatacgaatgggctagttttctatagctgtccacattttggtagtaggctcgcagacatgccatggcgtatgggtttggtgtttcgtccagctccatcgattggcgagttaagaagcggatccccaagacttgttgagttaaatgattttgtgcggcaacgccatagtaaaggattgctcaatgttcttagttttagtgagactcaagtcacaccgatcgttgaaggttacggtggttgggcacttcggatggagatagtaccgattgaatctgcatacccaggatacggggaacttgttgtcctggcgtccactgatcatataaattcgtgtaagccggtcaataagaacgacccgtcgtacgcagacaccttggcatttttggagaaaatattgaaatcgcgtctcaaagaatcagaatcctagtttttttttttccttttaacttctcaaatatgggcggcctatggtatacaacacttcgggtggaaacgctggataggatttccttcggcattatgggggagattctgtttcttctgcatcagagattctcgtctgtttagttgatctgatctgacaatttgggcgggctgtgttttatgaagccttagcccaatcatacagtacacgaacgaattacatctacaaatagaggatagctgtaaatagttgcccctcttgtaagaagaaaaaaggaaatatatgtatgctctctgaatgacatgtattatttttctctcgaaattcataagcatgtaaccacacaccccgttgattatgaaattttgtgtc

SEQ ID NO: 8963 - DNA, 1685 bp, Oryza sativa
  ref <308>: DATABASE ACCESSION NUMBER: AK106311
  ref <309>: DATABASE ENTRY DATE: 2002-08-28
aaacagcgtcgctccacgaaaccatcgctgcggttgcgtgctcgcgcgaagaagaggagagagaggaccaaaccctcgtctcctcctcctccggtggtggggggagaggaggcggcggcggagaggacgagccgtctactggatcggccgcccacgaggagagaacatataagttctacaacctcggtttatccttagaagcagaaatgttcaatatgtcaaaggtacaactccgtgtcctttgctttgaaattcaacatcacttgcacaacatgtcttctgcatcttcaggctatagtgagattcggcttccacaataacccacgaccttgaaagctgttattaagatctattagagttggacacaatctttggaacatgattcagttatgttgtgtgtttgactccacatttgggacacgcgggaattaggttgggtaagcaattgccatttcttccaataatctgatggtcaggtattcaggtactaattgattcttccctgtaatggagagttttattttccttgatttaccaaaatcaagcttacattaaggtgtaacaaatgggtgttttgggctccataatcattttgttgatgctaaatgctgactactggtgcagcaaatggaagagctcttccagttgatatatgccatttgaggacatgtgctttgtcctcagtataagaacattggcctaacatcattgttggagttgctttgcccttagagtggggaaagcgacacctcttgcaagatagtaacagcaattatatcataaattacaagtcaggccttccaatgtggttttggatgaggcaattgatacattgtcatttgatgctgaattttttgttcgtctgacgactggaaagggggcacctacgacgattagcttagtacttagtgatggtgtatgaagagcattgatagtctcatggcccattgctaacatgtagagaaggattttgagttccttggaagtattgactggaggagtgtgaactacttcgcaaatagatgggtgtaaaatctgggaaagaaaacttaaagagctaaatgttttctaccatattagttgatctgaaggtgctttccaagtcaaaatcagcttagcatatagaattgacttggtgatggcggtacctggacccttgaagcagcagttcagaactgattgcactgagtattttctctggagatatccatttgatggaggtggaaggaaagagaggctagtcaatagtaggtcaactgatggtgtttgaaacaagatgcacttactcataagcagaataaacaagcacaacaatgccatgaagggaaccttagcaatgccgtacatctggcatcatttaaaacggggcttgttccactgttatactatgaccatccgccttgatggttttgcctggctattctgaagctattagttagcgttacaccttttaagttttacacatccagtgttgttcttttgtttttctaatattatgtacagatatctctcccacatgtcatagctcaatatgacaagggctttatccttttccatgtaaatatttgagattcagtcagattcttatacttgctacttgctagaatgtgaatgataactgtactgttggaagagtgttgtcatacatacaaattagttataaatttgtttctactttaaaaaag

SEQ ID NO: 8964 - DNA, 1604 bp, Oryza sativa
  ref <308>: DATABASE ACCESSION NUMBER: AK106312
  ref <309>: DATABASE ENTRY DATE: 2002-08-28
tgaagacaacgatatcacttcgtcaccttgcctatttccgcaagaacgatcgcacgatgccgtcgtcgccatcgcacccgcacgtcgccgtggtggctttccccttcagctcccacgcccccaagctcctcgccgtcgcgcgcgccctcgccacggcggcgccctccgccaccttctccttcctctccaccgccgactccctcgcgcgcctccccgccaccgccgtcgtccccgccgggaacaacaacctgcggttcgtggaggtgcccacggatggtgatcaggaggagacgtggccggtgtggcgccggatggagatgttcgtcgaggctgcggagggtggcgggctcaggcgggtgatggaggcggccggcgacgcggctggcggggtggcggtgagctgcgtggtcggggacgcgttcatgtccatggccgccgaggttggggtgccctgggtcgccgtctggacgggtggcccgtgcgcgctcctggcgcacatcgtcggcgacgcgatccgggaggacatcggtgacgacgacgacctccacggtgctcgcggcgacgagctgctcacctcctaccctggcctcgggagctaccgcgtccgcgacctccccttcggcggcggcggcgtcggcggcgacatgcaccgcgtcatgaccatgctcctcggccgcgtggcgcggcggctgccacgcgccgccaccgccgtcgcgatcaacgcgttcccgggcctcttcccgccggacgtctccgccgccctcgccgacgcgctccccaactgcctccccatcggcccctaccacctcctccccggcgccgccgccacgcaagccaacgacgacgacccccacggctgcctcgcgtggctcgcgcgccgccccgtgggctccgtcgcgtacgtcagcttcggcacggtcgccgcgccgccgccggacgagctccgcgagctggccgcggggctcgaggccagcggcgcgccattcctctggtcactccgggaggactcgtggccgctgctcccgccggagttcctcgaccgcgccaccaaggccggcgactccgccgccgggctcgtggtggcgtggacgccgcaggccgccgtgctgcgccacccggcggtgggcgcgttcgtgacgcactccggctggggagccgtcctggaggcgatgtccggcggcgtgcccatggcgtgccggccattcttcggtgaccagcacatgaacgcacgcgccgtggcgcgcctgtggtgcttcggcatggcgttcgacgacgacaacgacggcggcggcaagccgtcgatgatgacgcgcggccgcgtggcagaggcggtggcgtcgctgctcgccggagaggaggaaggggcccggatgatgagggctagagcacgggagcttcaggccatggtggtctcggcgttcgagcccgacggtgaatcgacgaaaaacttgcacaaatttgtcgaaattgtttgtgcccgtcgggtgtgatcgatacatgcatggcatcgatttttagaacttcagaagaaattaaaaattttagaacgataagctacaataatgttatatatcaccttaacctatataacaatatcatcttct

SEQ ID NO: 8965 - DNA, 1346 bp, Oryza sativa
  ref <308>: DATABASE ACCESSION NUMBER: AK106313
  ref <309>: DATABASE ENTRY DATE: 2002-08-28
aatttgcttctcatctttcttctctactcctctcaaatacaagagctcacactgctccctagcttccttcttcatcccttgaactagttgtcagctactgaccagcctgaagatagatgctagtttgtgtagagaattcgatcttctgaggcgtatggtgatcatggagtcatgtgtgcctcctgggtttaggttccaccccaccgacgaggagctcgtcggctactacctccggaagaaggtggcctcgcagaagatcgacctcgacgtcatccgcgacgtcgacctctaccgcatcgagccatgggatctccaagagcattgcaggatagggtacgaggagcagagcgagtggtacttcttcagctacaaggacaggaagtacccgacggggacgaggacgaacagggcgacgatgacggggttctggaaggcgacggggagggacaaggcggtgcgtgagaggagcaggctcatcgggatgaggaagacgctcgtcttctacaagggcagggcacccaacggccacaagaccgactggattgtccacgagtaccgcctcgagtccgacgagaacgccccgcctcaggaagaaggctgggtggtgtgccgcgcgttcaagaagcgaaccatgcagccgccgcggagctccatcggagcatgggaggcgagctactcctaccacgaccccgccgtcttcgtcggcggcggggaacacttcaagcaagaggccgcggccgagctggacggcgtcgccgccgccgccggagctaacgccttcctgcggtactccacccgcctggccgagctcccgcagctggagagcccgccgctgccaagccaggggagccaggcggcctcggccgtcgtcgacggcgaggaagataacgccgattctagcaggcgccctggcggcggcggcggcgccgccgccgcggtgaccacggactggagggcgttcgacaagttcgtcgcgtcccagctcagccccgaggagcagcacacctgccgggccaccgacgacgacgacatggcagcgctgctgctcctcgacggcggcgggcaggaggacgacgccgggaggtggctgggctccgccgggttgctgagcgccgtggcggccgacgcgacgacggactgcggcctcggcaccagctgcgtgcctggcgacatcaactgattcagggccaagccgatcgagctctcacttctccttagcataaagtgtgagatatctacgaattgtatggatggctatatatacgtacgcctatacatatgtagctggtcaaagcatcgtttcagtttcagtttcagttcttggaagtcaatggatgttgaccatt

SEQ ID NO: 8966 - DNA, 1732 bp, Oryza sativa
  ref <308>: DATABASE ACCESSION NUMBER: AK106314
  ref <309>: DATABASE ENTRY DATE: 2002-08-28
ctggaaccatgggcgccggcggggtaagcgagccccaggctcgccgccgtcgccggcttcagcaagcaatccgggccggcggcctccaccacctccagcagccgcggccacaacctcgtgccggcgaagaaccacgacccgtcgccggccgggctgggcaccaccgtcgccgatgccgaccccagcctgccgtgctgcagccacggcatgaccagcctcggcttgccgaaccccatgtcgccgtcgatggcgaacgggagcaggccggagatcaccatcgccgggctcccgaggccgaggttcaccgcctccgtccacttcccgccgtccttgaacgccgccgccttcttcgtctccatccagtccaccagctgctggaacctgtccctggtcatcgccgccgtgatcgccgcgcgcaccatgcccgccacggcgtgcagcggcgcgccgagcacctcctccacgctcgcctcgcgggaggtgtaggtcaccacgttccccatgtaccggtccagcgcgccgccctcgccgccgcccaccgacggcggctcgagccgcttccggccgtcgatgatccacgccatccggcagtgggtgtcggagtcgccgacggcacgggcgaggagcttccacacgtgcgcgcagagcgccacgaagcgggtggcgcgccggccgccgccgccgccggccgacgcctcctcccggagacgctcgaggtcggcggcctcgatgcggtacaggcgccgctggatggccgccgccatgaggggattgatcatggtggccggcgtgaacctcgagaactcctcgtccagcgacgggctgaaccgcggcggcgaccgcggcatgagcagggatcgatcgagcagcggctcgctggtgagcctcccctctctgaccatctcccccaaggcgttgagcaacacgatgaacgccctcccgtcggcgaggaggtgattcgtcgccaccgtcagcgagaacccgccgcacgcgaacctgaccagctgcagcgacagcgggaggctcgcgtcgaacgccacgcgcatcagcccgatcgagcggtcgacctgcgcgaagtcaacggccgcgaggggcacggcggcgtcggccacgacgagctcggcaccggcgttgttgcaggcgacctcggggatgttcgtcgccgggtcccgcacgacgcggccggcgaaggggaagaagtgggagaggtacgccgggagcgcggcgcggacggcggacaccacggcggcgacgccgcccggcgggggagcgtagacggagacgaggtagatggggaaggggccgaggatgaggtcaaggttggagacggcgaggacgggcgggaagcctggcggcgggcgcgacgcccggacaagctcccgggaggcgatctcgaggtcgaagcgccttagcgacatttcgccgagcgagcagcgggcgtagcgtgttgggcggcggcgacgaattggcgaatgaatggccacgatgcttacggctgaacagtaggagagacaggtagagtgtaggagactgacactgcgcacccgcacagatgagatccagcacgcaaattgcccttcttttctctttctcagtggcaattttatattacctctagactctattttagggtgtgtttagtctgcgaaaagaaaatttttggttgtcacatcgaatgtttgatcgggtgttggaagtgattttcggacacgaataaaaaaactaatctcat

SEQ ID NO: 8967 - DNA, 514 bp, Oryza sativa
  ref <308>: DATABASE ACCESSION NUMBER: AK106315
  ref <309>: DATABASE ENTRY DATE: 2002-08-28
tgctgtttgccttgaggccgcgtgcgcgggcgagcggtggcgcgcgctgcccgcctgcggccacgcgctccacgccgcctgcgtcgaccggtggctcgccagggcggccgcctgccccgtctgccgcgcctccgtctccgcctccgcgagctgacggcgagaaatccttgccgtgagaagggagcaaaggcgctgccaatcgcgcacccgccgtggtggcgacgcaacccccatgtaaactctgtaaggtttggcccccccgttaggtgttcggctaaatgcctttactttgatcatgatgtgtagtgtactagttttagctgtacattttgcatgcttctttctgctgttgtaaccaaagaagaaacgaaagcatgcatacaagtttcccttttcacataatcttgcggcgttaactctgtactattctgtagtttttcttgcagtagtaggcattgtgtagtttatgcctatcatgttgcttgcacagcaacttgtgaattctcatactcat

SEQ ID NO: 8968 - DNA, 1513 bp, Oryza sativa
  ref <308>: DATABASE ACCESSION NUMBER: AK106316
  ref <309>: DATABASE ENTRY DATE: 2002-08-28
tggcacaaccaaatcaacaaccacgccattgccgttctctcctcctttccttccacaacccatctcttcctcatcctcctcctcctcttcctgctgctctctcgctctcgttggattcggtttggtttggtttgggccatgacgaagcacggcgcggtggttgtcccggtcgccgccgccgccgccgacgcggagcacgacgagtggatggagaagcacccgtcggcattggggaagttcgaggcgctggcggcggcggcgaaggggaagcggatcgtcgtcttcctcgactacgacggcacgctgtcgccgatcgtcgaggaccccgaccgcgccgtcatgacggacgagatgagggacgccgtgcgcggcgtggcggcgcgattcccaacggcgatcgtcagcggccgctgcagagacaaggtgttgagcttcgtggggctggaggagctctactacgcgggtagccacgggatggacatccaagggcccaccaacgccgccgcctccaagggaggagatgaggaggaggagtcggtgctgtgccagccggcgagggagttcctgccgatgatcggggaggcgtacgcggcgctggtggagaaggtggagggggtgatcccgggggcgaaggtggagaacaacaagttctgcctctccgtccacttccgccgcgtcgacgagcgccggtggggcgccgtcgccgaccaggtcagggcggtgctccggggctacccgcgcctccgcctcacgcagggccgcaaggtgctcgaggtcaggcccgccatcaagtgggacaagggcgaggccctccgcttcctcctctccgccctcggcttctccgccgccggagacgtagaagacgacggcgacgacgacgacgcgttccccatctacatcggcgacgaccgcaccgacgaggacgcgttccgggtgctccgagcgagggggcacggcgccggcatcctggtgtcgaggttccccaaggacacctgcgcctccttctccctccgcgaccccggcgaggtcaaggacttcctccgcaagctcgtcacctgcgctgccgcatgacgtcaccttcacctgaccacagtgacactaattggcttcctcctcctccacgggaaagagaaagagagagagagaaataattaaggatcttgattagtcaattagcggttactaatccctgtattaattttagccggtcacttcatttcttcttcttcttttttatgtgtttctgttcttgctctgcggctgccatcttgattgatcgatcgatctcacaggccacagtgtgacagctcgatctgaaggtttctctattatccttaaccttcctccagctgatccaaggccttgtaattagtcgtcaatttttagcagtttgttgtctgtctgtctgtcactgaaacgggacgaattaatccgaattaatacgatccatttccacctaatttcagtttgtactgtaccgtttaatttccatctaaattcagctttgcactgt

SEQ ID NO: 8969 - DNA, 1154 bp, Oryza sativa
  ref <308>: DATABASE ACCESSION NUMBER: AK106317
  ref <309>: DATABASE ENTRY DATE: 2002-08-28
caagtgctcatcaacaccgcctgactcatccagtgtgaggccgtgagggtgagtgaaccctgtagcggcagtcatgaaggagagggtgaggcggcggcgcatcccggcgttcggggagtggaactacgacggcgacggcgaccttggcggtggcggcggctgctatggctacggctaccgcgacggcgactggccggtcacacagtacttcgactccgccatgcaggcccgcggcctggtcatctccctgccgccctcaccaaaaccacccaagaaggcggtgaagtggattgacagcggcgcacttggggaggaggaggtggtggacgagaagcagaggcagaggcagcacaaggtggtggtggggctggcggtggcaggaggagagcacggggcggcgaggaagcaggggaagcagagcagagtggctgacggcggggcccatgcggcgatgggctacaaggggtgcaggccggcggtggtcaaggccgtggaccgggacctctacgagatcccacccgacatgctctgcaacaagccaaggaagagggtgaccaggagcctgtggatggggtgcctgggactcagctgcgttgcctagggatctcaccagatagatcgatcgatcacacataccaaacctgccttgttttgcgtgtcgttgtaaagtgaagcagaaacccatggacggaccccatcgtgatcgatgcatgctgtcaccacggtcgcacggcccaaactttcccattcatctatctccctcacctgtctcagcagcactagtgtttggttggtgtctctctgtgcgttttaggagtagtagtaaaatgagatggacatggacatgatgtgtccggcagcgtcatttcctcgtgccaaagaccactcgagtgctgcctctctctctctctctctctccccttttgatctttttccgatgtgttttttttttgtagcctctgcttggttggtgtcccatgaaattacggaggcagctcggtgaaatgtggttatatgggttggtgccttggtggacactcgacactgatgagtagcagtggaaaaaggttgatgtaatggaacgctgtagtctcagctcaggggacttgtgccgcccgtggtgaaaagaaagaaaggaagaaagctttctgttg

SEQ ID NO: 8970 - DNA, 2977 bp, Oryza sativa
  ref <308>: DATABASE ACCESSION NUMBER: AK106318
  ref <309>: DATABASE ENTRY DATE: 2002-08-28
agcttatactctctctctctctctctctctcgtcgacgcgccgatgcgccgagatggccccgatcatgagtggggcggcggcggcggcggggggcacgggcggcgcggtcccgctcatcaagaacgccacctccgcgtcccagatgtcgcgtggcaaggccggcaccggcgccggcgcggtcgtctgctactccccgatgatggtcaccgcctacggcatctggcagggcgcctcccctcttgacttctccctccccctcttcctcctccaggtcgccatcatcgtcgccaccacccgcctcctcgtcatcctcctcaagcccttccgccagcctcgcgtcatcgcggagatcctcgctggcgtgatactggggccgtcggtgatggggcaggtttcgacgtgggcggtgaaagtgttcccggagcggagcttgctgacgctggagacggtggcgcacctggggctcctctacttcctcttcctggtcggcctcgagatggacgtgaacaccatcaggaggtcggggaagaaggcgctcatcatcgccgtcgccggcatggcgctgccgttctgcatcggcacggcgacgtcgttcatcttccggcaccaggtgtccaagaacgtgcaccaggcctccttcctgctcttcctcggcgtcgcgctctccgtcaccgcgttcccggtgctggcgcgcatcctcgccgaggtcaagctgctcaactccgacctcggccggatcgccatgtccgccgccatcgtcaacgacatgtgcgcctggatcctcctcgcgctcgccatcgccatctcagaggtcaacagttcggccttctcctccctctgggtgctcatcgccggggtggccttcgtgctcgcctgcttctacgtcgtccgcccgctcatgtggtggatcgtccgccgcgtccccgagggggaggccatcggcgacgtgcacatcacgctcatcctcaccggcgtcatggtcgccggcgtctgcaccgacgccatcggcatccactccgtgttcggcgcgttcgtgtacggcctcgtcatgccgagcggcccgctcggcgtcgtgctaatcgagaagctcgaggacttcgtcaccggcctcctcctgccgctcttcttcgccatcagtggcctccgcacgaacgtgaccaaggtccgggaccccatcaccgtgggcctcctcgtgctcgtgttcgtcatggccagcttcgccaagatcatgggcaccatcctcatcgccgtctcctacaccatgacgttccgcgacggcgtcgccctggggttcctcatgaacaccaggggcctcgtcgagatgatcgtcctcaacatcgggagggacaaggaggtgctcgacgacgagtcgttcgccgtgatggtgctggtgtcggtggccatgacggcgctggtcacgccggtggtgacgacggtgtaccggccggcgcggcggctggtcgggtacaagcggcggaacctgcagcggtcgaagcacgacgcggagctccggatgctggcgtgcgtgcacaccacccgcaacgtgccgtcgatcatctcgctgctcgagctctccaacccgacgaagcgctcgccgatcttcatctacgcgctccacctcgtcgagctcaccggccgcgcctccaacatgctcgccgcgcaccactcggcgtcgaacccgggcggcgccagcgaccacatcttcaacgcgttcgagagctacgaggagatggtcggcggcgtgtcggtgcaggcgctcacggcggtgtcgccgtaccagacgatgcacgaggacgtgtgcgtgctggcggaggacaagcacgtctcgctcatcgtgctcccgttccacaagcagcagacggtggacggcggcatggagcccatcaacgcgtcgctccggggcttcaacgagagcatcctcgcgtcggcgccgtgctccgtcggcatcctcgtcgaccgcggcctcagcgccgccgcggcgaggatggcggccgtgcaccacgtcgcgctcctcttcttcggcgggcccgacgaccgggaggggctcgcgtacgcgtggcggatggtcgaaaacccgggcgtgtgcctcaccatcgtccgcttaatcccgccggggtacacggcgccggcgacctcgccgccgcagccgccgatgcccgccgcccactcccgcgccatcaacgtcgtccccgaggtcgccaagagcgagcggcagatggacgaggagtacctcaacgagttccggtcgcgcaacctcggcaacgacgccatcctctacgtcgagcaggtggtggccaacagcgaggagacggtcgccgccatccgcagccagctggacaacgcgcacgagctgtacatcgtcggccgccaccccggcgaggcgagctcgccgctgacgtcggcgctcgccgagtggatggagtcgccggagctcggccccatcggcgacctcctcgtctcctccgagttctccaagatggcgtccgtgctggtcatgcagcagtacgtcatcacggcgccgctgccgccgccggtggcgctcgccgggccgccgacggatgaccccgtccggcagtatttgaccaacgccaaccagcggccgtcggtggcgatcggcggcaaccagatgggcgccgccggccgaggcggatggagcggcggcgccggcgggtactgaccggactccgatccgatcgagcgcttcgctgtaatcgccgtcagttaatcgctcgattggtagtagtagggtttcgaagcttaattatttttaggaattaattatgattgttaattaatttttgttgtgtagtacggagtacaattctaggtgattgtttttgtagatgtcgtgtttaattggtcagattctgtgatcgatccctcctgtagtgtgagaggtgatcgattacatgtactactacgtgttttaactcttctaggttcttaactaattgttcttagagatgtttcatatgc

SEQ ID NO: 8971 - DNA, 1076 bp, Oryza sativa
  ref <308>: DATABASE ACCESSION NUMBER: AK106319
  ref <309>: DATABASE ENTRY DATE: 2002-08-28
atagccactcatcactggctcaccgcaattaaacgccatctcgatcgaaagctagactaaccaagtatatatacgatcgatggcgttccggcgccgttcatgcatcccggcggctctggccgtcttcttcctgctgctcgccggccagtcaaccgccggcgaagaccagaccgccgtaatctggggccgccacggcgacgagggcaccctccgtgaggcctgcgacaccggccactacaacaccgtcatcatctccttcctcagcgtcttcggccacggccgctactccctcgacctctccggccacgacctccgccgcgtcggcaacgacatcaagcactgccagcgcaagggcatcgtcgtgctcctctccatcggcggccagggcggcgactattccctcccctcctcccgctccgccgccgacgtcgccgacaacctctggaacgcgttcctcgccggccgccgcaagggcgtgctccggccattcggcaacgcggcggtcgacggcatcgacttcttcatcgaccggggctccggcgaccactacgacgagctggccaggaagctctacagctacagaaacaacaaggggaagggggtgatgctgacggcgacgccgcggtgcaggttcccggaccggcggctggagaaggcgctggcgacgggggtgttcgcgcgcatccacgtgaggatgttcggcgacgacgtgaactgcacggcggcgccgagggagtcgtgggagaagtgggcggcggcgtacccggcgagccaggtgtacctcgggctggtggcctcgtcggagcaggacccgggatacctgtcgcccaagccactctactacacgctggtgatgtacatcagagacaggctcaactacggtggcaagatgatctgggacaggtactacgacaagaagaccgactactccattggaaaacttatttaaaacctatatatatactcctttttccattgggagcatggagatatatatatatatatatatatataccaagtattgaatagggcttaatttctagctatatggaataatgtaatcccatgtcgcaatt

SEQ ID NO: 8972 - DNA, 2218 bp, Oryza sativa
  ref <308>: DATABASE ACCESSION NUMBER: AK106320
  ref <309>: DATABASE ENTRY DATE: 2002-08-28
aactagaaccaaaacctccattttccccaatcccaactaagctctctcgttctctcagtctgtcaacttgatccatcctattcctaggcagatgtatccgagggaatctgggaatcctacagcttagtataatgatcatactatagtactacaattaaagtgggcaagttgcaacatctgaaattctattgaccatcttgactctgtcttggaaatgctcgccttgctccaacctgggcaccaccactacggatgccgacatggttgcagcacccatccatcaccaatggcgggctagtgggctccaagattccaactctagcgaaagaaaatgccacacctaatccgtgctacggagctacggatctatggcgacagtaagcgctggggattttttttttggaataataagcgctggggattttgcggttcaattttgtgtacggagatggaaggggaaagggatgggagaaggagacgaacttgatgaagtgctcggagatggtcccggaggcgatgcggccgaagaatccccagatgctggtcatggagacgaagagggagacgtcggagtagcccatggcgacgcccatctgccccaggttgttcatcacggcgagccccgtgccgacgcccatcaggaacgacgcgaacatgagccagaagtccagcgacatgagcgcctgcgcgatcgtgtgctcctccccgagcaccggcttctcgccggggccgcgcgcctccgccgccgccgccgccgtcgccttcgccacgaggagcggggcggacgcgcactcctccgcctcctcgacgtcggcgttcgcgagcttccgcgtcttcatccaggacttccacgccacgtgcgccggcaccgcggcgggggacgcgaggagcacaaggaggacggccacgaagacggccgacacgaccccgccgcctcccccgacgccggtgaggtcggcggcgaggaggtacagcgcgatggcgacggcgagcgtgttgattgcggcgaagcaccacccatcctcctcctcctcctcccgcccgtccgcgccgccgccgccaacctccccctcgcggaggaacaccatggcgaccgcgcacaccgcggccggcacgacggcgagcatgacgaggaacgaggccgggtcgtcggcgaagagcgcggagcagacgtcggtgaagatcgccgtgctgagccccacatagcccttgagcaacccggacaccggccccctgctccggcggaagttgcggatgcaggtgacgagcacggcggtgttcatccacgtcgtgctgttcccgccgaggcagaggaagacgcacatctgccagtagggcagcggcgcgacggcccgggacacgacgagccactgcgcgccgtagccgaggaggccctcgagggagccgacggcgaggagaagccaggtggggacgcggtcggaggcgaggccggcgaggaggccgaacgccttgccgacgtccttggcgacggagaggccgttgagctgcagctgggtgaggcccatgagcgtcttgatggagtgggagtagttggagaaggtgtagttgttgccggagatgcactgcacccacaccgccgtcacgagccccagccacctcccccacctcgtccccgccatcgcgtccagcgccgccgccaccatcgcgcaggcgaggtgttcgtcggagtggttgctgttgctgtggcttggacgcgtccgcggcggcgggatgggagggaggcgggaagctggggcggcgagacgtgtccctttccccgcgactgctggtgctgcgtcagctactcagctgggtgtgggggggttgcttgggaattcgcgtcgtggttgaacaaaaagggattttctcgaagaggaggggtttatgggagtttttttgcatgtaagcagcgaaagggaggcgacgaggaggggtggtgatttatagggaacgatcgaaaggtcgctctatgctatagctttggctgggggagggaatggatagttgtgctatttacgttcagtagtttaatcgagattaaaagcgcgtgcgattaggacgtcgattgtgatttggattgtactgtgtgtgttttctttgggggagggattttggtgatcttttttatgattgattgaaaagggaagattttctcccatttaaatagctgttgtactcatgtacgggtatgaaaatatactgctaccttcgtttcaat

SEQ ID NO: 8973 - DNA, 2437 bp, Oryza sativa
  ref <308>: DATABASE ACCESSION NUMBER: AK106321
  ref <309>: DATABASE ENTRY DATE: 2002-08-28
accacagctgcgcgaatatgctgcccccagccacgccggccgcgccctgatcccccgcaccccgcgcctccaaatgcttccccgcctccgcctccgcctccgccgccgccccctcgccgccgccgccggatccgctcggccgcgccccgctctcgatctgccccgccccacctcccgctgacctcgccccacgcgcgcccccgttcctcatcccctccgcggcctccctcccttcccaccctcaccccccctgggttccccggcgtggggttggggggacgcgcggctagggtttccgcgattcgggtggtgagggttgtcgggcccgtgcctgctcggcctccccgggccgccgccgtctcggctaagggggttgggttggttcttcctgcggtgcttcggaggagctgcggggctcgattcgcggggatacgcgcgcgcgcgcgccgccgatctgtggctggctgcggcgcggcattgggagggcctcctgagttggggggaggttgctgaagcttcgattcggttgaccccgtggctggggtttgccaccttttagctcgtctggcggttttgggtaagcatttcggtggggttcggcctctgggttagctggtattggagggaaccatggcggagaacatcgatctggtgctggagttcctgcagaagaaccgcttcgccaaggccgaggccgcgctccgaggggagctaaatggccgaggggatgcgagcaacgggccgacggtgcagaggcgtgtagcggagcccaaggaggacgatgagcaagatggctccgaggcaggttccaatgcagggcctagaggtgctgcatcggtgaggagcgcggactcgtcgagggagtttatcgtgaaggagattgatgttggaggcctgccgaatgggtctgatgggaggaaagggttggggattggcctggctcaggagaacaatacaggggatctgtatccttggaattttagcattgcaaacagcactatggagcaactggcagagctattggtgtcggaggaggtgccaagacatcggcgcggcgccgttgtagctgagaagagagatcgtggtgttgggaccgagcaacctggtcctgtgcttgagcaaaaggtttcttttggaagaggaaaggggaaagtggatgttgcagggacagggagaaatgaaataaatgaaccaggccattccagggataaaaatcttgttccagaaaaagaggagctcttgaatggatgtacagttaagacagtgcttccattccctgcagaaaatccatcatccagttaccatacagcacaccatgatggaaatgagaggaaagacgctaagaaaagcattgatgcggactgtgttggaaaagcaactaaggggcagcttgatgaggggaacaggcagtattactcagggaagtcccaggagaacgcagatcaggttgctgaccgttgcttcgatctgcagcttattggagacaatcaacgtgaggagcttccaaagttacctcctgtgaggctcaagtctgaggacaagctagttaatatgaattgggaggaaaaggtcaaccataacgggtcaggagccaagcaccccagtgctgaccatgcttttatgattgggtcttatcttgatgttcccatcggacaagaaataacaccatcaggtggaagacgcacaattagtaataactggttctctgtcagtcaaggtattgcagaggatacttctggcttggtatcgggctttgcaacaattggtgatgattcacttgaatatccaaatgaatactgggattctgatgaatacgatgatgatgacgatgttgggtacacccggcaaccaattgaggatgaaacctggtttttagcacatgaaattgactatcctagtgacaatgagaaggcaactggtcacacaagtgggcctgatcggcatgatcgtcccacaaaggatgatgatgatgaccaatcatttgttgaggaggattcttacatatctggcgaacaatattttcacgggaagaacattgcacaaataggtacttcggaggggccaatggggcatggaattcctgataatgatttgattgctcagtatgatggccagcttttggacccagaagaactaaatttgatgcattcagaaccagtctggcagggtttcgtttcacagaatagtgaattaggcatgttaggaaatggaaaattccttaatgattctgaacgtcctcatcctgatgacccatttgtggaggatgatcagcatggttcagttaggtcaattggtgttggcattagcagtgatgctgctgatattggcagtgaggtgcgtgaaagtctgattggaggaagcagcgaaggagatattgaatactttaatgaaagtaatctgagtgttagtggaaaaagaaattctcagcaggaaacag

SEQ ID NO: 8974 - DNA, 1515 bp, Oryza sativa
  ref <308>: DATABASE ACCESSION NUMBER: AK106322
  ref <309>: DATABASE ENTRY DATE: 2002-08-28
acacccatcctccccaccccccaagcggcggcgagaccaaatcccccacttctctctcaatctctctctctgctagggtttatccctccgcgccgccgcccccggaagacgagagagcgccatggccggcggtcccgcggcggtgtcgttcctgaccaacatcgccaaggcggcggcggggctcggcgccgcggcctccctcctgtcggcgtcgctctacaccgtcgacggcggcgagcgcgccgtcatcttcgaccggttccgcggggtgctcccggagaccgtcggcgaggggacccacttcctcgtgccgtggctccagaagcccttcgtcttcgacatccgcacgcgcccccacaacttctcctccaactccggcaccaaggacctgcagatggtcaacctcaccctccgcctcctctcccgccccgacgtcgtgcacctccccaccatcttcacctccctcggcctcgagtacgacgacaaggtgctcccctccatcggcaacgaggtgctcaaggccgtcgtcgcgcagttcaacgccgaccagctcctcaccgagcggccccacgtctcagccctcgtccgcgacgccctcatccgccgcgcccgcgagttcaacatcatcctcgacgacgtcgccatcacccacctctcctacggcatcgagttctcgcaggccgtcgagaagaagcaggtggcgcagcaggaggccgagcgctccaagttcctcgtggccaaggctgagcaggagaggcgcgcggccatcgtgcgcgcggagggagagagtgagtccgcgcggctcatttctgaggccaccgccgccgctgggacagggctgattgagctgaggaggatcgaggcggccagggagattgctgccgagctggcccgttctcctaatgttgcatacgttcctgctggggacaatggccggatgctgctcggcctcaacgctgccgggggtgtatctttggttactgatgttgccttgctgaattagcactgccttgacacttgcagggatgattatctagttgccctgtggcatctcgaatagtcatgtaccagttacctgacctttcggtgataatattctttgatttgtggctcatatgctgttgttcttaagcaaccgtgtcccgtagctcatctaattaacctggagtttgccagtgttacgggagtcaattttggatatggaatggcagtgcatagtcggttgatgctttgatatttgattttagcttcacaatgcgatttaggcatacattgtctaatttggtccattttattgttagagtttatccctaaaatttggtctatatatagctctttgatgcttgtgaagcactgacagattctgatagtatcgatacatgatgaaaatgttggattcatgttgataccatttatattttattatgacatgtaggatcagtgttaagctcttatgtacaatctgattgggattgcgttttggtcttagtattcataagtgttgggtggcgtatt

SEQ ID NO: 8975 - DNA, 1538 bp, Oryza sativa
  ref <308>: DATABASE ACCESSION NUMBER: AK106323
  ref <309>: DATABASE ENTRY DATE: 2002-08-28
aatctgcaccggctgcgtcttccccttgagtcccatcgacgggtgaggaaaggaaggcgccgctgctgccgactccatcggaggcgaaggcggcgcggcttccgacgccgccgacttccacccaactcgccgcagccgaaggaggaagcaaatgggctgcaggccaccacgttcagatgaatttccggggaaggacaccggtggtcagttcgactcagggtccagccccgggcaagggtacgattgatttcaccccgaattttacttctaaatttgatgggggaggttgggagtctggggaatttgattctgagcatggtgatagacagtacaatcatcgggtgcctaagttagacttcccaaaatttgatggttcagactctcaggagtggaggatgaagtgtgagcactattttgatgttaacaatactttcccggggttatgggtgaggatagcaaccatttacttcctaggacgagcagcatcttggttgagatcttctagagctcatttgagatttccaatgtgggaagatttttgtgctgctgtttctgcaaaatttgatagggatcaacatgagaatttgattaggcaaatggatagcataaaacagaatggtacagtttgggagttttatgaacgctttgatgaattgatgaatcaactgttagtttatgacccaactcttagctcaaagtacttgactcatagatttactaaagggttaaggagggagattagaaatgcagttttgttacaacgtcccaaggacctcgagtctgcccttgctgttgccttgttgcaggaagaagtgatggaaaattctccacctaccactgtcagagagtttaagaaatcagatggaagctcttctctgaagattaatggaaaaggggcttggccattaccattaccaccaggaaaaggagggggagtgcctgtcagtaatcgtgcagatgagagacgcagttcagatactgttcgcagtccgacaagcctaactgaaaaagtgtctgctctgaaatcttatcggcgagctcaagggttgtgttatgtctgtgctgagaagtggtctccaaatcataagtgtgcttcatcagtgcaattgaatgtggtacaagagttactatgtctgttcttagaagaagacagtcatgttgaatcagagaatgctggacagaatggttctttgactagggaacttatggccatttccttacaagcagtacaagggactgaaccagatggaaccatgcgaatgttggggcaattacagggtaaggagttattggttttagtggattccggcagttctgtcagcttcattagttcacagatagctgaaggttgtagtatgttattagctactagttgttgatctatcatctatgtgactcctctttgcgtgatttacctgaatgtagttgggaaacttgccctgttgcccatgaaagttgggaaatttacctgaatgtagttgggaaacttgcccatttaagttgggaactttacctgaatgcagttgggaaacttgccc

SEQ ID NO: 8976 - DNA, 744 bp, Oryza sativa
  ref <308>: DATABASE ACCESSION NUMBER: AK106324
  ref <309>: DATABASE ENTRY DATE: 2002-08-28
aaaaacccaatcaaaatcaacccacgagctcttcctcccacctccatggccgccacccaccccctcctcctcctcctcctcgccgccgccgccgtcgtcgtcctcgtcgtagcggcgacaccggcggcggcgagcggcagcgggacgtcgacgccgacggcgtacgagatgctggagaggtacgacttcccgcggggatcctgccggtgggggtggaggggtacgagctccgggaggacgggagcttcgaggtgtacttcccgcgggactgcgagttcatgctggcgaggacgtggctggtccggtacggcgcccgcatcgccggcgccgccgcctccggccggctcacgtcgctccagggcgtctacgtcaaggtgctcttcgtctggctccccgtcggcgaggtcgaccgctccggcgacactctcagcttctacatcggccccgtctccacctccttccccctctccgacttcgcccacagcccgcactgccgcggttacgaccacctccccgccgccgccgccgccgccgctgccgccttgtgattgggtagagatgggtagttcattaattaatctgggtgatttggctggggtaattacgtgtaattaatcacaggtgctcctggttgattggctattgatgcgaatggaatttacgccactatgggatttattttgagtatatcatttggtggcttctttatgaacaagtgttggatgcagatgctgtttgtttgtc

SEQ ID NO: 8977 - DNA, 2469 bp, Oryza sativa
  ref <308>: DATABASE ACCESSION NUMBER: AK106325
  ref <309>: DATABASE ENTRY DATE: 2002-08-28
caccatttgcagccgagctggaagaaccaagattagaatcaagcctagcatgcagcaccaacttgtaagcactttgaatagagaagagacctgacttttcataatgccacgcaagaaaatcctgtctgatattgaggcagtttaattttgagaatttctatggcatcaaaaggattgcatattcgccagatcagatccgcatcccaggaacgatcatcttgctttattaactgggaaacccaacgaaggcgacaccttccagcaacaccagctaacataagcgaggattcactcggtatccaccgatcatgccagattcttacttttgtcccatctccaatacgccaaatcagacctttcttcagcaattgaagaccatattccaggctcttccaagtcaccgatgagtcacccaggaaaacagcatctattaactcactgttagggaaatatttagccttcaacaacctggcgcataagctatccggaaactgaatcaggcgccaagcttgcctggctaggagagcttggttgaaaagcctcatatcccgaaaacccaagcctcccatgaatttaggcagaattagctgttcccaagcgatccaatgcactttccgtttattggtctcatcaccccaccaaaaatccctgatcattttggtataatgtcggctcccaaaactaatgattcagaaaccgacatgtttagactgtatcaagccctggatcagtagattgatacaagttcaataatctggatcgtctttgcatacgtctaggcatagctttgaaggagatattattatatgaagtaatagggtatttacaagattgtgtctaactattacagcagaagctttagaatggactacctctgctgttttgctatagacttaaactatctatctaatctataattgagaattaagttagaatgaaactaacttatatgattgaactcccagcatcgataagaaggactctgaaaaaaaggggttgaagcaagggtgagtacaacgtactcagcaagctattatatcaaatatgaatgtatgaaatattatctgagtggagctaggtttaattgcagaaagctgagaaagtggaaggagaaagcttgtaatgttttaaatgcaacagtatttaataaaatttcgcatattgcttctttttgatatattcggagattccggagagaaacgagccatatcccgaggaggatagtgactaccctcagcagcaaggatgactcgtcccagcactcgctctcaatcccatgatgctccagagggttcccgaagccgtggtgatgaaccgccacctcctcctaccatggctgaggttcttatggccgtggagcgcaaccgtgaggctgaaaacgccgtccttcagcaaatcgcagcaagtgcagccgctaccgctacccacattgcccaaggggcgggcggtggtggacaccatgccgccgggggacttgctgaatttcagcgtactcaacctccggtgttcactcgctccgatgatccacttgatgctgatgattggcttcgcaccatcgagcggaagctcactcttattcgctgccccgacgccgagaagaccaacctggcagccgagcaactccaagccgcagccggtgattggtgggagaactttctcgccatgcaacccgacggccgtgtcgtcacttgggctcaatttcgggatgcttttcgtgctgcccatgtgccgaagggtattatggacctcaaacaatgtgagttcctatctctcactcaaggcaacaagtccgtcatggagtatctctgcgagttcaaccacttagctcgctatgctccggatgatgtcaaaaccgacactcgcaagcaaaatcggtttatgaacgggttgtcggcggagatgcaactcgagctcgctgcacactcttttctggactttcaggacctcgtcaacaggtccgtggtcgtggaaagcaagatgaagaacctcgaggccgagcgcaagcgcaagaaggctgcgcagatttcagccgcgggtggttcgcaaaaaccccgtggttggcagccgccccctccgcgttttcaagcaccaccacctcctcgtccacaaagattcgtgccacgccctccttagcagcgtgtcgcgcctcccgtgggtggaaatcagcaaactattcgccggcccgttcgctccaacaactgcttcaattgcaggcaagcgggccactacatcaaccaatgcccgtaccctcatcgtgcacaactccaaggaccaagaccagcagcaccacgtcctaatccacctctcagatcagcacctcagggtcagcaaactcagaagaggggtagagtgaaccatgtcacagccgaggaggcgaacgatgcaccggatgttcttgttggtacgctacttgtccattcatacccagctagtgtgttgtttgattctggagctacacattcttttgtc

SEQ ID NO: 8978 - DNA, 1968 bp, Oryza sativa
  ref <308>: DATABASE ACCESSION NUMBER: AK106326
  ref <309>: DATABASE ENTRY DATE: 2002-08-28
gtcaaagatgctttagctgcttggccagccaataagaaacaaacaaacacaccatggatcatgataaatatgcattgctactctaataaggaactaaggaagtcagcaaatgcaggtgttgtgttttttttttctctgcatggtcctagctgtttaattgacaactagaatgcacactataaagggaggaaaaggaggcagctaacatgaaagtatctcacaaagtcacagctaatgtgctagtcaatttgttctctcacacactgagaaagatgttttttttttagaactgagaaagaggtaaagactccctattagggggttgggtacaagtatagtaaaatgaacatggtgaaaggagctcacaaaatggtagttagccaccaaattttttcaaacatttagaccatccatgcatatgtttagaaacttatctggattgttccagatattcttaaaaatattcttttaatactatggttgtaccatagcacatatatcataacgcaaagctacaaaaaggcagtgaccatctatcctctcatgtttgacttaacaaacacgtacacaaaaacccaaaaaatgtgaaacaagcaagaaccgaaggagctgcaagccacatcatgccttgcatcgtcaccaacaaatcaataaatacctttcaaaataaatagacaccagacatatttttgtgtcactagtataatacaagaataaatgaatagacaccagacctattattgtgtgactggtataatgtatttatatccacaccaacatgatagagagtacacgttacacgtactttgttttggtctcatctgaagtctgaaatctgaagcaaataaacaaagaattgcagagaagaaaaaatgtgctctctttgtgttgaccacttagctcatccatggagataagcccagaggatgcgtacaaagcttctctcctccgttgagctgtatccatggttgttattgcaaatttaacaactccttgtcaccattgcacacagccaaaaacgcccctgtattcctgtacagaaaacatgcacaaactgtattttatttcttcagcatgtgctctgcttctgtattttcgtcagggagaaatgtctgacctttggagagaggctcagtgtttggagactgtcatttgcactgttttatccaatttggagatagtggtatgctactgtctactaccattgttagtagtactgtactgttttagagtcttggaccataaatatcttacgagtttataagtctcccaagatctttttgccgtttactcttcactgtagtgtccagttgtccactccactattgcatcagctaatcgaaatcgacaatggtgtgcaacctagtgcctaccattacatagtctcaaagaaagtgtacaattatttcagtaaaggacagatcagaaaagaaagaacataaataccagccatctgcaaaagttattacaactacaattttataataacttctttaatttctctctgcatggcttacattacattgtacactctgtattccttgtggttgcggctataaataggagagcacaagagttgtagcttcccttgtcttgctcaagtgttcaattttttgtgtgcgtttttcagctcgtgtgtgattgagaagtacacaaggagaagaaggagaagacgacgcagctgccatgggagaagagaagcagaatgacgagaggaagaacaagtacgccgtcgggtgctccatcatcggctccatcatctcggtcctcatgggctatggtaaactacattagaacacctaattgacatgttattataacattttcgatatcggtgattttagtgagatcagtgatttaccgccgatctctgtctcgttcagcatgtacgtgttagcgggattcacgtgtcacgtgagtgcggtgtgtgtgcgcgtctttcatgtaatcgcgcgcgaaaaaataaag

SEQ ID NO: 8979 - DNA, 1505 bp, Oryza sativa
  ref <308>: DATABASE ACCESSION NUMBER: AK106327
  ref <309>: DATABASE ENTRY DATE: 2002-08-28
gggctggagtttggtcaggagtggatcgcctgaccgccgcgccgctgaccagacggcgccgtgctccactctaagtcgccggagctccgcgtcctgcccggcgcccgactacgtatgttcccctctccgctgcttccacgcgcgtccagaggcccgaagcttgcctccccgtccacctgcggagcaatctgctcggcatcagtctcctctcgcctcgcacgcaagttgttcgacgaaatgccggggcgggacaagatcccgccgcgcgcgtaattgaagatgatccccaagaaccgagggtggcggattcgcgaaggggcccgcggccggaccacccccgttacggcggtgctccagttgctgccgacgccgggtggtgtccggcaggtgtgcactttgacgtctacggtttcggcatcgtcgtcctcaagatcgcccccggccggcgccacgtgtctcagccatgccagggcaggtcggctagctttttgctcgccgcgacgtggaggtcaggcgacgcgaagccgatggatccttcttcctcccggtcgactgccgtgtcagcaactccaggtggagaaacgactggtcaaactcaaacagtctcatatcttctagctcttcaaccatgtcaaagagttgctgaagagaggagggccggagaatgatcaaatcaagaaccaccgcacgaaaacatccaaggattgttttgctaagatataagcaagctaaagctctgaaccatgcagatagacatcacagtaaacagcatgtcagcatggacaggcatcaggtactaactctccgatctcacaaaaaaaaaaaagatcatcatcgatcgatcactccccgaccgggatggcgccgccggcgcggcggagcggggagagcgaccgggatgcccggagcgtcgtcgccgggcagcggccgccgccggccggccgcgtctccagcagctgcagcttgaggaggagctccctggcctcctcctcctccttcttgatcctcatcacctggctgtggatcaggtacactccatcctgctgctgctgctgctccagataatccccgaccgctgatcttcttgctccctgcagctgatccctcccctccattggagctgacctcgaaatcgccatggaattaaatctcaattgcttctgctgctgctgctcaattgttgtgatgacacaggtgttcttgttgttgtttagccacaggagaaacttgatatatatagagagagagatgaagaagaagatcagggggggggggggggggactggagagagatggtcagggttcgcttgcttgtgaggtgatttttggcgggaaagcgacggcgatggcgcgagagggaggaaacgtggggcggtttcccagcagtcgttttagcggttgggggagtggggaaagaggacgccacggttggctttggctatccatctggaccaaggacaaatctccgcgtttttttttcaatgaaatatattttcaacatcgtg

SEQ ID NO: 8980 - DNA, 827 bp, Oryza sativa
  ref <308>: DATABASE ACCESSION NUMBER: AK106328
  ref <309>: DATABASE ENTRY DATE: 2002-08-28
aaccgggaagagggaagagagatgggagagaacgcgagagcacgggcaaaactagggtttcgggttgtctcgcggaggcggagaggccgcaatccctcgtgctctccgatcctccggagcccccgccggccacggggagctcgccgatccgatcaaccggggttccggcctccggccccgcttcggcgggaggtttactcgtatccgcttcccctaccgtctcgtctttgcatttccgctcgcttcgatttcgccgtggcttgatgcctctgatctctctcgttttgcttggattttgccgttggcccgatgatgattgcgatttagaccctcgcgaatcgatcgattggttggttggttgatggatggatagatagatcggctcggatttgaggctcgccctttgcatctgcaagcgggttgaggtcccgagaatggctagtacggcgttggctcctcgatgatctgggcgctgaaacatgctgggggggtcggagaggcactgacatgtgggcccgcccacgcggcaggaacatggtttactgctgcttctgctatactataaaacctgctctttttctttcttttttctcctcttcctcctcctcctcctcctctcttgccaccgctgcggcgggtcgtcgtcgtcgtcgtacatcatcatcatcgtcctcttctgccgtacccttgagacatgctccagtgccagcgtcgagggccgccgcattagcctaagatggaaaacgaagttgtgaaatctgagggccaatgagtaataaactaaatatacaataaatatcagaacacaacaaaaaatcaacaaacat

SEQ ID NO: 8981 - DNA, 1554 bp, Oryza sativa
  ref <308>: DATABASE ACCESSION NUMBER: AK106329
  ref <309>: DATABASE ENTRY DATE: 2002-08-28
gtctccgtcacccgaaccctctcaacccatggcactctccgccgctcgccggctctcctccgccgccggcggcgacgccgcgcggcctgggacgctctcttccctcttcgcgcctcgaagctctccgaagcctcgcgccccgcggccggagcccggggatgggccaccgcaggagcggaggaagccgagggcgaggccgaggccgaggtcgaggcagccgtggggggaggaggcggcggcgctgctccggaggttctacgacggcgggtacctcccggggcctgacttgtcggtggcgccgcacgtcttgtcccccgacgtcgtcaagggcgcggccgagcggttcggtcatgatcaccaggtcgtcgccaaatggttatctggaagtgacttgaagaaggttgcgttgtttggttgtccatctgttgagcgaagaacagtttttgcatcaaaaagactacgagctttctttaaaatccaggaagctaaaatatgcggctcttgtaagatgagaaattcatgccagtttgttaaccaggaagtatctaggcatgataaagtgatcctgtcagatactatgagaattcttactttattcgtcctggatacatgtcctcagcaactcaaggttactcctgaattgaaagctagcatttgcaagcttgtcaaggacaccataaacctaagccaataattactaagcagatcatttgtaactgtagaaggtacttgaagtataccagagaggtgaccaaatttatttggatcaaatggatgaagctcatattttgtttgcaaatactacctgaagcaactcaacctgattgcaccgcagaagcagatgcgctgaagctaagatgcagtggttcacccaggaatcttgcatcagtcagactccccatgtgatgttgtttagctagctgtaaaccgtttagtttggacaagggagaggaacagtttggcttcagactaactggactgcttctctgcatggcacctctcttgtagaataatccaggatagctggtttcctgaggcgaggtcggtaggtcacttcatctatgtgataatgtgaacccttccatattgccgcctgatgagaactgaatcttctacggaagtgatgctctactctctactctgtttttttttccttttggtttcttttccctaatctcttggacagttcagttttgatggattcttctggcctcgtgttgatgatcaaagtattcaagtcgtcgtctcgtgctgatggctgcttgcttgattttaaacttcggctgaaactcggagcctctttcacatttgtccggtcagcgattgcttttcttctctcccccggtttgccgcttgcatggtagtgcctgccactagtaatctaatagcataggtcttcttgttaacttctctcacataataagtcaagtagtagtacttcagttaagcaagattgatcatgtcagaaagcatgctatttgaacgttttgaaaggttgaatcacaggagcgtgatgcatgcatctcactgatgcagcagagaatcaggttatgt

SEQ ID NO: 8982 - DNA, 2304 bp, Oryza sativa
  ref <308>: DATABASE ACCESSION NUMBER: AK106330
  ref <309>: DATABASE ENTRY DATE: 2002-08-28
gtcaaaacccaaatatttttcggcttattcgttgctcatagaacacatcaccgcgacaaaaaataagcctctcttgttgtcacctccacacgtccatttgtcaccgctgatgagctttcgtgtgcgccagctgcacaaagaaagaccggtccataagagcggctgcctggttctgaatttctagtcgccacagcggagaggagccgatacttccatggccatgaaggtacttggttactgtacaattcagagatgtttgttcgatttgcagctgtgtgtttgtgttgtgtgtgcgacgtgtttgttttagcttatgattgctcactggtttgtctgtttaactgacggctgcagaagcttgtgctgaagctggacctgcacgatgacaaggataagcagaaggcgatcaaagccgtctccaccctccacggtatatactccatttctgacaaaattttccattctttcctctcgatttccgcttgtgctctgcttctttaccgccaaatatcctccttcagcttcttctttcttctcctcctcctccttgactgtcctaacaaaaaaatcgattttttgttctcctcttgatggttgctgcgaccttcgatgtccctatgcggaatgaaatctcctgctggggcggctaaaaatcggagattttctgtctttttgatccgtctttagtggagctttttgagcctgatttatgcgatgggcttcttggcgtgcttgttcccatgtcctcaagaggtgagagatgaggatgaggaaccaagaagcggccagagagtcagctcaggtggatttaattattctttttgttggaattcgttcttatgttcttgcaatcttgcttaaaaattggagtagaaatgtttggtgctgattggttagtgtcacttgtagcagttcttgtggagctaaatatgctctcaggtataagaggggcttttctttcatgcagtggaaggaaaaaagaatcgagttatttgtgatctattgatcttaatgattgtgctgttgggttcgggatgattcaggctggggttgtacattaatttaattttttatttagatactagacttattgtagtcaaccatcaggatttttcaattgtttgctcatttccccttttggtttgtggtgggagcaattatttgtgcaattcatctgaagtcacacgagaggatccaaaattagaagtttgtttgtaagtttggactttggagtgcgtaatttcaccgggagaagaggatagaaagaacatgaattagtttaagcggaattaaaattatgaagaagacgaacactgtggtagaaaaggaaacagtctgggtggactcgaagaaaatcgctaattttctactattcttgttttcgatttccaactctgtttctctttcaggatgtatcgagtctatcttcattaacagtggacgtgttcttttcttcccttgaaatttctcaataacagtggaatattcaaagtcgtcagagagttgcccactgaagactgaagggtcgatagatatggttggaattcggcgaaataaggggcatggtgaagcaacgatcttcactttgcgcgagcttgctgatgctaccaacaacttcagcacggagtgccttttgggccgaggaggattcggcagtgtgtataaagcatttctcaatgatagacaggtttgtattttctactcaagcacccaactccttatgcacttcgagtcccaagctatgccgcgagcatgaaacaagctttttcaacaacactgctttgaatactttgtgatattgataaaagaaactgttcctttggtcaaaattgatgggaatgcttagactattgatgttaacagaaagtattgttatgctatataccctttgtataaatttctaatttggttccagcatttgctgcatcgcaggttgttgcagttaaacagcttgatctaaatgggcttcagggaaacagagaattccttgtggaggttctcatgctcagtctcttgcatcatcctaatttagtcaagttgtttggttactgtgtggatggagatcagcgcctgcttatttatgaatatatgccattgggatcactagaagaccgccttcacggttagtattttattggaaattgtataatatcctctgttagctcctagaaaaacctgaaagttccctaagaatctgtagttatgttagaaaacattttatatttttcattgttacatcatcgtgatttaaagcacatctaaccacttgaacatggtgaaaagaactgtcttctaggtgagaag

SEQ ID NO: 8983 - DNA, 1531 bp, Oryza sativa
  ref <308>: DATABASE ACCESSION NUMBER: AK106331
  ref <309>: DATABASE ENTRY DATE: 2002-08-28
tcatagtcaaaatctgagtttgatcctggctcagaaggaacgctagctatatgcttaacacatgcaagtcgaacgttgttttcggggagctgggcagaaggaaaagaggctcctagctaaagtagtctcgccctgcttcaaaactacagggcgcgcgctacggctttgacctaacggcctccgtttgctggaatcggaatagttgagaacaaagtggcgaacgggtgcgtaacgcgtgggaatctgccgaacagttcgggccaaatcctgaagaaagctcaaaagcgctgtttgatgagcctgcgtagtattaggtagttggtcgggtaaaggctgaccaagccaatgatgcttagctggtcttttcggatgatcagccacactgggactgagacacggcccggactcccacggggggcagcagtggggaatcttggacaatgggcgaaagcccgatccagcaatatcgcgtgagtgaagaagggcaatgccgcttgtaaagctctttcgtcgagtgcgcgatcatgacaggactcgaggaagaagccccggctaactccgtgccagcagccgcggtaagacggggggggcaagtgttcttcggaatgactaggcgtaaagggcacgtaggcggtgaatcgggttgaaagtgaaagtcgccaaaaagtggcggaatgctctcgaaaccaattcacttgagtgagacagaggagagtggaatttcgtgtgtaggggtgaaatccgtagatctacgaaggaacgccaaaagcgaaggcagctctctgggtccctaccgacgctggggtgcgaaagcatggggagcgaacaggactccaactcaagtggctagtcatgctcagaaatattttcttagacaaactaatccaaacaagaagaagcgcagatcaagcctttttgatatgatggcaactgatatgtcaccagcaccaaactgccctgtcttgccaccatcaatgggaaaattacatgatatggtagctatgactaaacaactccagaacagcagtttggaaggagtctcatcttcaagcacagttaatctagcaccacaagttgcaagagatcttcctcccccaattccatcttttaaagcaacaaatgtagattcaagtctcagcaaaatgaaccacatggacggtttcttgagggcgcccatgctgttcagaccaattccaagaatcgctgaaggggcatcttcatcgactcctgcaactgcaagcatagctgatctggaatttcaagctaacctgactgcatgttctaatgcattattcgcgagtccgagaagaagccaaagaaggcagatcctccagcagagaaggatctggatctgacagttgccccaccctcccaacaaaccagggccagtatttcttcccagaacgcagtaggcgtaattcaagtcgtatagactgataattttttttggggagttttaactatgttgttgaatgtttacaaaaataaacattaacattatattagcgatacaccaataaaagaaggaatt

SEQ ID NO: 8984 - DNA, 1986 bp, Oryza sativa
  ref <308>: DATABASE ACCESSION NUMBER: AK106332
  ref <309>: DATABASE ENTRY DATE: 2002-08-28
acttgcgcggagctgaagagccggctcgttcctctccttcccgttcacatttcaaaacctcaaagcccccacaaacttcggaatcgaggtgagcgggagttcggagagatcaacccgagggccgccggccgatggcgatagatcagcccatcaaaaagagagggagaccaccaggttccaagaacacgaagaacaagatggagcagaagatggaactagtccatcaaaggctcgccttacttgacagcagcagtggcagcgacagggatgacgatattgggccgagggctataataattgattgtgatgaagatgatacggatgacgtgatggaggttgttcctttgaaaatgctgatgccaaaggaggtggaaaatgagcaaagaacggttcctggcattcctcaaacatgcaatacccagaacactagcaatggacgcactaacaccactgaagtgccagttaagggccaaaataaatgtgcaagttatcttccaaaaaaatctagtgttcaggcgttctgtggatctgctatgaagagagctcaagagattcaaacgaagttaccagcagagcatcctagctttgttaaacatatgttacattcacatgttgtcagcggattttggctgggtctaccagctggcttctgcaacaagtatctcccaaagcatgacactgacattgtgctcgaagatgagaatgggaacaaccataacacaaattacctgggtggtaagcagggactcagtgctggatggagaggttttgcgattaaccatgatatcaaggttggcgatgttgtggtctttgagcttgtgagcacaacaaaattcaaggtgcatataattagagataaaaacatcagcccaactgacagagcacccggtctcaagagtttttacgcctgcaagaaacggaagatatctaaagaagctactgataatgccaccaagcctaaggaggatccagagactactagagtcagtagcaaagtggctcatgatgatacccagaatctagttcatgaagcaatagacggcatcaggttttcagactcagagatgagctttgacgacgtgatgagctacagtaacttcaacatcgtcgtggacggcttggtcattgactgcaagttccccgatcaccagcgcaggacgtactatgagctgtgctgcgcccagaagtcgttcctccacaggcatctgctgaggcagctgagcctcacgctcgtcgtgggggtgatcatggagacgatcaacatcgctgagggcatcagggcctgcggggcgggtacctcctcgcaagaggacttcctgatctggaagaagacgctgcagtcattcgacctgctgggaatgaatgttgcgttcttgctcaagcgcgttgacgatattctcggcctccccgagcaaccgagggatccatcggagtgtagcaagtacaatgagctgaagcttgagcggtctcgtgctggggagaaggtggaggctctggagtccatgatgttgacagtgaaggatgtgctgaagaagatcgatgccgagatggaggagatggagtcgagcgtgaggaaccatgacattgcgctgcggaagatcgccactgcgccatggtgatcctgcttgacatctggggtacttgtctgaaacattttgggttcgtcattcagggtttcagatgatgatgatgatgatgatgcactgggaaaccttcgtggtgagtgactgagtggtgaatcctgctaaactcaaggactgaccacatttttgtgtacatttcttcagttactaccacgcagctcagtgcctatctagaactgttcagcagcaaacctgtctaggaatcaggatgctgtttttacacggtaaatcgtataacagaagttgtaaattttggggggcgaatgcgctgtaagcagtgcaggaaatgcgaggaagaaatgcagaacactacttaattatttcagactccgtcattcagtgc

SEQ ID NO: 8985 - DNA, 1990 bp, Oryza sativa
  ref <308>: DATABASE ACCESSION NUMBER: AK106333
  ref <309>: DATABASE ENTRY DATE: 2002-08-28
agctcacctgcgcttaggcttagctagtactaatcatcattagtgtatagctaagctagctccatttcttgcgcttcttggttttgtctgggaactattgtataggtctatatcgatctccatggatgaggtgtggtgcagcctggacagcatgccggccgacatcgccgccggcatccaccagccgccgccgcccgacctccacgacccctccttctggccggctttcgccgactgtgctgcgagtttcatcgccggcggcggcggcgacaatgcgtgcttcgacgagctcatggcgggagggtcgtcgggtgacactaggatggtggccatggacgacggcgacgacgggagtggcttcttggtgggggacgccgaggccgagcacctgatgctgtcgtcctcgtcgccgtcgtcgctctcctcgggccgctccctctccatcgacagcgccggctccatgtcctccttctcgctcgacgccgccgcggcgctggcgatgtcgaccctcgccgtcccgcacccgtacccgccgcccgtcgcgcacggcatgttcgcctccggcgacggtggcggcggcggcggcggcgcagtcgacgaccacgaggacgccatcatgcgtgccatgatggccgtcatctcctccgcctcggcctccccctcctcctcgggcggctccgcctcctcgcccaccccgttcagccgggacagcggcgcgcaccaccagcctgcaggtcagccagccatggcggcgccgcagcagccgcgtggagggaacggcggccacgtggtggtgaagagcagcagcagcagcggcggcctcgccgtgccgatggatcagaagcccggcggcggcgggcggggacggcagcaggaggaggcggcggcggcgagcgccaccaacagcagccagctctaccacatgatgtcggagaggaagaggagggagaagctcaacgacagcttccacacgctcagatcactcctcccaccttgctccaagaaggacaagacgacggtgctgatcaacgcggccaagtacctcaagtcgctggagacggagatcacggagctggaagggacgaacacgaagctggagaagcacatcgccggcggcggcggcgcggcggacgccgccatgagggctcgccgggcgcagcagagggccaaggtgcagatcagcaaggcggcggactcgcagtcgcagcagctggtgagcctgacggtgatggtgatggtggagtgcgacgtggtggagctggtgctccacatcctggaatgcctcaggtggatgaaggagatcagcgtgctgtccgtctacgccgacacctactcgccgcagcttcttctcaaggccatcgccaacatcaagctccagatcgtgggaggagattggaacgaggcgtcgttccacgaggcgatgacgaaggcggcgaacgacgcgaccatttcctgcgccccgctcgcgatcacggcagcacagtgattgctgattagtgagtgattagcagcgagcggcggcggtggcgacctaccggttaattcaatccatcctcatcgtcctcgcgcgcgtgcagtcatggttgaacgttgaagcagtaaaaaaaatatttatgtatggagggcgatgggttcgctacgtcataaccgatctcaatagttggaggaggaaaacgaggacaattcaaatacttcgagagtggggaagaatattgttagatatatattagggtttggttattcattcctttttccgtcttaaaatataataagttttgatgatgtataaacatgtataaatatatagctaaaagttattatattttaggacggtgatagtaattacgtagcgtatttttcaggtgtgccctagttgcagccgcaagctaggttgcagacgatggtgctttagtagcgctagcctagctagtataggtatatgtatatgtatatctctatgtatatacatgcatggtggtggttttgagtg

SEQ ID NO: 8986 - DNA, 1256 bp, Oryza sativa
  ref <308>: DATABASE ACCESSION NUMBER: AK106334
  ref <309>: DATABASE ENTRY DATE: 2002-08-28
actccaccacaggttcagctcgcctcctcccgtagccaacttccacgcagagatcgccaaccaccatgccgccgccgtcgccgcacccacctcaccgcaacggcaaccacgtcccggcgccctccggcgagtcgttcgccaagttcttcgagtgctggatctccgagcagtcccgcgacctcgccgcgctccgctccgccgcgtcggcggcgacgaaccccgcggcgccgcccgacgacgccgagctccaccgcctcgtcaaccgggtcctcggccactacgagcactactaccggaccaagtccgccgccgcctccaccgacgtgctccgcatgttctccccgtcgtggacctccaccaccgagaacctctacctctggtgcggcggatggcgccccactgccgcgctccacctgctctactccaagtccggcgcgcagctcgagacccagctcccggtgttcctcgccggcggcggcctcggggcgggcgacctcggcgacctctccgccgagcagctccaggccgccgaccagcttcagcggataaccgtcagcaaggaacgggaggtcgagaacgccgccgcgagtgcacaggagtcgttggcgacggtgaagatggtggagctagccggaggcggcgggatggacgcggaggggatggagatggagatgaggagcaaggcggacgggatgaggcgcgtgctggagatggcagacgggctgaggctggagacgatgagggaggtggtggcgctgctccgcccgtcgcaggccgtgcacttcctcatcgccgccgccgagctccacctcgccgtgcacgagttcggcaggcgcaaggacggcgacggcgccgcgtcgccgccgccggcgtgacgcgtgcgcgctcgtgtcgtgtcgttgccgttccaagtgcgcggcgtggtctccgatgcgtaggctcgtcgtctagctctggtcaactcaagtcgtcgcgataagctttgactgagagagaagggagagaaggagagaaaaaactgacaagtgggccccacatgtttttatttgtttttgctgactgtatcgtcacgtgtgtgccacgtaggctaaaaaccgcttcaaatcgagttatggggggtaatttgtccggtttcaatagtttagggtatcaaatgtccggttttgaggttcggggggggggtaattcgtactgtcgcgattgttcaggggggtaatttgtactttttcctaaaataaatggatggcttctgctct

SEQ ID NO: 8987 - DNA, 1396 bp, Oryza sativa
  ref <308>: DATABASE ACCESSION NUMBER: AK106335
  ref <309>: DATABASE ENTRY DATE: 2002-08-28
attacgacctaagcccacacagccccagactcgccggaagccatggaggaagagaaggcggcggcgtactacgacgagctcagccgcaagggcgagggcgcccgccgcttcaagcagggcctcggcttctcctcctccgatccccaatccacctccttcccctccaaacccccctccacctcctcctccttcctctccggcttcgtccgcgccggcgccacccccgcccccgcgcaacccaccaagcagccgccgccgccgccgccgccgccacacgagccgtcccgcacaggccgtcactctcggtccccgtccccgtcgcggcggcatcggacccgctccagttccccgtctcgctcgcggcgccaccggtccaggtcgagggagcggaggcgccggtccaggtccagggagagggagagggaggaccgcagggcgtcgcgccgccgctcccggtctcgttctcggtcgcggtcgccttctcgccgaagcgggaggagctcgtactccgagaaccggcatggggacaggcggcgcgacgatggtggcggccgccgtggaagctcgaaggggcgcggtggcagggagggtggtaaggtggattactcgcggctcatagaaggttatgatagaatgaccccagcggagagagtgaaggcaaagatgaagcttcagctttcagagacagcttcaaaagattccacccttggaaatgccactgtggggtgggaaagatttgaattcaataaggatgctccacttgatgaagatgacaatgatgttgaagttgctaatgatgacgcttcactggtgaagcacataggaaagagcttccgactttctgctgtacaatccaagcatgaagatacggtcagagatgcacatgaaaatgctatatttggagtacctgcataccccattgttgatactgaaactacggaggctgagcctgaaaccaatgacgaaagcgagaaagctaaagatgttgaagccgaacctagcagttccctcattagtgataaagttctggcaacgcaaagcgggtcatggagagaaagagctcagaaattacggcagaatccaaatgcgtgaagttctatccatgttccatttatgctgctctgctgaattttgactccggaattcgtataatgatgactccatgatgtgcagagcgttaagcagttgacagtgatacttcgaagctgaactctgttgtatatgtatctttggtgtgagtactgagtagtgccgtactattgcattgcttctctagttctatgacgccaaaagcttaggtctggtttttgggtagcaccagctgcactaaattaatgtaaaatttgtctgtgttttaatttcttcacatcaacgcatagatgtatccatagttttc

SEQ ID NO: 8988 - DNA, 1809 bp, Oryza sativa
  ref <308>: DATABASE ACCESSION NUMBER: AK106336
  ref <309>: DATABASE ENTRY DATE: 2002-08-28
aaaaaaaaaatgcagcagcgaaacaatgccgactcccatcggtgcgcaccgcgcgcccccggctacctccgcaccgccgccgcgctcgccgccgtcgtccggagcctcctcgacgagccccggccccggccgcggcccgggtcccagaccctccacgcgcagctactcgagtccggcctccgccccaccgacgacctctccgtcaagctcctcctcctccacctccgatgcggctcccaccacaacgcgcgcgcggtgttcgacggaatgccggcgccgacccacgccgcgcacaactacctcgccgcggggtactcccgcctgggcctccccgaggaggcgctcgggatcgtgaggcggctggcgaggtgcacggggaggctgaacgtgttcgtgctgtcgatggcgctcaagctgtccgcggcgctggcgctgccccgcgcggtgagggaggtccacgcccgcgtggtgaggtcggtcgtcgagtccgatgacgtcctcttcgcggcgctggtggacgcctacgtgaagaacgcgtcgcttcggtacgcgcggcgggtgttcgacgtaatgccggtgcggaccgtggtgtcctcgacggcgttgatcgtcgggtgtatgaacgaagggctgtacgaggacgctgaagagatattcaacacgatggacgagaaggacgtcgtggtgtacaacgccatggtcgaaggctacagcaagacggaggagacggcagagagctcgatggaggtgttcaagtcgatgcatcgggcgaggttccggccgaccgtgtcgacgttcgtgtgcgttctcggcgcgtgttcgctcctgtcctcaccggagatcggcgagcaggtgcactgccaggtgatcaagagcagcctctcctccgacatcaaggccgggagcgcgctgctcgacatgtactccaagtgcggccgtgtcgacgacggccggaggatcttcgaccggatggcggagcggaacgtcatcacatggacctcgatgatcgacgggtacggcaagaacggcctctccgacgaggctctccagctgttcgagcagatgctgcggcggcacgacgacgccatccggccgaaccacgccacgttcctgagcgccctgtcggcgtgcgcgcgcgccgggctgctgtcccggggccaggaggtgttccagagcatggagcgcgagcacgcgctgaggccgcggatggagcactacgcgtgcatggtggacctgctcggcaggttcggcagcgtccgccgcgcccacgacttcatcagggggatgccggcgaggcccagctccgacgtgtgggcggcgctgctcggggcggccacgctgcacggggacgtggagacggccggcctcgccgcgagggaggtgttcgagctcagccgcgccgccgggaggcaaaggcccggcgcctacatggcgatgtcgaacacgctcgcggcggccgggaaatgggacggcgtgcgtcaggtccgggagatgatgcggcggcgaggggtactgaaagacgctgcctgcagctgggttggctccgagtgaaagttctccatccttttggatggtgtaatcatgtacattagctaaaacattctataaattttattgtctagtcttcttcctgcaagcaagcaatggcctgctcgtacgtaatattttgagcaggtcgtattcattgtttttgtcgcaaatttctaccgtttcagatgccatagatgcagaatttagctagaactttggtatattgaaattttgactggtaaaagatctcatctctataatgcatttatgcacacaacc

SEQ ID NO: 8989 - DNA, 1384 bp, Oryza sativa
  ref <308>: DATABASE ACCESSION NUMBER: AK106337
  ref <309>: DATABASE ENTRY DATE: 2002-08-28
agcttagctaccacacagtggtggccgcgcactcctcctcctcctcgcactgcacacgccaacgggttacaagaacgagttggcacgcgagagccctgcagggaggaggaaggatgcacctgcacgcgaagacggactcggaggtgacgtcgagcatggcggcgtcgtcgccgccgcgggcggcctactacgtgcagtcgccgagccacgacgacggggagaacaagacggcggcgtcgtccttccactcctcccccgcggcgtcgccgccgcgctccctcggcaaccactcccgcgagtcctcctcctcccgcttctccgccgccaagtccggctcctcccgccgcaccgccgccgccgggggagacggcggcaaaggcggtgtcgcggctggccgcggcggcggaggtggtggtggtggtgggcggcgtagcccgtggatgaaggaggcggccatcgaggaggaaggcctgctgatggaggacgacgacgccgacggcggcggcggcggcggcggcgggttctcctccctcccgaggcggtggcgctatgcgctgggcttcgtcggcgccttcttcgcgctcttcttcttcttcgcgctcatcctctggggcgccagccacaaccagaagcccgtcgtctccatcaacagcatcacgttccacaacttcgtgatccaggcggggacggacgcgtcgctggtgccgacggagctgtcgacggtgaacgcgacggtgaggatgacgttccggaacacggggagcttcttcggcgtgcacgtcacggcggagcccctcacgctctactactaccagctcctcatggcctccggcaacgtgaagtacttctaccagtcgaggaagagctcgcggcacgtggcggtggcggtggtcggcgacaaggtgccgctgtacggcggcgggtcggggctgagcagcacgccggtgaagggcgcgccgccggcgccggtgccgctgcagctggcggtgcggttcaggtcgcgggcgttcgtgctgggcaagctggtgaagcccaagttcctgaccaacgtgcagtgcagcgtcaggctcgacgtcgccaagctcggcaagcccgtctccctcaacaaggcttgcagcctcgtctaatctaagctgcaatgccggcgagctagctgctcatcactgcgtcatcttcgaaatatcgtcttcttttttttcttcttcttgtttctttcttgtctgatatttacagtatattgtcactgcatactttgcgagttggttagtttggaaggagggtgaggagatcgatcaggttgtgtgtacagggaaattttgtcgcgaacattttgagatatcgaattttgggtggataataataattaatcacgccgttgccgttc

SEQ ID NO: 8990 - DNA, 3440 bp, Oryza sativa
  ref <308>: DATABASE ACCESSION NUMBER: AK106338
  ref <309>: DATABASE ENTRY DATE: 2002-08-28
aaaacacgatagaggctgatccctgtacgagacggcgaaatcggccccgccactattaatcgagtttgattgccatatataggtgtaggaacgggaccgggaaagagttcgatcgttataggatcattgatcgatcaatccatagtcttgcgaagggagaagcaagcggcggcgcgtacgtacgtcatggctgcggcctcgtcatcgacgtcgtccgctgggtcggcagcgccggctcacgcgccggcggcgggaggtgccggcggcggcggcagcagcggggtaccgaaccaccggacgcggttcggcgacaccacgctgaccaaggtgttcgtcggcggcctggcgtgggagacgccgtccaagggcctgcaggaccactttcagcaatacggcgaaatcctcgaggccgtcgtcatcaccgatcgcgagaccagccgctctaagggctacggattcgtgacgttcagggagccggagtccgcgcgggaggcggtgcggaacccgaacccgacgatcggcggccggcgagccaactgcaacattgcgtccatggggccgccgcgtccgtcgccgtcgcgagggcgggccccacgtgggtccctcttcccggatcagccacacatgggcccgcagccttacatgggcggccggttgccgccgcagcatatgacggccccacctcaacagatgtactaccatcctcagttcgggtgagtatcaaacttcttctttcctcttcttttttttaatcttttttcctctataaagccatcggatgcagcacgactcagaccccacgattacgatgatgcatggataatgaatacgtacaaccatcgtccaaaaaacacgcactagtatattgcaccgtcgtcatcgtgggatccgagccacgctgcaaattaacctgaaccttatcgatcagcggctgtgcatgcgacagcagctaagcattagctacacgtccatatcagcaccatgtcattccctctttgggagtttgcaccgtgtttccttgttagagcctagctgtaaattgcactgcaatgcacaaaaaggataaataggctgtttaggtagtgaggcctccgcgtcattggtgattggaactggtggttcatggagacgtatgcggtttttatccatgtgggtttttgaggtagacatttggagcccttattttgtcgaaagagatggtaccttattactaactgatctcggaggtaaacgggtggagtagtagacaagaaagtcgttgctgctaatgcacggtgattggagaggctgatctttttattgtactagctgatgggggtagctagtaccgaattggcgcctgctgctgcgtctcattttcacggcaatgactagtgtgtgaggtcccgttcctttcgtggcagcagctttccgtggttcgttttccttaattgggcagaagggttcagttgccaaggagcacagagggcccacgtgtccccattcccactcctgttgggccctgcgtgatggcccattaagcctgggccgatgggagggagacagcagctcagcaatggccaatgggcattcaactccggagggtcccacaccgtctctctctctagagtctagaccaccatggggtgttgccttcccagcaaacacactctgcactttgttggttttctgccgagttaaatgtctgcattcagatctgatgccacttggctgctgctatgcaatttgcctctttagtttgttttagttataaccgtggacctgtacagatcgttgaaacaggaatgcatgtgtggcatggcatgtacgggattttaaatttggttatattttgctaagaaccaccgctgaactagtagttgagttgtttctgcctttctcatatgcaaatgtaaaattagacgatctgaaagttactcttgatcttgatttttcttgaaaaaaggttaataatgttttatgtggatatttttgcacaaagtttattttaaaaaacagagtccagttttgtttttgacaaatgacaataactgcacttttatttgatgggggttatgatttagccagccaattgcttttaggttcatacaatttgtacaagaaatgaggaatttagaacccttttcctatgaactgctgctgccactgaaaaactggaagtacaagaaatgggaaaagtttattgctctagttttagctagaatagattgtgtatatatgagataagtttgggctttacagccaagatagttggtagatatgtctgctgtctccaagagaatggtgggactcatgttcggctcaatccctctcaatcttttacaacgcactaaagaaattatgcaaacttttgcaggtactggtacccacaagattatccttaccaacaggcaagcatcccatccatctccttgttcaatgtttgacgttttacttccatcacatgcgattggttcttgctacatgcatctccaataatttggtaacagtacacaaagaatagataagtttcacagttggcgttcatgttctgaaactctgaactcacaacagctaaagttgtgtcctgcacctcaaaagcttgaatactctaacatttagtagtattgattatctgcacatattttctatacaccagagcactaagttatagtaatagacatcagcacaagtactatcatcttatttttcccatctaacaatatatactggaagtatctagagtctgaatcatcttattttccatgtgtcaatatgtgctgaaactatccaatgtctgaactcctcagcatgccgtgtacaattcacaagcgctacagcattactaccctcagctgtatggtccaacatccccttcaacaccgtcgtaccagtttatggggtacatgccgggtgccctgggtccaagggctggcttctctccgatgcagcaacaagctccacggccacctttcattcagcagcctgcgctgcagttcgacgggggctctttccctccaggaccttctctcccaccggatttcagactccagttgccccctcatgcactctcaaggcaaccagatgaaacaaccggtgctcaatcagctccgccagtctccgcgagtgcagctgcaactccaaccacagacagcaaggaagcatcaaagactgtagaatcaaattcagatctaaacacctcgaactgacttggtgaactgaaaattcttccgaaatgactcaatgtcagcccacatggtgccatggtggtctgtaacagggctccaagcactcatttcttgactgaaaaaaagcaccaaaagaattgttctttcattatttcatattcttttccaattttcacaatgcatttcttcggtgaatccattgtatggcccaactgaacttcacgaaaaaaaatctgtaattttccataatatcttccggcgcgtgctgttgtt

SEQ ID NO: 8991 - DNA, 1761 bp, Oryza sativa
  ref <308>: DATABASE ACCESSION NUMBER: AK106339
  ref <309>: DATABASE ENTRY DATE: 2002-08-28
gaaataaaaataaaaaaaaggaaaaaaaataccaataaatcgcggatttcccctacgcctccattcccaaggagagccagttcgtgtttgatgccaaggcctcgccgctgcggtaggaagtactggttattataactacattgcaaacaaccacctctctgctatgaatcaagaaagaaatacaaacaacgatgttggtcatgaaaagcaactcaatcttcagatgtccctgaactactttcctgttgaaaatcttgatcggttagcacgtattggtaatccaagtgctgtatcaactgggctaagactgtcctatgagaacaatgagcacacttcaatcacatctggcagtggtaacatgtcatcattgcctatcatggcatcctttgttgatgaagtgatggctgaattagacaaagaaaacaaagagttcaactgttatttcggacttcaggtggaacaattggttaagtgcatgaaagatgtaaagcagaggcagatggttgaatttcttgcatcccttgaacgaggagtaggaaagaagctgaaggagaaagaactcgaggtggaggccatgaacaggaagagcaaggaactgaacgaacagatcaggcaggttgcattggaagtccagtcatggcagtcggtagcactgcacaaccagtctgtcgctaacagcatgaaaagcaagctcatgcagatggtagcccatagcagcaatctcaccagggaaggctctggcgacagcgaagtggacaacacagcttccagtcagaatgtcaatgctgtgcctggggttttcttccagtcaggcctcctcggcatcaacagcatggctgatggtgggctgggagcatgcaggttgtgcagaatgaaggaggcagcggtgctggtgatgccgtgtcgacacctctgcttgtgtgctgattgcgagaaaaatgctgacgtgtgccctgtctgccgcttccccaagagttgcagcgttgagatcaacatgtcatagctagcaacagccttataatcatcagcttagacagtggtacactgaagccgtatatacaaagctaaatctctctgcccctcccccccttccagttgtcattcttacatggtgtgtagatttgttgattgggactatggaagctatggtcctccagagtctcttgataaccatatatatagttttagaagctgttacatgtcacatccatatcagaaaaaaggttatcatcctgccaacgttggagtggcaattacaatgataaccatgtttcctggttgcactgaggaatgagtattttctttttcccctttagtttccggaagcaaaagggatcaaagatgatatgctaatggggttgcattgcagttgctgaaacagaaataatgtgaggagcatgtgcaacagccaacagcacacgcaatgcaatgttaaggaggagtgggcaggcaaagcaggggcttctgtgcaaacggaaaggatgagtgcatctgaagttacaccccaatcagcacccagatagtactgaatactgttgcacgcatcatgcatgccgttcaggtaaggttcatgattgctggcacctggagcaatggcacatgaacatcgaacgtggcttgccacatctcaatgctatggagaatgatgatgcgaaaactgcggaaaaaggaggatttttttctttgattcttgtggaaatcgtaagaaaatttcctgtgttccaaacgatgcctagtgaggattaatgctgcctatgatcc

SEQ ID NO: 8992 - DNA, 1367 bp, Oryza sativa
  ref <308>: DATABASE ACCESSION NUMBER: AK106340
  ref <309>: DATABASE ENTRY DATE: 2002-08-28
gcagcggagcaatcgcccatcgccgtcgtactccccatctcgtcgctaccgccgtccccaccgcaccctcccccttcaccgctggcggtgaaaccagccgccgccgtccgaggaggtttgtcctctctctcgcgcgcggtctcatctcttcctgctctctctcgttcctctcttatcctcacgcgcaagagagggagagcggagatggcgcgcggcgactgggtggcggccgagcgcggcggcgcggccgggcggcttggcgtggcgtcgacgtcgtgtggcggcatggcgatgggagcagtggagaagtggtgcatcggtggatggggaagcagaggagggaccacaaggcggcggccgactcggtcgagacgacgcggccgctggggtgatcgcacgtcggcgctcggcccggcgccatggtggcttgggtcgggcggagacggcgatgccgcgcatatggcgtgggtgacggcgcggccactcggcggggaggccaagacgtcggcgaggcagcggccgggcgtgtcggcgcaggcgacggcgcggcggcaaccagactcggctgcgcggcggcgcggccgaggcagaccttaaaagaaaaataaaaaaaacaacctgccgcccgcgccgtgcaacctggaggatcgaggcgggttgttctggtcgatttcggccacgacgggggctgggcagttccaggaggcgcttcgcatgacgggctcggcagggggcagcgcactccgagtccacggcgtcaccaccatgagcaggaaccccgacggctgtcctccatggctcatacgactgcaccgtccggcctccaacacaacggctgtcctcctagagtcccggtgaacgcagatcgacctcatgggtgacttacaggagcttcccggacctacggcaacagtgatcgaggaactctgctgctcgaaattaggaggtctgtgttttgttttacctgttacgaatttgctaattctggattctttgcttcctcccaaagacgaacaccacaagatttccgtatatgcatgcttgcgtaataatatagcatcaacacatgaacacgataatatagtgtcaacctgtttcatatgtgctctgagctttctattttagccctttcgcagccagtttgtgttgaaactattagtaatcaatctgttatatgataactcaggaactgcaggttgggcctgaactaaattttttgagaaaccttttctgttctacagatgggattctagaatccattgcttacatgataatgaaggtttggtgattacctgaaatttggaagcaggtacctaccgataatcgtccatgttatactgttaaatttaaatgcatcccttgatagc

SEQ ID NO: 8993 - DNA, 2353 bp, Oryza sativa
  ref <308>: DATABASE ACCESSION NUMBER: AK106341
  ref <309>: DATABASE ENTRY DATE: 2002-08-28
tgttctaagggagttgctttatgatgcagaagacgttatggatgagcttgactactaccggctacaacaacagattgaaaaaggcgaaggttgcagtgctgctgctgctaattatcctgaggcaagctatgcgtcttcatcaactccattttctccttatcaactactacacagtgccaggagccaaattactgtttgggcctcatattgtagaaaaaggaaacaaggagagggagacacaactcattgcaccatgctgcctcttgagatcagacttgatatttctaagaggatcaatggaatagtgaacgatttacagaaagctggcaattctgtgagggggattcttctaccaggtgtctcacacccagctttaacatcaaatcagaggcaaagcaagatcaggaacacacgcttgacaacttctgttcctattgaacttaaggtgtacgggagggatgcggacagggacaggataatagagatattattaaatgaggaatctagtgatctacgtgttttgccaatagttggcattggtggtattgggaagacaacactcactagatttatatacagtgatcgaagaattattgatcattttgatttgcgaatttggatctgtgtatccacttacttcaatgaagtggacataacacgtgagatcttagagcatatatttgaagataaacaagataaacaggaattcaaagatgttagcaatttcaatgtactacaggagattcttttgaagaatattagagataaaagatttcttctcgtattggatgatatgtggaaggaaaaagacatgagtggatgggataagctgttagctccattgaaacatagtcaagtaaccggctgtatggtgctagcaacaacccgaaaaaactcagttgcagaaatgataggaacagtgaatgcattccaaatcagtggtctggatgaaaaggagttttggcagttcttcaaagcatgtgcgtttggcaaggaaaactacgagggtgatcctagtttgcaatccattgggcgacaaattgctaaagcactaaagggctgcccactagcagcacgaagtgttggtgcacttttgaacagaaatgttagctatgaacattggaggacaattcgagacaaatggaaatctcttcaaataaaagatgatgattttatacccatcctgaaacttagctatgattatctaccttctcacctgcagcgctgtttctcctactgttctttattcccagaggatcacccgtttagtgcagcaactttggttcaggtttggatatctcaaaattttgtgcaatgtgaagatataggcaaggggttggaggagacagggttgcaatagctaggtagtttggtggattttggatttttccaaaaggttgaccggcactatgttatgcatgatcttatgcatgatttagcacaacaggtttcagcaaaagaatgttatacggtaagagggttgcaatctagcacaattcgacaaggtattcgtcatttgtctatcataaccactggtgatgataatgataaaaataccaattttcccactgagaaatatgagatattacaaaagattaggcctttgcaaaagttgaggagcttgatgctttttggaagcagcagtgtatatctattgaagtccatacaaactgtatgcaaggaagccaaatgtttacggttgttaagagtttgcgtcttgaacgctgacatcagtgctatacccataaacacataatgctcttaacagactacacttgaggaggtatgcggttggtgcaatttgccttaaccctcaccctcctcttgcttaaagtaatcatttgaatttccctgcagagtgcagactgcattcaaattaacaagatcttgcacattgttgttgtctgtgctgcacttgcttccttcagcacagatatacttctggagccaatgtatacggttatatggccttacaacaaagaccactatgtacgcatcaactcatgactggtgacaaatgttaaccctttgatttctggagaaaactgcatagagttcaattgtgaatttgtgactggtataaaaaaaattgtttgctttgagatctatgcagttaatttgggtgaattaattagtaagcttttagccttggttattgtcatggtgtttgagacaatcgtccgtgttgatggttatgttggacgtcatgtacagacgaaagccagtgtaattgattagggtagctaaaaactggaattgatagtgtttaccatgtactagtatactaggaattaagtcttgtgttttgagtttaataattcggtttgaatcttagcatcgggcgaagttggcc

SEQ ID NO: 8994 - DNA, 1416 bp, Oryza sativa
  ref <308>: DATABASE ACCESSION NUMBER: AK106342
  ref <309>: DATABASE ENTRY DATE: 2002-08-28
acactcgacgaacactatactagagggaagagtgagaggaggagagtggtggtggtgcgagagggagggagatgggcattcccagagctctcctgctgctgctgctccacgtcgccgtcgtcgtcgttctccggtcgctgccggtgtcctccgccgacctgtacgcgctcgtctacaagggctgctccaaccagagcttccccggcggcgcggtgccccccacagtcgccgcgctctcctcctcgctctcggaccagtccgcctccgccaagctctacaagacctcgtcgtcatcctcggcttcctccacctccgtcttcggcctcttccagtgccgcggggacctctccggctccgactgcgccgcctgcgtctcccgcgccatgtcatcctggtccgaggtttgcggcgcctccgtcgccgcccgtgtccagctcaccggctgcctcgcgctctacgagatatccgggttcccccaggtgtccgggacccagatgctgttcaagacctgcggcaccggcggcggcggcgggaccgacttcgagatgcgccgcgacaccgccttcgcgcagatggaggccagcgtcggcgggggaaacggcgggttctacgccaccagctaccagcaggtgtacgccatggcgcagtgcgagggcgacctctcctcgggggactgcggccagtgcgtcacccaggccgtccagcacgtcgaggtcgagtgcgggggcgcgccatcaggccaggtgtacctcgagaagtgctacattagctacagctactatccccatggcataccccatggcggcggcatcggagggcagcagacagcaaagactgtagccattgttctcggtggagctgtaggtctgggttttgtggtcatatgcttgcttttcgccaggagcctggtcaagaagaaggaggattattgatgggcacgcatggagcaactggacaaaaggcattggggcatggtatgcattttgattggggtctcgatgtttgtttcttcaaggtggtgagtggaatacagaggggattgtttttttttggctcttcttcctctggccatgtgggggtgcgccatgccatcccgcgtgatgagagaggggaaaaggaggtagtgccaagtagttcagaaaggggactcattttgggggaatgctattttggttcactgattaaattggaggtagattatctatttgggctgtaccaccttcgcctctcttgcttaggttctagcagtacatcgatttttcttgtattctttccccaaaagaaatacatttaggtgtaggcagaaagtatttagtcctatgtttaaggtttgccgcggcagctgcggcaggtctaaggtctctctgactgattggttttgcttcgctctcatgaaattgtttcatagtatgctct

SEQ ID NO: 8995 - DNA, 1456 bp, Oryza sativa
  ref <308>: DATABASE ACCESSION NUMBER: AK106343
  ref <309>: DATABASE ENTRY DATE: 2002-08-28
aaaggcacaaggccgtcactcttcacatgctttcatcaaaacaccaagattacatcacctgcttcatggcgtcgcctgccgtttacgtgattgccacgatcatcttcgttgtggcgttcgcggcgttgctggtcaaggtgtaccggggcgccgagagctgcggcgccgcggtggccgccgagatgaaggcgacggcgcactacgccgtggtgcccgacgccgcgatgcggagcgcgacggtggagaggttcctgtgggagatggcgcacgagaagcccatccggttcacgccgcggcagctcgccgggttcacgcgcggctactcggcgcggctcggcgccggcgtcttcgggacggtgtacggcggcgcgctccccaacggcctcgccgtggccgtcaaggtgctccgcggcggcatggacaggaggaggtccgaggagcagttcatggcggaggtgggcaccatcgggaggacgcaccacatcaacctcgtcaggctgttcggcttctgctacgacgccgccgtgcgcgcgctggtgtacgagtacatgggcaacggcgcgctcgacgcctacctgttcgacctgagccgcgacgtcggcgtcccggcgcggcgcgccatcgccatcggcgtcgcgcgggggctccgctacctccacgaggagtgcgagcacaagatcgtgcactacgacatcaagcccggcaacgtcctgctcgacggcggcatgacgcccaaggtggccgacttcgggctggcccggctggtgaaccgcggcgacacgcacgtctccgtgtccggcatgcgcggcacccccggctacgccgcgccggagacgttgatgcagtccggcgtgacggagaagtgcgacgtgtacagcttcggcatgctcctcctcaagatcgtcggccggaggaggaacttcgacgaggccgcgccggagagccagcagtggtggccgatggaggcgtgggccaggtacgagcgcggcgagttgatgatggtcgacgacgccgccgccgccatcaatcatccgagcgacgagatctgtagtggcagcgacggcgaggccgtggtgaccgtggccgaggccgacgacgagcggcggtgcaaggaggcggtggtgaggatgtaccaggtggcgttctggtgcgtgcagcagcggccggaggcgcggccgccgatgggcgcggtggtgaagatgctggagggcgagatggacgtcgcgcctccggtgaacccgttcctgcatctcatggcggctccggcgccggtgccgaatccatgggcgacgacgacggcgagcagcggaaacgccgtctcagaaaacgtcgttgtttctcacggaagtgacggaatcgtctcgctttgactactgaaatcttttgtctgtgcgtgtgggtcgccacgacctcgtttctttgcattctacaagtagattgtttatcactacattat

SEQ ID NO: 8996 - DNA, 1696 bp, Oryza sativa
  ref <308>: DATABASE ACCESSION NUMBER: AK106344
  ref <309>: DATABASE ENTRY DATE: 2002-08-28
aatccaaaaaccctagcggagaaatctctcccctcaccgtcccgcgcgctgctcggccgccatgagcgcccccatggaggtctccttctccgcgccgcctcctccggatgcggcatctgctgccgccgcggccccatcgctggtgcccgccgtgtcggcggcggcggtggcggcgaccaccgtttcctgctcgccgcagccaccgacggggtcgccctcgtttcagttgaagtgcttctgcacgccactagcacagctcgagccgagggcgtctgcgctgcggtggagaggatgttagaagctcgaagcttaagctatgttgatggtcctgtcccgattcctaatgatgatccttttcttcttgcaaatgttaaaaggatccaaatctgcgacactgatgagtggactgagaatcacaaagttctgttattttggcaagtcaggcctgttgttcatgtgttccagttgagcgaagatggtccaggtgaggagccgggtgaggacgatacactctctagcttcaatgagtgggctctgcctgccaaagaatttgatgggttgtgggaaagcttactctatgaagttggtctcaagcagaggttgctgagatatgctgctagtgctttgctgtttactgaaaagggtgtagacccatgtcttgtttcctggaacaggattgtacttttgcatggtccacctggaacaggaaagacttccttgtgtaaagcacttgctcaaaaactttccattcgcttcaagtcaaggtattccatgtgtcaattgattgaagtcaatgcccattcactgttcagcaagtggttttctgaaagcggaaaactggtggccaaacttttccagaagatccaggagatggtggaagaagaaagcaacctggtatttgtattgatagatgaagttgaaagcctagctgctgccagacaggctgccatatctggatctgaaccttcagattccataagggttgtaaatgcattacttacacaaatggacaaactcaagtcttggccaaatgttatcattttgacaacatcaaatatcaccacagctattgatattgcatttgttgatagagcagacatcaaggcatacgttggacccccaacccttcaagcacgatacgaaattttgaggtcatgcttacaggaacttttgcgagttggaattcttacacatactcagggtggcaattctctctggcctactccataaagctgcagaaatatgtgagggattaagcggtcgaacattgaggaaacttcctttcctggcacatgcttctgttgctaacccttcatgctgcgatgcctctgctttcctgcacgctttgatacagactgctcaaagagagctctccgagtcgcgtggttgattgattccatgccggtcacttcgaagagcaaattgctaacagtttcaattccagagatagtttttaagggacctcaaagatagctggaagctaattcagagcctggtgctaaataccggcagacccctgcaatctttaggtttagaacagcagaagtccagaatagatctgattgttgctttgatacttttgtgttttgtagattattatatatatagtatattgtgcctcgaaggatgtcactgagttaaaccagaaacaagacttgattcgagttgctgaatgtttaaaagcatatgttatcac

SEQ ID NO: 8997 - DNA, 1469 bp, Oryza sativa
  ref <308>: DATABASE ACCESSION NUMBER: AK106345
  ref <309>: DATABASE ENTRY DATE: 2002-08-28
acgcgtgccctccccgctcccgtctcgccctcccctccctctccctctcccgccgaagccgccgagcgccacctccgcctccccctcgcgccgccgcctccacctccgttgccgtcgcgtcgccgccgcctccgcctctacctccccctcgcgccgccagctccgcctctgcctcctcttccttcccctctgcctcgcgtggccgtcgccgagtgcgccacctctggctcacgccgccgctgccgtcgtcgctgtagaggaggcggatccgacctccatgtgtttgggggacgcggatctgactgacgcaacgtcgtcatccgctgtcgtcgccatcgccgagcgtcaccgctgcatcctccgccacacctccgtccttcaccgccaaagaccgctatgagcggtcgacctggggtggaggcgtggagccggccgccatcgccgcaacttcatggcataggggacggttgtccgtcgatttgaggagtgagaggcggcaacagcaataaagaggggagaggcctgccggcggctgtatggtggagaagcgccgccgcagcccgcatcccctcctctcgcccctccctctcccacccgggcgattcgcaagccgccgctgccaccgctctcgaccgccatcgctgccgtctcatgggctccaggaaccgccggcgggggtgatcttgacctcgacctcagccttggctgcttcaatggttgcatggggataagtggagctccgtcctggaagggtggaggcgggagatgctctgaccatcggcggctggcatcagcatcagatccaggctgcggtggcgcggatcgaacgtagaggcgtgatctgatgacggtggtggagttgcaaccaaggtcgatggggatgtcgagggcgttgctgatgaagaagcaccccagttaatgatatggctcgcttctctggctcgagggcgttgcggatgaagaagccccatgctctggctcaggctccgctacggggttaccataccgtagattatattgtcaagatgcacaggacataatgaataagttcagcacgccgcagacacgtcgtggtcaattcctcatcggaagtattgcttggtgcttgtgtattttttccgcatagaaataagatgggatggattttttttctccacagattattttatatgtttctaagaataggaatatgaagtggaaaatatggcatgtgttctgtatgctaataatctaatagagtggatcaggttggttcgagtttgtttgcaaggcaaaccaacattacctacatagatggcaccgtgataatcatggaattgtttcttctcctttttacatgatcctgtaaatgaaaggaaggtactactgatttattggatgatctttcgtgacttgcggctaaaatgatggtgtagttttaatctctgtattcccgtttcatatcatagaaaaaaagaactaatgtggtt

SEQ ID NO: 8998 - DNA, 2645 bp, Oryza sativa
  ref <308>: DATABASE ACCESSION NUMBER: AK106346
  ref <309>: DATABASE ENTRY DATE: 2002-08-28
atcctactatccctaaccaatccaaaaccctcattcccttcttatgccctcaaatctccatgcatgccattggcatctccattccatgtcgtcgtccatggcgatctcgttgctgctgctcctcctcctccttggcgccggccacatgacccagccgacggcggcggcgctcaaccaggacggcgtgctgctcctctccttcaagttctcgctcttggctgacccgctcgcctccctcgccggctggggctactccgacgacacgccctgcgcctggaacggcgtcgtctgcatggccttcccgtcgtcgtcggcgtcggaggcggcgagggtggtgagcgtcgtcctgcccaacgcgcagctggtcggccccattgccagggagctcggcctcatcgagcacctccgccacctcgacctctccggcaacgcgctcaacggcaccgtccccgtcgagctgctgcgcgcgccggagctccgcgtgctctcgctcgccggcaacggcatcaacggcgccctgcccgaccaggtcggccagctccgcagcctccgcgcgctcaacctcgccgggaacgccctctccggccccatcccggcgaacctcaccctgctccccaacctcaccgccgtctccttggccaacaacttcttctccggcgcgctccccgtcgggggcttcccggcgctgcaggtgctcgacgtcagctccaacctcctcaacggcacgctcccgccggacttcggcggcgccgcgctgcgctacgtcaacctctcctccaaccgcctcgccggcgccatcccgccggagatggcgtcgcgcctgccgcccaacgtcaccatcgacctctcctacaacaacctcaccggcgccattcccacgctggcgcccttcaccgtgcagaggcccacggcgttcgcgggcaacgccgagctgtgcgggaggccgctcgacagcctctgcgcctccgccgcggatccacccatcaatggcacggcacgctcgccgccggccatcgcggcgatacccaagaaccccaccgaggcgctgcccggcgatgacaccggagcgccggcgtcaggatcaggccagcagggcaggatgaggatggccaccatcatcgccatcgccgccggcgacgtggccggcatcgccgtcctggtggtggtgttcatgtacgtgtaccaggtgaggaagaagaggcagcgggaggaggcggcgaagcagaggatgggcgtcgtgttcaagaagccggagcccgacgagtcgccggacggcatcggccggagcctgtcgtgctgcctgcggaagaaggccggagacgagagcgacagcacggaggaggtgactgacacgtcggcgtccaaggagggcgtcgtcgccgccaaggccaagacggacgacaagaagggcaaggacggcggcggcggcgcggtgctggtgacggtggacggagaggtggagctggagatggagacgctgctgaaggcgtcggcgtacatcctgggcgcggcgggcagcagcatcgtgtacaaggcggtgctggccgacggcgccgtgctggcggtgcgcaggatcggcagcgacgacgccggcgtgaggcggttcagcgagttcgacgcccacatgcgcgccatcgccaggctccgccacgccaacatcctccgcctccgcggcttctactggggacccgacgagatgctcctcatccacgacttcgccgccaatggcagcctcgccaacatctccgtcaagaggaagacggggtcgtcgccgatcagcctgagttggagctcgcggctgcgcatcgcgcgcggcgtggcgagagggctggccttcctccacgacaagaagttcgtgcacggcaacgttcgccccagcaacatcctgctcgacgccgacatggagccgctattggcggacctcgggatccaccggctcatccgcggcggggacacgctcaagccggcggctgcggcgggggcggggcggttcgggagcaagcggtcggcgaagagcttgccggacctgtcgccgccgccgggcgcgagcccgctggcggggccgtccgggtccggcgacacagcggtggcgcagtaccaggcgccggagggcgtgaagaaccccaaggcgaacgccaagtgggacgtctactccttgggcatggtgctcctcgagctggtcgccgggcgcgcgctgacgagcctggagctctgccagtggagctccgcggaggagagcgggcagcaggtgttccggctggccgacgcggcgctgcgcggggagatggccgggagggaggaggcgctggcgagctgcctccggctggggttcgcgtgctgcgccatggcgccgcacaagaggccgtccatgaaggaggtggtggcggcgatggacaggataccgtcgccgtcgtcgtcggctcagtgacgcacgcacgccgttcattcttcatctcttttttctcctccatgtcccaaacctgtaaacttgttgagttcttgatgctttgcaccatgcatgtagtagtttgctcgctgttggttttgccatggttttccagcccaatttctgaaaggaattggtgtgttttgttcataccatcatattatctttgcctgttaatatgagttgattattcatttgc

SEQ ID NO: 8999 - DNA, 2292 bp, Oryza sativa
  ref <308>: DATABASE ACCESSION NUMBER: AK106347
  ref <309>: DATABASE ENTRY DATE: 2002-08-28
aatgctcagccgttggatctgcggcggaggcgggcggcggaagcagaggtggttgtgctctgctccggcccgacggactccacgaaggcggcgggggaaggagatgacgcgggggagcggcggagcttggagaccgcggagaggaagcctctcggcagcggcggcttctcgccttctccgcgttgagggccacgaccgccgaggccgagccgtcgacgccgccggcaattcgtcgcggtgcagagtgccgacgctgatctatcctcggcgaggcggcgaccgggacgactccctcgacttctccccatccggccggcgatcgccgtgagaactgctggcctggtgctgggcccccatgctaatgagaacttcatggatagaacggaagcatagattgaagtgctttggttaattcctcttcagtgggcaactcctgcatcaaattgagaagattgtagcaggagtcaaactcaacacttgaagggtgacaggaaaattggaaatgcctgtggttgctgcgagtctagctggcaatactataaaaagtccacaggattgtatacagtagaaaggtgtgatcgtacacagggctcacatttttggaccaaaaattttgaaattctccacatgtcaggtttactgggtctctaactgtgggaacgtcacatcagaatcgcaaatcttctccaacccatccaggtatgcaaagcttagataccgtaggcatgggaatgtcggaaccgttgacttgttcatgttgtgcccaaaggcttgcgtgatactgttgcagtaacttacctctaaatgttgaagtttggacaaatactttgtacaagagatgttttttagccggtcgcagaaggacaccctcaaaacagagaggctgggaaacatatcatgtggacttagtcggaagcacttaatatgttttaacatttttagattaaacaactcgatcttcttgagagcctcgaaacaataattcggtgcttcagcgcctctaaaaatttctattacgttcatgtcgctatctgaaacctccaggtaatttaaagtagttccaagcaagttgtcttgaaaaatactttccgacagccggaacaatgcacatgactgttccattttccgtagagcaactagccttaacgggaggttacagcattggcttagtaattcatactggaatgagccttcaataacaatatcgacttctttcaagttatttatggcacccaactcaggtaatattgttgggacatactccactggagacatcgttattccttctccgaaatacatattcaacaagtctagcacttgcaattctgtcagactagatatgaccccgtctggtattgtctttatgttggtaccttgcagatacaagaatttgagtttaatgaggaatccaagacacttgggcacttcagatattgaaaagttgtatgacaaattgaggtactccaaatttgttaaggagcatagttcttctggtatattctcgagtttgttccagctcaaatcaaggggaaatgggatgcctgcttcttttgggtcaagaatctccctgaggtcatccaccaacagaaggaaacttcttttctcaaggaatttcgaaatcctggtaacaagttttgcgtcacggtcgtcttggtttatccccagcctccttgcaatctgttccctgatgtttcttgaggccgtgacaaaaatgacaaactgaaagtcagaatgttcatggaatgagttgttgatcttctttagaatatgtgttttgcccaccccagctgcaccccgtattccaatcatttccactgaatcatccgcaatgtaccggagagcatcctgaagaacaatgttttggcttcgcagttcaaaagactggattgggatgtattcggtaggggtttggagaacatcgacaacaatatcgctgggctgattgtcaaggcattcttggacctcatgaagcttctcagccgcactctggctaacatctaagttcagttggtgttgcccacatattatttctgcagaagatgtgatgctatccactctacgtagccacgagatcaccccattcgttggtgtcttgccatttcgctctgcaatctcaatcttttggcggacttcgttgctcctcgcaagcatattctcggttgccaccttgagattcctcacaattgttcctttcttgaaagcaaaatgaacagaattgagttaatgttaaggattggagctaagctaagattaagtcaaaatatcaaagacaaattacagttgaactccagt

SEQ ID NO: 9000 - DNA, 1335 bp, Oryza sativa
  ref <308>: DATABASE ACCESSION NUMBER: AK106348
  ref <309>: DATABASE ENTRY DATE: 2002-08-28
atatccgatcccttctcgatcatcgctcatcatcacaatcatcaacagctcagttcatccgtgccgtgttaatttagctagctagcaatcgagctcagttttcctaattaattgctagctcgatttgctcggtgatctcttcaattcgccggagcttggaatcaatcgagagattagagtgtacgtgagagctagcgggagatcgtcggcggcgatggtgaacacggcggcggtggcggcggcgaagggcagcaggggcagcgggctgccgctggcgtcgctgaaccacatcagcatcgtgtgcaggtcgttgcaggagtcgctcaccttctacaccgacgtgctcggcttctcccccgtccgtcgccccggatccttcgacttcgacggcgcatggctgaagatcctgacagcctgccagggaaaacagagatcaatcctaaagataatcacatctccttccaggtacgtttggtatacgagatttggatcatatcactacaaatattgcaacacatcccattcaccttcatgatcccatcagcatgaatttttttttctcaaagagatatttccatttgcattggttaactggccgaacagagtatgcactgccgatcgacgccttgtgcgattttggatcgacgcatctctttcttttcgtgtcgtggcaaagttaatctaactaattacctgttcgacacgtctctattttgttggcacatgtgttagcatccgtgtcaacgtcagcaaaacggccccatacacataaatattttagagcatactccgtatgtatatggacgaatagtacgtataagtgaaacgtcgcaccaatcatcaacggctaacaacataggacactaattaataatgttatggcctgccaaagttgccggggacttttgtctgttcatatctccacggctacttctaccatttcccttccaaattaacatcattaaacatatcctcccaccatcacggaatataataacttaaaatcgaatgggacgtatcctattactataagtctgataagtctggatatgaggcatgtctagattcgtagtattaggatacgtctcatccggttttagggtgctatattctgggacagagttagtatttacaatgctatttttagattcttattaaaatgataatgcatcattaatcccctatttgacattggagcttcagctagcattagcaaagtcccagtaactattaggcttgtccatgctcctaaattccttcttttttcctccgttagtaggatagattagttgggaggtaaaaatggtgacttttgttggaaagattagttggggg

SEQ ID NO: 9001 - DNA, 1345 bp, Oryza sativa
  ref <308>: DATABASE ACCESSION NUMBER: AK106349
  ref <309>: DATABASE ENTRY DATE: 2002-08-28
caacccccctcgcggccaccgacatgtgggccctcaccccaaacagcggtgggtcctcctgcctcccggcgaggcgcaccccgccgccgctcgccgccgccggcgaggccggctcgctggccgcggggcccgggaggtggtgctcgtggaggcgtcgtcagccggcggagcggtggcccaagctggcggtcagcgcgtcagggaggaagagcaagggcggccgcgacgagggcggcggcgacgagcccaagaagaacaaggcggcgtcctcctcctcctccggaaaaggtggtgcgtctgctcccagtggagatgtttcaaataatgaactgcaatccaatgacacaatgtatgtacctggtaacttgtcatactggagagacgttagagcaagctttgtggttccaaaggtgcaaacagtagatgcacatactctaccacaagcagctacggatgcaccagtgcactgtcttcctcggaagtgggcacattctattccaatgccagaatctggttgtgtgctggttgctgctgaagagcttgatggcaatggtacgtttgagagaactgtaattctcctcctaagattggttcaagagatgcctatgacggcccatttggcgtcatcctaaaccgtccactgtatacaaaaatgaaacacgtgaacccatcgttccgcaaccaggcaaccccttttagtgattgctccctcttctttgggggacctgtcgacatgagcatattcttgatgaggactaccgatgacagaccaattaaggggttcgaagaggtgtcgccaggcgtctgcttcggtttcaggactgacctagagaaggccagtgctcttttgaagagtggcgcggttaagcctgaggacttaaacttctatgttgggtactctgcctgggattacgaccagttgttgagcgagattgatcaaggatactggcatgtcacttcctgtagctcaggcctgataagcgactcccttgcaacagatccttcttgcctatggactgagatattgaagctgatgggaggccagtacgcagaactgagtcaaaagccaaaggaagatggctcgtgaaaattcttgcttgctagcatagtttggcacaattgacgtgcttggtttgtacataattgggaataatctcgcccggtcactggccagggtaattgaacagtcctagtagtagtttcatgtggtcgtctttgtcctctgtattacttgaacaaatattatggagtactggtgatagaacggtgtgggctgtgaataattactggaattacatgcttccatcaattttctatgtgccacataaaaatccgaaattgagat

SEQ ID NO: 9002 - DNA, 1403 bp, Oryza sativa
  ref <308>: DATABASE ACCESSION NUMBER: AK106350
  ref <309>: DATABASE ENTRY DATE: 2002-08-28
acattctccagtctccacttcccacctaagcggagaagcgcggggaaccgaaacccggtgatggcgcacccgcacccgcggccgctggaagacgacgacctcctcgccgagatacttctccgcctcccgccgcggccctcctccctcccgcgcgccgccgccgtctgcgcgcgctggcgccgcctcgtcaccgccgaccccgccttcctccgccgcttccgcgcccaccaccgccgcggcgcgcccctcctcggcttcttccacagccaccgggtgagcccctccttcgtctccaccatggatccccccgaccgcgtccccgcggccgtgggcgccggcgggcgcttctcgctgcggttcgacgacttccgctgcaggatcctcggctgccgcgacggcctcgtcctcgccgtcaacccagtgatgccgcggctgcgcggctgcttcctcgtgtgggaccccgtctccggcgaccagcgcagcgttgccttcccgccggagtgcgaccagggacagaccgaggtgcggaacggcgcggtgtttcgccttcccggcggcggcggcggattccgattccagatcgttctggtgggcacccgccatcagtacgaagccatcggttgcatctactcgtcggagaccggcaaatggggggatctcatcgcaacacccctcccacacaatttgactaggatatccctggctgttcccggtgttcggattggggattccctctactggttgatttcggggattccgggtggaatcctcgagttcgatctgaacgagcagaggctagctgtgattgatgatgtgccaatggctgtgagtgatggataccgacgattttgtgtcgtgccggcagcggatggtggcctcggcttcgtcttcatgtcggatttgggctcacaattttggaggaggaagaatgattgggatgatgatgtctctgagtctggatgggtgctggagaaaacagttcaattgggcgagcttctatccttgagtccaacagagcgcaagggctccccaatcgtaatggggttttctgaggactataatgtgattttcctaaagacaattaatggtctcttcatggtccatcttgagtctatggagttcaagagaattttgaaagactgtgctgcccttttcatttatccatttgcaagtgtttacactgcaggcatgagcattggtgatggacatgatgaagatggacagtctccagctatgccagtttataatccccttaaccccacattttccattgcacatcttctattttgttcgtatcaaataaatcctctatacccatttgtggctagattgggccatgggctagttgtcaggggtttatcggtcacattaatattttaatatagaaactggtttttcttggt

SEQ ID NO: 9003 - DNA, 1723 bp, Oryza sativa
  ref <308>: DATABASE ACCESSION NUMBER: AK106351
  ref <309>: DATABASE ENTRY DATE: 2002-08-28
aaattttacccgaatttgtgggagaaaaactaaaccagagtgaacaaacgagacagagattcccatgagtgaccatggcgacgaaatgacctgccgccggcagcggcggcggcggcggacatccccggcggcgccggcgccgccgccggtgcttccgccggacaacgacgacctcatccaggagatcctcctccgcctcccctcgcatccctcctccctcccccgcgcctccctcgtctgcaagcagtggcgccgcctcgtctccgaccccgccttcctccgccgcttccgcgcccgccaccgggatccccccctcctcggcgtcttcaaggacgagctccatcaccccgtcttcagatccgtcctcgacccgccggatctcatcccgcccgaccgcctcgcgctgcggctcgacgactaccgcgccgcgagcctcctcggctgccgccacggcctcgtcctcatcttcaactacaacacctgcgagttcctcgtgtgggatcccgtttccggcgatcgccgccgcgtggccgttccgcaggagctcgacggtggggagagatccgtcatgaacggcgcggtgctttgtgccgccggcgacgacggccacgtgcacggcggcggcttccggtcctgccacttcaaggtggtcttgatcggcgccagcaagatggatgggcgaatcttcgcctcaattactcatcggtgaccggcgaatggggtgatgccatcttcacagggcctgtatccaccatctactattttggttcacctgccatacttgttggcaactcactctattggttgctatctgtgtgggggcctcacattcttgagttcaatctcgagacgtcgaccctagctgtgatcgatggcaattggccacagatgaatttttctagcgattgccactattgtatcatgcgtggggaggatggtaatgtcggccttgccattctgtcgtaccgcggattccaaatgtgggagaggaaggtcactcttggaggtgccgcgaaatgggtgctgtggaagactgtcaagctgcatgacattcttgggctgagttctgctgtgcagagagagaaaacagatatcgtgggatattccgaggatcctaatgcgtttattttagtggtggatacggatttctacatgttccgagttgactcaatgcagtccaagaaactttttgattgcaatgtcgtcacccgctgtcatcccttcacaagtttctacactgcagcaatggaagccattggaccagacgagtgagctcaataagctggattgcattgttgaagagctgtgaaaaaagctcaatcttgatggattgctagggctggcaggcagcctgtcaaaggcaatggagaaagagttcaaacatgtgtgtggctccttgccttatccatcaccctcactatcattgctgacgcctccaatgcgagcaaaataagggcattatggctaatagaatctggcttcaatgtgacaaagatgagaagaaaaatactgaaaccaataactttcaatgctatatgactaaaattatagtcgccaagataagatgctaccctaccattcttgattttgcttttgtacccggaggaacagtggtagatgaaagaagtgaatactagagtaagagcctgtttggttctatgccagtattagccttaccaattattctggctatgaaaatatttggccatggtcaacatttggc

SEQ ID NO: 9004 - DNA, 2036 bp, Oryza sativa
  ref <308>: DATABASE ACCESSION NUMBER: AK106352
  ref <309>: DATABASE ENTRY DATE: 2002-08-28
actcccacggatggatccccacgccggcgcagttgccagcggcgaatccgccggcgacgaggacgacggcagcggcgagcacgagacccacccgacgtctcccgcgccctccgccaacagcaggccccggaagcgctcgcgcctgaccgccgccgcagacgaatccacgaccgtcgacgactgctccgccggcggcagcggcagcggcagcggcgacggcggcggcggcggcggcgagtcggtgggcgcctggccctacgacgagagcgcagccagggacgagctcgtgacgctcatcgtctcccaggatctgcccgtcgggatcgcgggcagtgcgtccttcgaggccatggtgctgcaagcgttctgcccccagttcgagcgaatcgacaatgctgtcaccatcagagacatcttggtgttccacgaagaccatgtggcgggattgaaggaggagttcaccggtggtgatctctccttcgcgttgtcatgtgaaatctgggggacttcgtatcataggatgagctatctctgcgtggccgctcactatgtcgatggggatcacattctgaacaagagggtgattagcttcaagcttatcgacggcgcgccgaccgcggaggcgatggcgcggcgcattcttgatgttgccatggaatacggcattgagaatcggattgtttctgttactcttggggatggtttagcagatgctgaaaccatggatgcattggctcctcttcttgggtggtacaccggcggatttgtgttcctgcagaggtgcattttcagcatcctcaatgacatcgttcgagctggtttgactgagatggctgagcctttggatgctattcgttccgcgattgcgtacgtttccagttcggaggcgaatttcgccgagtttgagaagtgctgcgtcgagcgaggccagaaggctaggaagctatggcctgattccaaagtaaggtgggattccacatatgacatgctcaaggaagtgcttccctacaaagaagttctgactgactttgtcaatggcagtatgcagcaaggtttctttccgagcacaattggtcgctcctcagtatatttcacaagttcctcgcgaagttttataaggctgctaccaagttgtctgttgtttacagtcagacatcttccttaactttgatttacatctgtgacatggcagtattgtttcggtcttataggacagaccctgttttctctgccattctgaaaccaatggaagcagtgtttgtcaaatattttcaaagaattccacgcctctattgctatgctttgattttagatcctcggctaaaattacatggcctggaagtggccttgaagatgttaggtgaagccttaaacattgattattcaagcactttcacacaaattgctgatgaatttcttgaagtcctttccatgtatgaagagaagtttggcagcacactccgtccaccaccatcaccgccctcttcactggtctttagattattcgctgctagactgaaggagttggagctgaaggagttggagcttcaaaaggattcctcgccctcttcatcagtacaccaacgaaaagccaaaaacgagttcaacaagaaatacatcgagactccatgctcgttgcgtcttaattctcgtggacctgatcccaatattatcatgtggtggaaggacaacaaactttttcatgttgtgttagctcaactagcaagggatgtccttgcgtctcctgtgtcgacagtctcttctgcagatgcattcaacatcaacggaagagtagttgaagatcaaagatcatgtctagcaccggacattttagaggcaatcatgtgcctgaaagattttggaaatgctgctactcgagaacaggatagaatggtgaatgctgagtttgctagtgtggtatgccttgatatgtaatcaagcaatccaatgtgttttacctcctatggttccagtgttcagctcatctttgtttctatctatctgattagttaaatgaagacatcgttatgggcttt

SEQ ID NO: 9005 - DNA, 2581 bp, Oryza sativa
  ref <308>: DATABASE ACCESSION NUMBER: AK106353
  ref <309>: DATABASE ENTRY DATE: 2002-08-28
atctatcttcttcctcctcttagctatatatatctacaggaccgaccggcggcggcggaggaaggtggccggccggcggcgtgtcggccggcgtctctgccgttgtcgtgtgctttcaattcgtttcttctgaatcatcgaatagggcacaggggttctgaagcctaaacccttcaacatcgatcttcacaagctgatcagttgaaggagatgtctgtccaggaggatggcgcagccaggccggagccggacgttctccggcgccatgactcgctctacggcgacgccgagaaggtctccaacaacaagcgccatggcgccgggggaagctgggcgcggacgctgcagctggcgttccagagcatcggcgtggtgtacggcgacgtcgggacgtcgccgctgtacgtctactccagcacgtttccgaacggcatcaagcacccggacgacctcgtcggcgtcctctccctcatcctctacaccctcatcctcatccccatggtcaagtacgtcttcatcgtcctctacgccaacgacaatggcgacggtggaacattcgctctgtactcgctgatatcgcggcacgcgaagatcagaatgatcccgaacgaccagacggaggacgccaacgtgtcgaattacagcatcgaggcgccaagctcgcagctgaggagggctgagtgggtgaagcagaagctggagtccagcaacgcagccaagatagcactgttcaccatcacaatccttggcacctccatggtcatgggtgatgggacactgacaccagcaatctctgtgctgtctgcggtgagtgggatcagggagaaagcaccaaacctgacacaatcgcaagtggtgtggatctcggtggccatcctgttcgtgctgttctcgatgcagcggttcgggaccgacaaggtcgggtacaccttcgctccggtcatctcagtgtggttcctcctgatcgcgggcatcgggatgtacaacctcaccgtgcacgagatcaccatcctccgggccttcaaccccaaatacattgtcgactacttcaggagaaacggcaaggaggcctgggtctcccttgggggcgttgtcctctgcatcacaggcacggaggccatgtttgctgacctcggccatttcaacatcagggcaattcagctcagcttcacttgcgtcctcttcccctcggtcgcgctgtgctacatgggccaggcagcctacctgcgcaaattcccggagaatgtcggcgacaccttctacagatccatcccagcgccgctgttctggccggtgttcgtggtggcgatcatgggggcgatcatcgcgagccaggcgatgctgtcgggggcgttcgccatcctgtccaaggcgctgtcgctgggttgcttcccgcgggttgaggtggtgcacacgtcgaacaagtacgaggggcaggtgtacatcccggaggtgaacttcctcatcggcgccgccagcgtcgccgtcacgctggcgttccagaccacggcgaacatcggcaacgcctacggcatctgcgtcgtcacggtgttctccatcaccacccacctcatgacggtggtgatgctgctcatctggaaggtgaggctaccgttcatcgccgcgttctacgccgccttcggcctcgccgagttcctctacctctcgtcgatcctctccaagttcgccgagggcgggtacctccccttctgcttctcgctggtgctcatggcgctcatggcgacgtggcactacgtccacgtgaagcggtactggtacgagctggaccgcgtcgtgccggcggccgagacgacggcgctgctggcgcggcgcgacgtgcggcgcgtccccggcgtcggcctgctctactccgagctcgtgcaggggatcccgccggtgttcccgcggctcgtggacaagatcccctccgtgcacgccgtgttcgtgttcatgtccatcaagcacctccccgtcccgcgggtggcgcccgcggagcggttcatcttccgccgcgtcgtcggcgccgacgccggcgccggccaccgcctgttccgctgcgtggcgcgctacggctacaccgaccagctcgagggcgccaaggagttcgccgcgttcctcctcgaccgcctcaaggtgttcgtccacgaggagtccgtcttcgcctgcagccgcggcgacaacgacgacgacgacgcgatgcggcgggcgcaggcgatggcggaggaggagaagcgggtgatcgacgcggaggcggagcgcggggtggtgtacctgatgggggaggcgaacgtgacggcggcggcggggtcgtcggtgatgaagcggatcgtcgtcaactacgtctacacattactgaggaaaaacctcagggaagggcacaaggcgctgtccgttcccaaggaccagctgctcaaagttgggatcacctatgagatttagagtttgtcttttcttttctttttttttcttctcacttgtcttatttttagggcttgttataattttctagtacactttgttgatataatgatgtataaaatctagtactactactttagcaaatgaagcactattagtagtt

SEQ ID NO: 9006 - DNA, 1607 bp, Oryza sativa
  ref <308>: DATABASE ACCESSION NUMBER: AK106354
  ref <309>: DATABASE ENTRY DATE: 2002-08-28
agattgccagagagattcagaggcagagccgcgagccccacgacaccctcctcctcctctccctatccccttctcccccaaatcatccttctcaaaatcaaaggctccgggtggtgagcgctaatcgagagggattagttgttcgcggagatcgccgctatgcaggaagctcttctacctccggctcatccaggccgcttctactcggactttggcccgaagccgttcggcagcggagatcaacggctctcctcgcccaacctgctgaccaacggtggagatctcttctacggctgctactcccccttcagccctacccgcgtgctctcgccgccgccgccgcggcgcgccgcctcgttctcccactgctcgtcctcctccgactccgtcgtcgacgacggagatggtgcgggggcagcggcagcgaccgagcaccgcctccacctcgcccacctcgcgctccagtaccaggagatggccaaccgcttcgagctctgcctctcccacctcgccgatgccgcggacgaggcggccgcgctccgtcaggagaacgccgagctccgcgtcgccaacaacgacctcgcatgccgcatcgccaagttcggcggaaggcagagctccgccatcgccctcgccggtgacctccgccgcctccgcctccccaaggagcagaccgtgccagctcttcctcctccgccgcagtctccgccggccgcactgatgaatcccgtcgccgtccccgagaagcaggctgttcttccgaagagcatctccatccgttcgaccggataccagaagctgaaccagggcggcaagcatcgcgtgtcgaagccggtgaacgtcggctcgcagcgcgtgttcgtgggcattgacggcgcggagggaggcgagcacaaagttggtgtgaagaaggaggagccgcccatgggtgggctggagttcgaggtgtacaaccagggcatgttcaagacggagctgtgcaacaagtgggaggagaccggggcttgcccctacggcgaccagtgccagttcgcccacggcgtcgcggagctccgccccgtcatccgccaccctcgctacaagacccaggtctgccgcatggtgctcgccggcggcgtctgcccctacggccaccgctgccacttccgccactccatcacccccgccgaccgcttctccttcggccattgatcatacgtatcagtccatcaccgatcgccactctctcactccctcctaatctcctctctctttgataatgacatgaaaagagggggaaaaaaagaagaggccgtaaataaggtatactatttagttgcacaaagcaaatgagaactgaattatacaattagcacacaggcgaaatgtgaatactagagagttatagctattaagttgtggtcagatatgtgagttattacattgggggttatttgtcctatggttcatattgttatataggttattatgatcttgtttccttgtttcgttttaagcaaaccgggtgacaaattgttggactcatgtaagtaaggctgttatttggatatctgaattatgtatggaacacttgtacgctatgaaagtgcctgaaggctgttatttgc

SEQ ID NO: 9007 - DNA, 2359 bp, Oryza sativa
  ref <308>: DATABASE ACCESSION NUMBER: AK106355
  ref <309>: DATABASE ENTRY DATE: 2002-08-28
atggcttgcctcacctgcgcgtgtgcgtcgtctggagagcgctcacccttctccacttctgtcctcattcgcgcggcaagccggcggcggcgcgacgcccctctcctctgcgcccctatccgtttctgtgcatggttccagcctggtccctaggtgaatcctagcttccgattccctctgctactgccgccgcacaggtataatcgaagaccccttcccctgctgctgccgccgccgccgccgccctccaatccctttctgcaaggccttgtatctccggtgcccttgactgctcctgcccctgttgctatttgattccatattgtaatgcagaaatactagattaatattatttataaattagaatgcaacccagtctattgtgtttatcaaatacagctagataagatggccaccaatgatcggttcagtgatttgttatggatgcctcattgtcagcataaagtttccaaaatatgggatagtcctactaattgcattaacatacggcttcatcgtgtcggcattccttaccactcattatgtcagacagctttagagaatcttgggttctttcagattgcacggatgaaggaaatcaataatgataaatatttgatatcagcactggtggagcgctggcgacctaaaaccaacacttttcacttaccagtgggtgagatgacaattacgctacaagatgtaagttgcttatggggtttacctatccatggtagaccaattactggccaagctgatggctcatgggttgatatgattgaacggttgcttggaattcctatggaagaacaacacatgaagcagaaaaaaaggaaaaaagaggatgatatgactatggtgagttactcgcggtactccatcagcttaagcaagttgcgtgaccgctttcgtgtaatgccaaagaacgcaacagaacgtgagattaactggtatactcgagcacttgttcttgatattattgggtccatggtttttactgatacatctggagatggtgtacctgcaatgtacctccaatttatgatgaacttaagtgaacaaacagagtacaattggggggctgctgcactttccatgttatatagacagttaagcatagcatctgagaaggagagagctgaaatatctagacctttattgttactgcagttgtggtcttggtcacgtttgccacttggtcgacctgttaaggcaatgaaaatcacgaaagaaagggaagaagaagatgaacaggaggaattggactattgccttgtatttggagcaaagtggtgtctctcacatgaatttcgtgccccacataatgcgggtactgaatattaccgaagtcaaattaatctgattcgagaaggagtaattgtttggcagtaaccttatggatgaaatgcccatccaaatttgtaatgatcgtgcttggtggtttgctagattgcccctaattcatttctggattgtagagttccactacttagatagggtgatgcgccaatttggtcgtcgatagaacattccacctcatcctccatatggcaaggttgagcaccgcaaactatgtaaaatcaaacatggaggaaaaatgcgcagttgggagatagtacatgctaaatatatacaccaatatgacaatttggaagcagtaatggtccaagaggaccaaccttttgatccagctagcttgccagagtatagacgttgattccaacaaaatggtatgtatagtgttttttcgatgctcagtgcttgggaggtcttgaaaacccaatcccatatccccgggacatatttgaatggacaggctacatgcccagtggtccaccactagcacgaattagcttacatgtgataaagaatgctgcttgggggatcaaatgtgcaattactaatagctgtaagaagttaggcaagtcaatactcaagacatgcttgggtaatttgagagatctaaacctagagcctaggttgcaaaatatgctcactgatgctgggttgccaatcaatattgaagatattccgtctgatgatgatctctcagctcatgttcaccacccaagtcctccgaaagactctaattctgatatatttgatgaatgggtgtactcaggaagaggttttgaaagatatctccatgcaggtgggatagctgcaacacaagacctaggccaagtgacacggatagatgagtagagctgtaggtttgagattctttcgatgtgtgagttgctaagatagtggtccatgggttgtaatagtgaaaactacagcttgttaacaacgtgcttgttttagataaattattatactactcctaggttgcagctctaaagttcagtttgtgtcg

SEQ ID NO: 9008 - DNA, 1491 bp, Oryza sativa
  ref <308>: DATABASE ACCESSION NUMBER: AK106356
  ref <309>: DATABASE ENTRY DATE: 2002-08-28
caatgtacgcgaccaagccgctctccctcttcaagagccacccggaggcggcgacccagccgccgccggatggccggaactccggctacttcgtcgtgaagggccccgacgacgacggcggcggcggcgacgacgagacgtgctgctggggcacgtgcggcgggtcgcgcgtgcgcgacctgccgttcccgcagaaccgcgtgctgaccgtgcggtacacggagcagcacggcgagagcagcaccacctacgccgacgccgtcgtgttcgtccccgtccccgacctgccgctggcgtcgaaccggtactacgccgtcgtcgccgccggcaagcacaagggcctcgtcagggcgtgctcccgcgaggaggacatgaccacgctctgcttctgccgctgcatcaacgacgccaagccgagggtgttcgacccggccgacgtctaccagcaggtcgagatcgtgcagcggcggcgcggccggttcacggcgaggtccgtcgccgccgacggcttcccctacttcctctaccgcaagaagtactggcgcgtgtacgcctccaagccgaagcacttcgacctcggcgaggcgccggggctgaacgccgcgctccggtcgcgccagctcgccctcgacgcgttcccggtgacgacgaccgccgccgtcgggaagtggtacgccccgttcttcctcgtcaaggagagcggcgtctccccgccggagcagatggaccgcgccacgttgtacgaggtgtcgctcgagcagcggtgggaggcggcggcgcacgggcacggcgacgggtacgcggggaagctggacagcaagagggtgctcatcggcgggagcgtcgaggggaggcaggagggcggcgggcgccacggcgacgacgggtacgtgtggttcagggcggcggcggcggcgggcggcggcgggcagagggtgggtttgtgcgcgagcctgtgggagaggatgaggtgggaggagtacaggggagggtgggtcgacgagcacgagggcgccggcgaggtggccggcggcgggtcggtgctggtggagaggttcgtcgtgaagcggatggacggcagcgtcgcggtcgccgtcgactttgtgcacttcaacaaggccagggagaagctggtgtaaattgtaatcgtgtcactctgtcactgtcaggttatacctatcaaatgcacagttgcgaatcttcaggttaaatccttcaaaaaccataaaaaggaagaagaagaagaagaagaagaagaagaagaagaagaagaagaagaagaagaagaagaagaagaagaagaagaagaagaagttgcgatttgtaatgatttttttttatcaactctgtgagacagtggagaagatgtatttgttatggtttgtcaatcaccttgctttgagctttcgccttggtatgtactccgtactatgtatgtgcaaattacgtagtaagcacttgaatgggaaactgttttattcacctggatgg

SEQ ID NO: 9009 - DNA, 2053 bp, Oryza sativa
  ref <308>: DATABASE ACCESSION NUMBER: AK106357
  ref <309>: DATABASE ENTRY DATE: 2002-08-28
agacgatcagtagagagccgagcaacgcccacaatctcgcgaatccgcttcacccggcatggcagcggcggcgctgtacaaggacgcggcggcgccggtggaggcgcgggtgcgcgacctgctgggccgcatgacgctgcgggagaaggcggcgcagatggcccagatcgagcgcaccgtcgcgtcgccccgcgccatcgccgagctcggcgccggcagcgtcctcaacggcggcgggagcgccccgctcccccgcgcctccgccgccgactgggcccgcatggtcgacggcatgcagcgccacgccctctcctcccgcctcgccgtccccatcctctacggcaccgacgccgtccacggccacaacaacgtctacggcgccaccgtcttcccccacaacgtcggcctcggcgccaccagggacgcggagctcgcgcgtaagatcggcgaggcgacggcgctcgaggtccgagctaccggcatccactggaccttcgcgccctgcgtcgccgtttgtagggatccgaggtgggggaggtgctacgagtgctacagcgaggacacagaggtcgtgcgctcgttgaccaccatcgtctccggcctgcaggggcagccaccggctgaccaccctcatggttacccgttcctctcatcccctagggtgaatgtgcttgcttgcgccaagcatttcgttggggatggtggcacggacaaggggatcaatgagggaaacaccatttgctcacttgaagatttggaagggatccatatcagaccttatcctgattgtatatctcaaggggtggcaactgtcatggcgtcctacacccaatggaacggggaaccattgcacgcaagccgctatttgctgacagatgttttaaagggcaagttaggcttcaagggttttgtggtgtcagattgggagggtattgacaggctctgtgagcccagaggttctgattatcgctattgcatcgcgcagtctgttaatgcaggaatggatatgatttgagaagtttttggaagatcttgtgttcttggtagaggcaggggagataccaatgtcacggattgatgatgctgttgagcggattctgagggttaagttcatatccggagtgttcgagcatccattttcagatccgtctctagcagatataattggttgtaaggagcatcggttgctggcacgtgaggctgttcggaagtctttagtacttctaaaaaatggcaagaatcagaaggaaccattccttccattggccaaaaatgtgaaaagaatacttgtagctggaacacattctgacaatattggatatcagtgtggtgggtggacaatagcttggaatggagacagtggaagaattactattggtacaaccatattggaagctataaaagaatccgtgggagcagaaactgaagttgtgtatgaggaatgcccaacagaagccacagttgaaactggggaattttcctatgcagttgttgtggttggtgaggttccatacgctgaatggttgggagatagaacggatcttagtattccatttaacggctccgaccttatttctcgtattgctagtaaagtccctaccctagttgtggttgtatctggaagaccattggttgttgaaccccaagttctggacaaggtagatgctcttgttgctgcctggctacctggaagtgagggtatgggagttactgtttgcctctttggggatcatgattttttgggtacattgcccgtgacatggtttaggtctactgatcaattgcctataaatgctagagatgctagtgatgacccattattcccttttgggtatgggttgaaaatgttccgaggtgattaagtttttagcattaatcattgttggttcggttatacatttgaatgcttatatgaatcttacacacgctgtaccagttggctttttgaataatgtaaaagagaaataatgtcatgtttcagtattgcaggtgtgctgtaaggtgtaaagcttgattcttatatttttcatagaggttttagttactccttttc

SEQ ID NO: 9010 - DNA, 1661 bp, Oryza sativa
  ref <308>: DATABASE ACCESSION NUMBER: AK106358
  ref <309>: DATABASE ENTRY DATE: 2002-08-28
atagaaaaccctgaactggttcagcagcagtacagccttcgaccatcctcactctgtttccacttgcgagcgacaccaaccgcgggtgggggttcgcgaacaatggagggctcgggcgtcgagggcatcgtcatcgccggcgccggcctcgcggggctcgcgacggcgctcgggttacacaggaaaggggtgaggagcctggtgctggagtcgtcggcgacgctgcgggcgtccgggttcgcgttcacgacatggacgaacgccttccgcgcgctcgacgcccttggtgtcggcgacaagatcagggagcatcatctgctctacgagaggctgttggccttctctgcatccacgggagagcctgccgcgaagttgagtctaaagatgcaagggaaaagtggaccgcatgagattcggtgcgtgaagcgcaacttcctactggagactctggagaacgaactgccggaaggcaccatcaggttctcttccaagatcgtctcgattgaggaagacggcaatgtcaagctcctacatttgtccgatggctcaacgataagagcaaaggtgctgataggctgcgacggcgtgaactcggtggtggcgaagtggcttggcctgccaaagccgatcctctcagggcgctcggccaccaggggcctcgctgagtacccggccggccacggattcggcccggagatcctgcagttcatcggccagggcttccgctccggcgtgctcccctgttccgacacctccgtctactggaactacacctggtacccctccccggatgacggcgacgcggaggagagcgtggccaagatgcggagctacgtggtggcgaagctgagggcggcgaggatcccggcggaggcgctggacgtgatcgagcggagcgagatgagcgacgtggtgtcgtcgccgctgaggttccggtcgccgctcgcgctcgtccgcggcagcatcagcaggggcaacgtctgcgtcgccggcgacgccttccacccgacgacccccgagctcggccagggcggctgcgcggcgctcgaggacggcgtcgtcctcgcccggtgcctcagcgaggccttcctcgccgacggcgccgagcacgacccggggtacgaggccgtcaaggcggcgctggagaagtacgccgaggagaggcggtggcgcggcatccggctgaccacggcggcctacgtcgtcggcttcatccagcagagcaccaacccggtgatcaagttcctcagggagaagttcttgtcaggattgctggcaaaaactatgatcgccatggctgattacgattgcggaaagctatgattctgttcacgagaaatcaagaacccaagaagagaagaaagaaatcagcggtgagcgggaaccgtctttaattagcacatggagcaatcttgtgatgttgttaaccaagcacgagggggcgagcttaaagtccaccgtacaacgtactagtatcacacactcggcagatgctcaaggcaaagtcttatgtacggggaagagtaggagagagtggagagagtatgagaggtagggccgtatcaggggtattttggcagattatttatgtatctatgctttacaaattaacatgttcgataaattagtgatgtatgtagtgaatctccatttgttgaggt

SEQ ID NO: 9011 - DNA, 2431 bp, Oryza sativa
  ref <308>: DATABASE ACCESSION NUMBER: AK106359
  ref <309>: DATABASE ENTRY DATE: 2002-08-28
cactaacttagataagaacaacaacaagaagattgataagaaaaggtacagcgagagtaaaagggctaccaataaggtggggaaacagcatgacctgaagaaaatgctccctttgcatagtattctgaagaaatacacaaagcacacatccgtcaaaatggtcaaggagaaacatggcgacccaaaaggcacagaagtcattgaagtctgccgcaaatcagtgaagcgtgtaaaattctcagaagttaatgatgtgcttggtattaacaagcaaaatatctgcaagctgttctcggatgctttggcgtcatcgtcgtcatcatccacggacatgtccagtgaaggggacaagcacatagctgcagaaagctgtagttctcatatgccggagacagcaactaaagaagcaagcaagagtacagatcatgaggattctcttgagctcaccagcacacagttgtcctccaatttgtttgatctgaatgaggcactgccagaatctactgatttgaactacccatatgtgtcaaatccagaggagccaaatcatgagcctagacagcatgagcctttagactctgatgtgcaagttattgacgaaggaggacaaaaccagcaggatctgtctttggattcacatggacttcaatgtcagtccgttcctgagtctgggttagaaagagctagaagttcaatatcgccaggcacatttttgcacggtgagttcatggaagtgtctgacacattttttgttggttcttcacggaagttgacagaacttgctgagtctcatggtgattgtagtagtggttcggttaaagatgctatgacaaaggggaagtcaccttgtgcattgcccaatcatacagttcaggactcatttcagcagcaccagaggtattatgccttcaatctgaatcttggaggcagtcagccctccaatgaaggggaagttcctccccaagactgtaatgcatctgccggagcggcttcaagttctcatgctgaaatgggtgtgcagcaggggtgtaggcctgctccaggacaaactgtgcgtctaatgggcaaagatcttgcagtatctacaaccagaggagagtatgtgtctgggacacattcctatactgaagaccatcccacaaagttgttcttggaattgccgcgacaaggacggccttatctctctttacaagctcaaagtgtgcccaatgtttcagcaaattctgcaagcccaagtcaatcacatatcaggtacactgccccacagaatttgagccactcattccccatggccaatgcattatctggagatcgattgcaatacgacgatcggttcagctacttgtcaggctcacagcaccatggaaatgttctgctggggagtccatcacttacaagtcatggcagtgcagcgctccgtcagaatttgccgtatgtttggagccgttactctgatccttcttcatccagtactgcatcaccctcagcaccaattttgcctacgacggcacagcatgtgacaccatcttcagtttatcatgctaatttgcctcggtcatatggtgtggtctcagctggatcgtcggttcacccccacaactctccaagctttacattcactcgtccaagacggatagttgaagaagcttctggcagcagaagagatgcagcatgtccatctagaaatgcagaaaatgttgctgcaagagctgccattcctgaaatgcctagctcttcctctggtggccggcatgcgcgaagaactggtccgatgaagctcactcctggggccaagcatatcctgatgccgagtgacaccacaggggacggcacctccatgccagtgtactcttgtgtttctttcggaagtaagagtggaaatgcttcagcaactcgcaacatgggagctgggctgtacaagttatagtccaaataatgcttaaacttggacatgtttttcctgagctgttgaggaggagtaagctgtaggttgaagatgggtttcgtctttgcgcacggctgcctgcatcaacactcatgtagagtaggtggtcaatccaagaagatgatgctgctgctgctgcatagtgctataaaaataccagcacataatgctgctggcctggactagtctttcactatctttgtactcccaattctcaaacagatagctttgcaattgagtcagggagagagatggctgggagagaggatggagcagcagcaggagccatggaagaagggcaagacagcaaggaggtgaacgtgctcttcgcagggtatgtgttgaagtaaatcataaaatttcacagttaactacgtgctgttgatgccgcattagtagtagttgttcggtattctttttcgtttatgcttatacttatcagccacagtttgaatttttaaaattaaatttgaaattaattttgtg

SEQ ID NO: 9012 - DNA, 1775 bp, Oryza sativa
  ref <308>: DATABASE ACCESSION NUMBER: AK106360
  ref <309>: DATABASE ENTRY DATE: 2002-08-28
aaccaaacaccttgtgggcgcgacctcgccgcgctcgccatgccgcctcccctctccttcctccacctcgccgccaaccccacccccctccacgcctcgccgcttcgccgcgcccgcctccgccaccgcctctccctccgcacggaccacccgtcccggcgcgccgtggcgtcggcgtcggcgtcggcgggcgagaacccgtccaccccggggggtcctatagccgacgtcgagatggtccgtggcaaggacggcgtgtggacggcgcggccgccgacggtggtggtgctgtgggacctcgacaacaagcccccgcgcgggccgccgttcccggccgccaccgcgctccgcgacgcggcgtccctcttcggccgcgtcgtgtccgtctcggccttcgccaaccgccacgccttctcccacgtccccgcctgggtcgccgacgagcgccgggagcgccgcgccatggaccgcgctgagcgcgccggcgccgcgtccccgcccgtcccttactcctgcgccgtgtgcggccgccgcttccccacccgccccgacctcacccgccacttccgccagctccaccagcgcgagcgcaacaagaagctctcgcgcctccgctccctcaagggcaagaagcggcagaagttccgcgagcgcttcatctccgggaacaccaagtacgacgacgccgcgcgggagctcctcacccccaaggtcgggtacggcctcgccgccgagctccgccgcgccggcgtccacgtccgcaccgtctccgacaagccgcaggcggccgatcacgcgctcaagcgccaggtgaagcattccgtggcctgcggcgttgactggctcgtgctcgtctccgatgactccgatttcaccgacactgtgcggaaagcgcgcgccgccgacttgagaacggtcgtggttggcgatggttgccgtgctcttggaagtgtggctgacatttggttgccatgggaccgcgtcgagaatggggaggttgatgaggacatgctgcggaatgggacacatatgggattcagagatgaagaggaagatgagcaagatgatgatgagttcatagtggattgggatacgagtgatttggatggtgttgtcgatgacattgtcgcgacgaggaccaagttgttcggtgctacaacgatgtctgcatttgctgatgaggaaattatggatggcatatcgggtgttgggataaatggcggtgacatgttatggagtagcgacgacgaggatgaggatggttatttttgagattcatgtagattgacaggacttgtgttgtactgctatcagcaaaccaaaaggcatcatcgcatcgacacaaacacagctgaaaaagaacggccatcttctaacatgcaggctgcaaattctgaataacatcatcctgttgggcacttgggctgtagctgaagctggagaaagaagctcatggtttgagagttggagaagctggctgcacatttcacatgagaatcgcgtccatttcaatcaggcacacaaggttaccttccagctgatttcgacgaagaaacaactgtatgagcatgtttgtcgcggcgaggaggtggcagccatccgagtacaagaaagtaattcctacctctcctgccggagaagctcagctaaaattgattagaaacacgagatgtcgggatagttcctggatggcattgctgaacatggatgcactgacatgcatatctcgactattagctgatgtattgagtagagtaaagtattacaccgagggc

SEQ ID NO: 9013 - DNA, 1365 bp, Oryza sativa
  ref <308>: DATABASE ACCESSION NUMBER: AK106361
  ref <309>: DATABASE ENTRY DATE: 2002-08-28
cacagccaagggaacgggcttggcggaatcagcggggaaagaagaccctgttgagcttgactctagtccgactttgtgaaatgacttgagaggtgtaggataagtgggagccctcgggcgcaagtgaaataccactacttttaacgttattttacttattccgtgagtcggaagcggggcctggcccctccttttggctctaaggcccgagtccctcgggccgatccgggcggaagacattgtcaggtggggagtttggctggggcggcacatctgttaaaagataacgcaggtgtcctaagatgagctcaacgagaacagaaatctcgtgtggaacaaaagggtaaaagctcgtttgattctgatttccagtacgaatacgaaccgtgaaagcgtggcctatcgatcctttagaccttcggagtttgaagctagaggtgtcagaaaagttaccacagggataactggcttgtggcagccaagcgttcatagcgacgttgctttttgatccttcgatgtcggctcttcctatcattgtgaagcagaattcaccaagtgttggattgttcacccaccaatagggaacgtgagctgggtttagaccgtcgtgagacaggttagttttaccctactgatgaccgtgccgcgatagtaattcaacctagtacgagaggaaccgttgattcacacaattggtcatcgcgcttggttgaaaagccagtggcgcgaagctaccgtgtgccggattatgactgaacgcctctaagtcagaatccaagctagcaagcggcgccatgagcggcttcctcggctcctactactctttccctaccccctctgtttccgtggccaccgtcccctcctccacctcctccgcgccgggcaactactactcgtcccacggcggctcgcaccagagcatgtcggcggcggaggagtggaactgggagaacgccctggtctacccggcgacggcggcgtcatggtcggagtcgagctatcaccaccacccgccgccgccgcacacgcagtagccgccggattctgtcctgctctctttcgcttctggaagaataaggtaagcacggacggctgggatgagacggagagacggagatggacgtcgcagattgtctgatcgcgttctgctctgatcttttttcttttgttcgttgattagatttggtggtatgggaatatgggatgcatctccattgttttctcttttttcttctttttctttttctttgatcatgttttgggtgcaaattagaagaggaagaacgatgagaggactagatttgttagatggatgtaaaagcatgcattctccgagttctttatgagagagtaatggttggtaac

SEQ ID NO: 9014 - DNA, 1569 bp, Oryza sativa
  ref <308>: DATABASE ACCESSION NUMBER: AK106362
  ref <309>: DATABASE ENTRY DATE: 2002-08-28
caaaacgaattgctcccggaaattctctcccgaacccgatttttttattattcccccccgatatcctgatccggccgccaccgccgcctccgccccctcgccgccgccggagccccgccttgaagcggaggagccatcccgcgctcgtcggaggcaccggtgtgtgtgtgtgtgacggcgacggcctcctccccgcacgcgcacgtcggcgagaaggtctggtggggcgacgcgcgcggcctccgtgtctctcggcttggattggaatcgaattgaagatgctggaactggagctgtcctataggctatagaaagagaaatttattcatgtagtgtaatacatatgtttggatccgtgtcggcgtgataaggaatcgtgtcgaattggtaccagaaggttgaaaagatggctgatgaggtggcttttgagactgccaggaagatcatcatgcacccgctttatacgccgaggtcttcgccgtggcttgacttgaaggtgttctatgtaagggtgagcaattgcgaggtggatgagtctgcgccggaccgtctcacgctcaaccacatcccgctgtctcccgatacggttatcgaggtgaatggtcagcggagtagcatgcacaccgagttcatctcttcatccctcaggagggacagggttgacaaaatgaccgaggaggctacattcgtgagcacagatagtataaggatgacagggagtgtcaggtttcaggtgttcgataagaacgatctgctgctcacaggcgacctagagttgtgcagtgccaatggagttgtcggggaatcgaagaacagcagcaagagatggaatatgaagtgccaaccagcatcatcatgcaatggttttctcaaggggaagccgtccacagcttcagagtctgtacatcctgtgatagaggtttatcttgctggcactttctgtggcacacctattatattaacaaagactgtgcagcatatatcacggaggaaatcccaaatgaaactaaagcttgattccatccctgagaatgaggcaactgaacaacaaaaagaagagttaaatgaggactctttgcaggtacctgctaagcatgtttgaaagtttttatttgtctacaatctcaaactccccatttagggttttaggtagtctatagtctcatatttgggaggtgatggatagctttgaattcaagagactccttttccccctaaaaagcagtgaggcaactgtgcataagaaacagtgaaatagtttgagcatttttttgcagcatgttagtttagctaagagccaactacagataacatatgtttcaatatgaggagtataaacagacccttttaaattttccaatgcatatacgtgttgttatgcaagtttctgtgaaaacaacactatatcaccatagccatgtcatttcccatgttctcttttacaaggataacagagagactagaatcagtctaggaacagttgttaatccttatataagctcaattatcagtacttgtaccatattcatatacagtgcaagttgcaaaatacatggagggtgtgcacgc

SEQ ID NO: 9015 - DNA, 1571 bp, Oryza sativa
  ref <308>: DATABASE ACCESSION NUMBER: AK106363
  ref <309>: DATABASE ENTRY DATE: 2002-08-28
gaggagcctcctcggtgtctcccgatccgccgccgccgccttctccggcgatccggcagccgcatcctgaacgctcgccttcccgttgcccccgccgcctcgccgcggcgccctcaccgccgcccaggcctgacctccaaacccgggaagccaccctctcctccatccatggcgtccgccgccgccacctcgtcgtcggcgtcccttcgcctcctcaccaagccccccaagcccctcctctccaagccccacctcctcaccctctgcgccccggtctccttccagcgcctcgtcgccaggtccagcgcgtcgccgaccccgtccccctccgccgccgccgccgccgccgccgcctcgggctccggggtcgatccggcgcaggttcccccggcgctgcgcgacatcgtggcgctcttccagtccgtgccggacccgcgcacacggtacaagcagctcctcgcctacgccgcgcggctgccgcccatggacccggcgctcaagaccgacgccaaccgcgtccggggatgcgtctcccaggtctgggtccacgctgcgccggaggagggcggcgcgccgggcagggtcagcttccaggccgactccgacgcgcagctcaccaagggcctcgccgcgctgctcgtgctcggcctctccggcgcgccggcgcgggatgtcgccatggtgcccgtcgagttcatcgagctgcttgggatcaggcagagcctctcgccgtccaggaacagcggcctgctcaacatgctcagcctcatgaagcgcaaggccctggaggttgccaccggtgaggtaaccactgaggaaattggcagccaagaagtggtccaagaggtcgctgaacggcctgctgcgaaggagaaggaacccgagtttgcggctttcggtgcgcgagaagaagagggttcagaggtgcatagcccacaggaggaacaattggaggaaatgccagctgatgtgatggaagggaatggtggtttggggggtgggaggcaggagaggataaaggagagccttgagcgcgggctttcgccggtgcagctccagatcgaggacatatcgcacctccataagggtcatgctggggtgtcaggaagcaatggcgagacgcattttaatgttcgggtggtctcagaggcgtttcaggggaagagcctgctcaagaggcacagggctgtgtatgatcttctgcaagatgagctcaagaatgggttgcatgcgctctccattgatgcaaagacaccatcagaagtctaggtatctgcacgactgcatatacagttaacagagacgccatagatgcatttttggtcatgttatctttgtaaggtttagttttggatacatactgtagattttgaaagatcaaagcttctcagttctgataattttgtctttttactgcaataattagtgccttaatattatggcagagatacacatgaattttgtcatgccagaataagaaggaacgacttgttttattgagttaatatgtatggctcactgatcaatcttgcatgttctattagcaaaaaacagaaagtgattaggctgtt

SEQ ID NO: 9016 - DNA, 569 bp, Oryza sativa
  ref <308>: DATABASE ACCESSION NUMBER: AK106364
  ref <309>: DATABASE ENTRY DATE: 2002-08-28
aaatccatccatattagcttccaacacaaggagatcacaacaatggccacattgctattgtcaagcaacaagaagccctgcagctcgtcgtcgtcgttgctgctgcttgtgctgctcctcctgctcgtcttcttcgcgcaccacggcagctgcagcaggcctctgcttctcccgtcgccgacgacgccgatgcagccgcagctgaagcacgaatcggagacagcatcagcagatacgacgacgaggactgaagaacaagtggtgcagcagcagcagctgtcttggttgagaagtatgaagcccagaggaaggccacaaccatccagccccagcaagcgcacaaactagcttagctagctgctcgtacttgccatcttcctcttcctcctctgtaggctctcgatcttagttgtgtatgtatgagtgtatgacacaggctacttctttttcttgtttctttttatctgttgatttgttggatatacagaaactatgtacatatatatatacatgagatcgatttgctagctagttcgcaacaactaatggaacgtttttctttggttccc

SEQ ID NO: 9017 - DNA, 1457 bp, Oryza sativa
  ref <308>: DATABASE ACCESSION NUMBER: AK106365
  ref <309>: DATABASE ENTRY DATE: 2002-08-28
ttttccaagaaaccaccaatctctctctctctctctctttctctctcgctcgcggcggagaggaggagcagtctcccatctgcggcggccggcggcgtgcgtgcgtgcgggtggctggtgttgtggattccgtttccgatggacgacgcggtggagacggccgccgagattctggtcagcttccagaacaggaggctggtgcggtggccggagtgggttccgcggccggatgagaagggcgccgccgctgaggagaagaagttgccgggatggaaggaccggcggaagcggacttccaagtccaaaccgccgccggccattttggtgtgtggcctggagctgagggattccggcggggagaaggcggcgtcgattccggccccgctcccgccccccgcgaggaagaagatgttgttcaagatgaaggtcaaggacgagccgacggcggcgcgggggccggagacgccgccggagtacggggccggcgcgggatccggcgcgaatttcagccgggatggcgtggcgaggcctctgccgccacgcgcggtggtgaaggccgagccgacgccggcggcgcggatgcccgagtcgccgccgtactacgtcgcggcggccggatccgccccttccacggccggcggcgaccggcgtccgcgtcctcgccccgtcgagagggcgcacgtcaagacggtcctcgcggcggcgaaggaggccatggaggcgtctagcccagagacccctctggactacgccgccaccaccggatccggcgcgtcctccagcggcgacgagtcgtcgcggaagcggaaggcggcgccgggggcgggcggatccggcggcgcctcgtcgagcggcgacgaggggtgcagctcaccggagaagcggccgtgcctggtcgccggcggcggcgctcagaccgccgcagcggctaaagcagagggggaaaagtttgcggattcgatgaaccgtaacgacgatggcgtgcttctcttcgacctcaacgaatgtgtggataattgcgaagattggtcctaatgggagtctttgctagtgttcatcatgcctagatcaatgtgggagtttttgctaacatatccgcgctccgtcgggtaaaaaataaacccaaaattgtgtacataaaaagggcaaagccagtaagtagagcagttgacaagagctggagggctttgccttttctttctagattatatattatatgagtagatgataaggtgggcttaggtggtttcattgaatttgtcaggttagtttctagtcagccttgttcattgcactgctcttgatcatatcttattattctactggctctctcattgcccagtgccctctgctgttgccttcagatcggtgtaaggcatctctgttttaatcttcacttcaatgtggaactgatacagtgcaagaacaatatatttacatacattttgttctttgtt

SEQ ID NO: 9018 - DNA, 1457 bp, Oryza sativa
  ref <308>: DATABASE ACCESSION NUMBER: AK106366
  ref <309>: DATABASE ENTRY DATE: 2002-08-28
ctttcccctccatggcctcccgtatcatcgccgccacctcccctcgccgcgcgttaccgccgatctccatcccgatgccccactccgtcctcttgtaccggcagttcgtctgctgctccgcgaagaagggccagctcagcatcggcacgccggcggctaggctctccagtgtcgagttccacccggagtgcgtcaggaacacgcccacggcgtcgtgctcgaggactttctcctgcgggcaccacgccgggaggacgccacggccctcgacggcggcgtggaactccggcggcagcgcggcggcgtcgccctctccccccttgacgaggtctgggcggacgacccacacgaaggcgtagccgctgtcggcgagcccccacgcgaactccagcagctgctcgctcgtcatcaccgcgatgctgccgtagctcacgtacacgacggagctgggccggtggccgtcgagccactcgaggaggccgtcctgctccttccagaggttggaacccacgccgtgcagcgggcttccggtggggacggcgcggcggacgtggaggtggagcgggccgacggcgtagaccggcggcgggaggacggcgcgcatggcgtcctgcgccggccgctcgaggtcgtcgaaggtgttgaggatgacggcgtcggggagggacagccgctcggcctcgcgcatgatgaagttgagcatcacgtcgccgaggtccgtggtgcggatgaagctggggtagtcgcgcagctggacgccgtcgcacatgccgcgggcggcggcgccgtcgaccaccgtgtcgaggtacccgtcggtgagctgcgccgcgtcccggagcggcaccaggccacggtcgatgagctcgcggtagaggcgacaccccacgaagccgcaggcgctggccgtccacagcgcggcgcacggcacgccgatcaccctggcggcgtcgtacgcgaacgacatgaggccgtcggcgacgaggcaggtgaccggcggcgaccccgacgccggctcattgagcctcgacagcagcgcaaggaggtggccgaggcagttcgtcatggtggactggcacagcgcggggatgtcctgcgtggcgtcctcgtcctcgccagacatcgccggtagcccgtcggggatggcggcgaagacgaagcccggcacgccgtcgagcgcggcggcgccacgggaggcgaggaggcggcggtggttgaactcggtgttgacgaaggtgacgtggaagccccgggcgtggagcagcttggcgaggtgcagcgtcggcgtgatgtcaccctgcgacgggtacggcacgcacacggcgtgcggcggcttgtcgccggtggcgcccatcgccgatgccattctatgcccgttaattagtttgcagcagagaaagagagatcgctagctgttcgtctggtaatggggagattacattggagtctgttttatagtc

SEQ ID NO: 9019 - DNA, 1780 bp, Oryza sativa
  ref <308>: DATABASE ACCESSION NUMBER: AK106367
  ref <309>: DATABASE ENTRY DATE: 2002-08-28
gctctagcccctctcttgttcaaacaccttcatctgaatctcttgagcctgaattttcccaacacaagcaagcactacaattgagctaagctatagcacacacacacacacacaaaccctgaattcccacttcctaagttcctatagctaagcatatagtagccacaaggagctagctaattcttattagctatagctccagatccctcacaattctaaatttccaatcccaaaagacccaattaaacaagagatagttgcctcctaatccatataataagccctcaaattaactggtagccatatactatcaatagtaacaaggcagcacaagcagcataccataagcatacatcgggtcaaagccgaggtcaagtccaccggcaggaggacaagccggcggccggggcccagaggaggagctgaggcatcatcgatcgatcgatcggcatagtgcacgtacatggagtccatcacgccaatcgtgaggccggcatcggcggcggcgggcggcggcgaggtgcaggagagtggtgggaggagcttggcggcggtggagaaggagcacatgttcgacaaggtggtgacgccgagcgacgtggggaagctgaaccggctggtgatcccgaagcagcacgcggagaagcacttcccgctggacgcggcgtccaacgagaaggggctcctgctcagcttcgaggaccgcacggggaagccatggcggttccgctactcctactggaacagcagccagagctacgtgatgaccaaggggtggagccgcttcgtcaaggagaagcgactcgacgccggggacaccgtctccttcggccgcggcgtcggcgaggccgcgcgcgggaggctcttcatcgactggcgccgccgccccgacgtcgtcgccgcgctccagccgcccacgcaccgcttcgcccaccacctcccttcctccatccccttcgctccctgggcgcaccaccacggacacggagccgccgccgccgccgccgccgccgccggcgccaggtttctcctgcctccctcctcgactcccatctacgaccaccaccgccgacacgcccacgccgtcgggtacgacgcgtacgccgcggccaccagcaggcaggtgctgttctaccggccgttgccgccgcagcagcagcatcatcccgcggtggtgctggagtcggtgccggtgcgcatgacggcggggcacgcggagccgccgtcggctccgtcgaagcgagttcggctgttcggggtgaacctcgactgcgcgaattccgaacaagaccacgccggcgtggtcgggaagacggcgccgccgccgctgccatcgccgccgtcatcatcgtcatcttcctccgggaaagcgaggtgctccttgaaccttgacttgtgaagagggtacggccgtacacgtacacgatctctgctactttatgcttcaattctgctactacgtactgacacaaatggaaatcgtcgacgaagagtgtgaccggagaagtaaacaaaggcggcgatggcggcgcgcagcggcggcggtggcggcggaggtggaggcgcttggagcatctagcgccttcgtatttcgtatatagctcatcatctctcttaaattagtcagtgcagtgtgagggggaacagtttaagaaaaaagaacgaagcagcaacgtacccaaaaaaaatattctttctaggttgatggttttttcttgcttcgatttgctttgcctttttctcttgtgcttaattataattaagttttcttagctgctcg

SEQ ID NO: 9020 - DNA, 1383 bp, Oryza sativa
  ref <308>: DATABASE ACCESSION NUMBER: AK106368
  ref <309>: DATABASE ENTRY DATE: 2002-08-28
gcgatccacccgcgcgtcggcccgctcgagcccaattacggccgcgtcggcgaacgggatggaggaggtcccgccagttcgcgcccgcagccgccgccgcgtccgggtcagcgacggccgccgccgccgcccttgatgcgcctctactccaagctcgcggcgctgctccggaggtcccgcgggcccgctgcgggcgcgcgtgtgcatcatcgggagcgggccggcggcgcacacggcggcggtctacgcggcgcgcgccgagctcaagcccgtgctcttcgagggcttcctcgccaacgacatcgccgcgggagggcagctcaccaccaccaccgacgtcgagaacttcccgggcttccccgacggcatcctcggcgccgacctcatggaccgctgccgcgcccagtccgtgcgcttcgggaccaggatcctcaccgagaccgtcaccgccgtcgacctctcgtcccgccccttccgcgtcgcctccggcgacaccgtcgtgcacgccgacgcggtcgtcgtggccacgggcgccgtcgcgcgccgcctccatttcgccggctccgacgcattctggaaccgcggcatctccgcctgcgccgtctgcgacggcgccgcgcccatcttccggaacaagcccattgccgtcgtcggcggcggggactccgccatggaggaggccaacttcctcaccaagtacggctcccgcgtctacatcatccaccgccgcaacgccttccgcgcgtccaagatcatgcaggcccgggccctctccaaccccaagatccaggtcgtctgggactccgaggtcgtcgaggcgtacggcggcgccgacggcggtccgttggccggcgtcaaggtcaagaacgtggtgagcggcgaggtctccgacctccaggtcgccgggctcttcttcgccattggacacgagccggcgacaaagtttctcggcgggcagctcgagctggactccgatggctatgtcgtgaccaagcccggctccactcacaccagcgtcaagggagtcttcgccgccggtgatgttcaggacaagaagtatcgccaggccattactgccgcgggatcaggttgcatggcggcgttggatgcggagcactacctacaggagattggagcacaggaagacaagactgattgactatatctgggacaagcaggtcgcagttcttcagctacttcatcgtcggtagcaagagctgcactctaaggcacaaagttgttaattgtggttgctcaaccaaagaaaaacagattggtatttgtctgtaggcctcagattcatgatacgttgttagaaaaatgattcatgtgagcactcagaaacttgtgttacaatttcatcaaattatgcacacttcatgg

SEQ ID NO: 9021 - DNA, 1449 bp, Oryza sativa
  ref <308>: DATABASE ACCESSION NUMBER: AK106369
  ref <309>: DATABASE ENTRY DATE: 2002-08-28
gagtcaaacatatattctgtcaagcagcatgcaggtgttcttgataataaggagaagcttaaataggtgcagtgcattaacaaagaacgagacattatttaacttgttccaggtatttcaaagagtacttaaagcctatgcatcgaagttatatgccagattaccaaaaggtggaactgggattgttgcagctgctactggtactgatgggcagatcaggacctccgacagggatgagaaaatgatatgctatattgttaacactgcagaatattgtcaccagacatctggtgagctagctgagaatgttgctaagatgattaacccccactttgctgacaaagtggacatccctgaagttcaggatgagttctcagctgtgatcatgaaagcgttgatgacacttgtacatggccttgaaaccaaatttgatgctgaaatggttgcaatgactcgcgtgccatggtccacccttgaaagtgttggcgaccaatcagaatacgtaaatggtgtcagctctattctgtccagcagtattcctgtgctcggtaacctgctttcaccgacctacttccagtatttcctggacaaattggcagcctctcttggacctcggttttatctcaatatatacaagtgcaagcatatatcagaaactggtgcacagcagatgcttttggacactcaagctgtaaagactattctgctagacatcccatctcttggaaaacagagtaccgctgcggctagctactccaagtttgtaagccgggaaatgagtaaagctgaagcactcctaaaggttattttgtcaccagttgactctgttgctaacacctaccgcgctctcctaccggaaggaacaccacttgagttccaacggatacttgacctcaagggattgaagaaagcagaccagcaaaccatactggaggacttcaacaagcatagccccgctatcaaacaccctgccgttgctccaacagttgcaccaccagttgccacttcatccgcccaccacattgcaccggtcaccaccccgaccgtttcgaccacaccaagcatggctaccttgacaggagctctggccaaccgggaggacgtgctcgcccgcgccgcggcgcttgggcggggcgcggccactacagggttcaagaggttccttgcgttgacagaggcggccaaagatcggaaggacgggccatttcgcaagctgttcaatgcttaggctttttttattattattattttgctcgtgcttgttgttcatagtttgcatctcctgcagtgcacatagatataggaaattttcccccacacacataaccttcggtgtataatgagctaacattttgatcccatcttgcggagtacgagtaattgaattgtattggaaaaaggtatcatcatagtttcagtaataatagtaggttctgttgttttgtttgt

SEQ ID NO: 9022 - DNA, 2188 bp, Oryza sativa
  ref <308>: DATABASE ACCESSION NUMBER: AK106370
  ref <309>: DATABASE ENTRY DATE: 2002-08-28
aattttatcccccacacactccactccactccactccactcttttcgctcgcgtcgcttcccaaaccctctctctcctcaaaaccctagcgtcgcccgcttcgcctgagctccggcgatggacggcggcgaccgcctcagcgcgctccccaacgacgtcctccacctcatcctcctccgcctccgctccgccgaggccgccgcgcgcaccagcgtcctggcccgccgctggcgccacgtctgggccaccctcccggagctccggttcaggatggacgtcagcctcgccgcccacgcggccccggccctccgccgcctcgaggtctccaccgacgcggacgacccggcggcgtcgacggccgcgctccggctcgccgcgccgcgcgtcgccggcgaactcagcttctgcatctggccgcggtgggacgacgcgccggaggaggatgacgggccggcgccggtgaggcgccccggcgtcgtcaagctcccctgcttcgagaaggccaccgagctctggctaatcctcggcctcctcggcgtctcgctgcccaaatccggcgtgttcgcgcagctcaccgcgctcgccttccgcgacgtccgcttcaccggccgctgcgatctcggcgccgtcgtctcctcgaagaggtgccccgtcctgcaaaagctccaagtccacgactcccaggatctgtataacctgaccatcttctcggagtccctcctccacatcgagctgagcgacctccatggcgggatggggcggctcatgatcgtggcgccgctgcttcgggttcttgatgtgcgccattgcttctactggaggacgtacaggtcccattcccttgttcgggatcaaccatatgccgcggtcttcacgcccgcgctggaggatctcatctgggttgatgcgtatgatcctaccacggtccaatttggcggcgttaaacgcctccggaagctggttacccaattacagtgtatggactctctcgctgcactgatcacatgaattcagtaatgctcttgcggcgatttgagacggtatccattcttcagctagaacttgactatccagaggtaactgcacattttccctaaatctggcatgaatgtcattgaataaaacatagagattgaaatatttgtttggtagactctagtcatagtgtgcatggacttcattcagatatataccttcataagtattgacacagctgccctggtgaaatgtgttagatatttatcttttatgtattgaaacaattgcccttggtgatgtgaaaaatagcattttggaggtcctggatctgctatcgcactggtactgaacatatgagatactgaggaacggtattgatcaaccagatttagccaaagaagactagaatttgagtagtctgtcccacaaacaggaagtgggctcagttttggttctatgcatgaatggtggaatatagagtaagacactgcagttatttgatgctgttctgcctatgtaaaactcccatttgtcttgctgtgctcaagtcttgtagctgtcagcttcttgaggctcttctctaaattatcatcattgggactcgcatgtttattaaccatgtttcaattgttagcttgaaaaatccagttttctatcagttgcatttacgaagtattatagtttgtacatttcactatgcatggtaaaaattaaaattaaaattatagtttgacgcccataatctgatattaccttttagtagataatccctccagtcttgaatatttgacattccaaacatacatttggccaaacttttgaaagtttcaccttttgtcttttcccgtgtttacaagaccatgttgattatccaaatgacaagatatgcagtaggcttgtatgaagaccctgatagaagatcttaactaattaaaagattagtatttttccaatcgtcaccaaaattagtattagtatttttcgtccgtatgtgcaatttttttcactcgtccgtgtacgatctcctcccaaaattttggttcattagtacacgcgagatcgagagaccgcatcgctcccgtcccgtacgcgcgtagaagcccagaactaatgcacggaaacgaaagaaactgaatcacaaatccaacaacaataaagcaaaaccatcccaaaaattaaatcaccggggccaaaaaaaggaaaaaactgc

SEQ ID NO: 9023 - DNA, 1853 bp, Oryza sativa
  ref <308>: DATABASE ACCESSION NUMBER: AK106371
  ref <309>: DATABASE ENTRY DATE: 2002-08-28
agcgatcacccaagcaacttctcggctctctccctcggagaagatggggtttctgccgggcgacgacgacgggccggcggtcggcatcgacctcgggacgacgtactcgtgcgtggccgtgtggcggcgcggccgcgtggaggtgatccccaacgaccagggcaacctcaccacgccgtcctgcgtcgccttcaccgacacctggcgcctcatcggcgacgccgccttgaaccaggccgccatgaatcccctcaacaccatcttcgatgcgaagcgattgatcggccggcgattcagcgacgtgtccgtgcagggagatatcaagctatggcctttcaaggtcacctccggcaaggacgaccggccgatgatcgtggtgcagtacaggggcgaggagaaggagttctccgccgaggagatctccgccatggtgctcttcaagatgaaggagaccgccgaggcctacctcgacaagacggtcgagaaggccgtcatcaccgtgccggtctacttcaacgactcccagcgccaggccaccatggacgccggcgccgtcgccggcctcgacgtcctgcgcatcatcaacgagcccaccgccgccgccgtcgcctacggcctcgacaaggtggtcggcagcagcgacaagaagaagagagtgctgatatttgacctcggcggcggcaccctggacgtgtccgtcctcaacatcgaccccggggtggacatcgacataggcatcttcgaggtgaaggccaccgccggcgacacccacctcggcggcgaggatttcaatggcaggatggtgaagcacctggttcgggagttcctgaggaagtacaagaggccggagatcaggggcgaccagagggcgctccggcggctgaggacggcgtgcgagaaggcgaagaggatgctgtcctccacggcgcagaccaccatcgagatcgactcgctccacggcggcgtcgacttccacgcgaccgtcacacgggccaagttcgaggagctcaacatggacctcttcctcgagtgcatggacaccgtcaagcagtgcctccgcgacgccgggacggacaagggcaccgtcgacgacgtcgtgctcgtcggaggctccacccgcatccccaaggtgcggagcctgctccaggacctgttcgacggcaaggcgctctgcaggagcatcaaccccgacgaggccgtcgcgcacggcgccgccgtcaaggccgccctcctcaacggcgacgccaacgagaaggaccttcgcgacgtggtccttctcgacgtcacgccgctgtcgctcgggatagaggtattcggtggcgggatgtcggtgttgatcccgaggaacaccaccatccccgtaagcaggcagaaaatgtacactacccactacgacaacgagaccgccgtgctcatcaacgtgaacgagggcgaaggccgaagaaccaaggataacaacccgctcggcaagtttgttctcaccggcatcccaccggcgccgaggggcgtgccccagatcaacgtcaccttcagcattgattataacggcatcatgaacgtgtccgcggaggacaagacgacgggacgcagcaacagcatcaccatcaagagcgacaaggggaggctgagcaaggaggagatcgagaggatggtgaagaaggccgagaagtacaaggccgaggatgaggaggagatgaagaaagctgaaggctatgtggcaccctaaagagaactatatttcttctgcgtcttctgatcatgcacgggcatatgtatggccctaacatgtgccttgtttatgctggaagttggaaccatggcttagttggtgatatggtgggagcatattattg

SEQ ID NO: 9024 - DNA, 1330 bp, Oryza sativa
  ref <308>: DATABASE ACCESSION NUMBER: AK106372
  ref <309>: DATABASE ENTRY DATE: 2002-08-28
caataagttgagtgagaatggaaagcaaagagggcacatcccctatcgtgatagtaagttgacgcgcattttacaacctgcacttggaggcaatgcaaaaacatcaatcatttgcactgctgctcctgaggagattcatgttgaggaaaccagaggaactcttcaatttgcaagtagagcaaaatgtgtcagcaactgtgctcaagtgaatgagattttaacagatgcagctctgctgaagaggcaaaagcaggaaatagaagaacttcgcaaaaagttgcagggttctcattccgaagtgttggagcaggttatactaaagcagcgcaatgacatgcacaagtctgaacttgagcgtgatcgactagcaatggaacttgacgaagaaaggaggttaagggaaacactagagcaccgtttggctgagcaacaaaaaatgttagatggcattagcaataccagcatatcaccagatcagttcactgattctatccagttcgaatcattaaaaactccaacttctaaagagagaccagctgagtttgttgcaagtcgtgcgaactattcaaaggatgtagaattcagcccaataccagaaaatttagggactgtagctgatgaggacctctggatgcagctgaacaaggggtgtgttactgatctcgaaatgcttgagatgacacctggtttcaaatgtgcgccatccctggcagatgataaagcatcagttgcaactccagacgaggaaccaatcgacgcaagatgccaaaggctagagaaggactgcaccgccgataggcagcagctggaggattcaaaggcgtggcgcgcggcgctcgaggaggagcgcgacacgctgaagagagaaaactcgtccttactggatgcgctcgccaaggcgaggcaggacgccgaccatctcgtcgccgacaggctggaggcgctcagggagctggacatggagaagagcaggatggatgagctcaagcaggagatcaagctcttcagccaggccttctcgctgaggcaggggcagctcacctccctgtacaccaagtccaaggccattgtggagaactgcaagacgtcccagttggccttgccctgatgtttcttcctcttcttcttcagcagcaactgcagagaagcgtgttacgcattcgatccatctgcaaccaattcttaaattgcagattgtgtagtgtatttgtttgctgtacgtgtgtgctggattagattgcgtggtattacgagccgtgtgcaaagctcctgtgaagtagtagtgtataccgaaaaaaaaaacattgctattgtttgtgatttggaggac

SEQ ID NO: 9025 - DNA, 1257 bp, Oryza sativa
  ref <308>: DATABASE ACCESSION NUMBER: AK106373
  ref <309>: DATABASE ENTRY DATE: 2002-08-28
gtgaatcaaacagaagccaacggtgccaaaaaaaaaaaagaaaaaacagagagaggccaacgagcacaaggaagagcagagttctgaggcggtgagccccaatgtctcgagttattcggaacatcatcgtcgtggccatgggcgcgggcgctctgggcggaccagacgcgctgcgtctcctgcttgccttcgccgggaagagccccctcgtcgacatcctcatcgccgtcttcgtcatcgccgcggtcaccgcgcccgccctcggcaccatgcttctcgcgcgcttcttccgcaaaccgcgcgctgtgcccggcgcggcccgtgccgggcgcggcgcagcgggtgcggcggtcgctgatgacccgttcgcgcagatgacgctggtggtttccctggccgtcgcgttcctcgtctccgcgtccctgctcgtcctgccattgttccagtccgggcacctcgtcccgctcgccttcgccggagtcgccctcgtcgtgggcgcctgcgcctcgcgcgtccgcggcgtgcttcttccgaatgcgcacggtggagccggcgccggcgccacccctgccgcgaccgccacggagcgcggtatcaagccgaccctttcggtgtccctcgccgccatctgcctcgtcctcgttgccccttggcgcctcgcggtcggcatcctcgacgcgccatcgcagcgcccccttgctccgcccgccaccgtgcccgtcgtcggcgtcgccgctgccaccgtggtcggcaccacgatcctcgtcctccgcttccgcaaggcgaaacatgcggccgcgacgccggacgctgccacgacgccggccacggaacgctcccacaagatggtcatggttacggccttggcggttgccttcttcctcgccgtcccgctcgtcgtcgtcgtcgacgcatgtccgcgtcgtgtcttcggctgcgcctgttgactctgaagattcacatcgcccgatcgccgtgaccgagtcctgcactggcgacacgagtggtcgagtgctacttgtttttttctgttttcttgagggcgtaatactaaagtggtgtgcgtttcatccttttgcattttacgctgggagaacgtactcggtactcggtagtgcggtggtgtatgtacacaatgtgctttgggttcgtgtttgcttctctctttggagtagtgtctcggtcagtgggctgaactggatatcatctcgttgaaggaatgggcaagaaatggaatatattagggcgttcacagtg

SEQ ID NO: 9026 - DNA, 1535 bp, Oryza sativa
  ref <308>: DATABASE ACCESSION NUMBER: AK106374
  ref <309>: DATABASE ENTRY DATE: 2002-08-28
aggggtttaaccggtacggccaaaggaagaaaccgccgccccccgccgccgctgccgctgccgccgtcgagaaattcatcggtagttgtaggatgagccgccggtttctgcatctgctggtgaagaaacccacaccgtggggcagcgaggagttcgggctccgccgcatcgacatgtcgcgcttcttcccgccgagaaagccaaccggcgggggcgacggatcggccgccgcagatcgcccgcgcctggcgccggtggcggcagcgatggtggacgcgcagctacctcgcgccggcgaggccatctatagaccccagggccacggctggggcaggtgcggtgcgatgatcctaggtggcggcaaggacaaggtggtcggtgtggacggcgagtaccgcagcttcctgctgatcctgttcaagtgcggcgcccacgccgtccgcctcctcccccacatgcgcgcgaccaagcggtgccccatcgccttcaccgtcggcgacggcgtctacgtcatggaggcggcggcgccggagccggcgcggatgcgcggggcggagcactgcttcgaggcgctcgtccacggcctcccgccggcgccgccgcggggtggcgccaccatcatcgaggactggcactggcgctccctcacggcgccgccctacgttctcgaccccgacggcgacgacgggcccgcccgcgtcgccgcccacgcggtggtccgcgactcccaaatctgggtgtccacggagcggcacgggacgttcaccttcgacacggcgagcggcgcgtggtccaaggccggcgactgggcgctcccgttccgcggccgcgccgagcacgtcccggagcacagcctctggttcggcttctcccctcaccacgacggccacctctgcgcctccgacctcaccgccacgcccccgtcgctgcgccacacatggaggtaccgcccgccgcacaaggattggccggccccggtggcgtcctacctcgtccagctcggtggcggcaggctgtgcgtcgccgagctgttcgagacgacgcgcgtcgaggtgggaggacgaccactcgataccaacaagaaggcttcattgaagacgacgacgcggcgctggggattcaatgccgccgccaccgccggcgaggaggaggaggaggagacggaggtgagggagaggttcgcggtggtgaccggagtggaggtggaggcgtcggcgagcggcaaggcgccgctgcgcatggcgaggcgcgccgtgaggcggtacgtgctctccaccgagacggtcgtcacgcgcgaggccagacgacgcagcagctggcggcgcggccggccgaggaaggacgacgacgagacgctgcactgggtgttctgagctgagcgacgttgcagacaggtttgcagcagccgacgttgttgttgttgtgcgtttggacttgctgctggctgcatttgtgatcttgcgattgtgagtttgtgaccaactgaaccattgctgataatatatccatgagtaaatttaaaaaactgtaacttt

SEQ ID NO: 9027 - DNA, 1522 bp, Oryza sativa
  ref <308>: DATABASE ACCESSION NUMBER: AK106375
  ref <309>: DATABASE ENTRY DATE: 2002-08-28
aacacacacttatcagtcggatccatctcctacaaatgatgctttccttcacctctgctcgtctcctccctcgttgccggcgtctctacagtgcctgcggcgccggcgcagctgcgtgcggcgtcgtcggcgagagggtgaccgtgctgaccatcgacggcggcggcatccgaggcgtcatcccgggcacggtgctcgcgttcctggagggcgagctccagcggctggatggcccgggcgcgaggctcgccgactacttcgatgctggctcatcaccggcgggctcatcaccgcgatgctggccgcgcccggcgaaggggcggacagggacgggcggcggcggcggcggccgatgttcgccgccgcggacattaccccgttctacctcgagcacggcccacgcatcttcccgcagcggtggagcacgctcgccgccaagatcgccgccgcgcgggggcccaagtatgatggccggtatctccgtggcgtggtccggaggatgctcggcgagacgacggtgggcgacacgctcaccaatgtcgtcgtccccaccttcgacgtccgcctgctccagcccgtcatcttctccacatacgaggcgaagaactcgcctctgaagaacgcgctgctctccgacgtatgcatcggcacgtcgtcggcgccgacgtacctccccgcgcactgcttccggacacacgacggcgccagcggcgaaacgcgcgagtacaacctcatcgacggcggtgtcgccgccaacaaccctacgatggtggccatgacaatgatcacggaggagatcatggcgaaggagaaggcggcggcgctgtacctgctgaagccgccgccggaggaggaggaggagcacggccggttcctggtgctgtccatcggcaccggcctgacctccgacgagggcctctacacggcggagaagtgctcccggtggggggcgctctcgtggctgcgccacggcgggatggcccccatcatcgacatcttcatggcggcgagttccgacctcgtcgacatccacgtcgccgtcaagttccagctgctccacagcgagcggaactacctccgcgtgcaggccaactcgctgcgcggtgcggcggcggcggtggacgcggcgacgccggagaacatggggagcctcgtcggcgtcggcgagcggttgctggcgcagcgggtgtcgagggtgaacgtggagaccgggaggtacgaggaggtgcccggcgaggggagcaacgccgacgcgcttgctcggatcgccgggaatctctccgaggagaggacggcgaggatcaagcggcggaacactgtgcaggctggtgtgactgggttttaggagtagtcatgaaatcccatcatgtcccattgctccacgtctactgtatttccgggcgggggccattccgaatttccggtcgatcatctcaaaatgttttttcggttgaaaaattcggtatatgctgttaaaaagtttaaataaggtaaataaataataccagctccgttttatatt

SEQ ID NO: 9028 - DNA, 1674 bp, Oryza sativa
  ref <308>: DATABASE ACCESSION NUMBER: AK106376
  ref <309>: DATABASE ENTRY DATE: 2002-08-28
aatggcaacccaagccgccggctcggtcggtcgccccgccggcgttcctcctccccaccagctcagccctcagccaccaaccacgcgcgcgcgccgccgtctcgtctccggtcccctcggcgcgcgaccacccaaccacctcgaccctcggcggcgcgcaagggcggcggcggcggcggcaggcggctgaccgcgaatggagctcctcccgcgtgtgggtgtggccgcccccggtcccggacgcggcggcgcgtcgccgtccccgacgcgccgtcatcgcgcgccctctcaccccattctgaagcgatcggcggcggtttgcggcgcagtcgccgtctgcagaggaggggctgtcgccaggaggagccggtggtcaactctggtgaccgcagcatattacacaggaactgctgaactggtcgactttaactgggaaactcttgggtttcaacccgtgccgactgactttatgtatgtgatgagatgttccgaggaaggggtgttcaccaagggtgaattggtgccatatgggccaatagaactgaacccagcagctggagtgttgaattatggtcagggtttacttgaaggtctgcgagcacatagaaaagaggatggatcagtccttctatttcgtcctgatgaaaatgctttacggatgagagtaggcgcagaccggttatgtatgcctgcaccaagtgtagagcagttcctagaagctataaagctaacaattttagcaaacaagcgctgggtaccccctactggcaaaggttctttatatatcagaccgctgctgattggaagtggggctatcctcggtgttgcaccagccccagagtacacatttgttgtctttgcttgcccagttgggcactattttaaggatggcttatctccaatcagcttgttaaccgaggaagaatatcagtgtgcggcaccaggtggaactggtgatataaagactatcggaaattatgcttcagccgtttatgctaaagaaagagctaaggagagaggtcattctgatgttctttacttggatccagtgcataaaaagtttgttgaggaactttcgtcctgtaatatattcatggtgaaggacaacattatttctactccactattaacgggaacagttcttcctggcatcacaagaagaagtataattgaatacgcccgtagccttggatttcaggttgaagagtgtcttattacaatagatgagttgcttgacgctgatgaagttttctgtactggaacttctgtggtactatcctctgttggttgcatagtgtaccaggggagaagagtggagtatgggaaccagaagttcagaactgtgtctcagcaactctattcagcacttacggctatccagaaaggcctcgtggaggacagtatgggatggactgtgcaactgaattagtagcctggtcgttatggacggtcttaaggtacacacagtatacaaataatctggggcccagagatagagaagcatgaactgtttcttctgactctattacctttcttactgaccatacttccagtgtaaataagtgctccttgcttatccgaggccatattccgtgcatcaattcggcccataactttgtcgtcagcttgtctcatgtgtattcaggacaaaattattggcactatttattggac

SEQ ID NO: 9029 - DNA, 1555 bp, Oryza sativa
  ref <308>: DATABASE ACCESSION NUMBER: AK106377
  ref <309>: DATABASE ENTRY DATE: 2002-08-28
gcgccctcgccaccacggcgcgtcgcgcccccgacgcgccaggtcgccgctcccgtgtcgcgccgcgccgcgcccccacggccccggtacgcgcgctcgctcgtgcgacacgccgaggccgaggagaggagacagagcaagcgacaaaacgcgcaggcgatcccagagcgcgccgcgccgcggccgtgtcgatcccatcgaacacctcctcctacaggagtctcgagggctacttgtacacacacccatactagagaaagaaacaacgagaggagatacagagattgggagaggttagcgagagaggttgggcagtagccatcatcatcatcaattcatcttctccaaaaaaaatcagagtagaatctcatcactcacgtcaacgccggtgatcctctccgatggggtcgttcaaggggcacgtgctgccggggacgctgttcctggcggtgggggcgtggcacgtgtgggcggcggcggcgaggttcgccgccgacccgcgcgggttcaggctgcgcgcctggaaccccgtggacgtcggcggcggcggcgcgccggcgtggctccccgcccacctcgagctctacgccattgccggcggcgccttcctcgacatgtgcgtcgaggtgctctactccacccacctccacatcttcgccgacggcggcatcaaccccgcccacctcaacgacctcgagcacggcggcatgctcctcatgttcttcctcttcggcatcctcgccctcctctcccaaaaaaccaggtacctgccgttgccggagggggcgctgtgcctggtggcgtcgacggcgttcatggcggagctcctcctcttctacttccactccaccacccaccagggcctcgagggctactaccactacctcctcgtcgtcgtcgtcgcgctctgcgtcgccaccaccgtgctcggcgccctcctccccgcgagcttccccgtcgacatcgccagcggcgccgccatcgcgctccagggcctctggttctaccagacggcgttcacgctctacgggccctcgctgccggcgggctgccgccgcgacgccgacggccacatcgactgccacacccacgccgcccaggagcgcggcgagcagctcgccaacttccagctgttcggcctcgtcttcctcgtctgcgcctacgcgctcgggtgcttcgccgtcgccgcggcgaggcacgggcaccccgacctggccacgatgcacgccaagcacgtcgccgccatggaggcgcagctcgccggcgccggcgccggcgagggggacaggttcgtcggctctgcgctgccgctggaggacaccgcgatctaagtgagcgggctcgccggcgacgtcgctgtccgtcgtcgccgccgtcttcttggatttgggtataggaagaggaagtagagtgcatgtgacacgtggcaggggcagttcagagttcagaattcggaattttcagatcatgaaacgatcgaagagtaggaggctgcagattaattgggattaaccacaataggggatacaaaattcatggaaactttgatttgatc

SEQ ID NO: 9030 - DNA, 1673 bp, Oryza sativa
  ref <308>: DATABASE ACCESSION NUMBER: AK106378
  ref <309>: DATABASE ENTRY DATE: 2002-08-28
atattgcttctgttcatatggtttttttagcctttttgtatttcttcgcattggtcgtgtagatcctgccgttccggaagatcggctcttcatcgccgtcgacgtcgaagactttgtgagtgatcaaggcaagtcatatctaccttgaacatgttgaatcccatattgtgaaaattatgttgttttacttatattgcattgctttataaattatatcgttcattattaataatgttttattagttattcctatgctcttggttatggccatgatgttgatttgatatccatgatctttgtgaaccctagtaaaattataacttgactagtctagtaccctacatgatggactgactagttgctttaggtaaatgcttagttatgcttagttccaacctagaacttttggttaaactagactatggtggttaacaactaaaactggattagttatggactattgacgggtttgtcaataggtggtgataaaatgctttgtgcaactaaaatatatttttgggttgggctcagggtctaagctagttactttggtagtcgcaccccggctaatataaggaccggtcttcgggcctctattgcaaggcatcttcgtgcaaccacaagtctagtgggtaaggcctgactggaagtttagatcttctcaaaacagagaccattggttggaagggtgtggagccaggattaaggccgttttttcactcggcgcaagggggggcctgtctcatccgggggatccgacaacctttaccttgtcggggaccagcgggcggcgaaaccccagcaggttctcctattttgggtagacctagatggatagtcttgtcacgacctctatccgagtaccgtggtggtacccggcgcgtggcaacgcgtgttgaggttgtgtcttgtgggtaaagttgtacacctctgatcaaagttaaaaactattcgaatagccgcgccctcggttatgggcaagctgagcagtgtacccaaagttagttctgttttacaaaaccttgggtgggtgaaatcatgatggtgtagtcatgtggagattaaggcaggttcgcaggctcatgcgaccttggtgatattataatattggcttagaataggatcgtgttttaaaatgtgctttaacctgattaaaatgtttaaactatggctttatgcaaaataaaccctattaggccatttccttgtttctccctatgcattattgttgcatttctggtgtgacttgctgagtacggtggtggtactcactcttgctcacaaaaataatccagaggatggacctgaggaagatgaaggcttggatctctagttcactccgccgtcgagtgcctgtggctgctgctgttccgtagtcttccgctgttttatttgtttatctttgagtgcgagggcttgagtcgtccatgtaataaagtacttcctttacacttccgcaagtgtggctagttcactccgccgtcgagtgcctgtggctgctgctgttccgtagtcttccgctgttttatttgtttatctttgagtgcgagggcttgagtcgtccatgtaataaagtacttcctttacacttccgcaagtgtggcttgtaataatcaacaatgtctatgtgtaccttgcctcctgggacgaggattaatgcactgagcgtttgg

SEQ ID NO: 9031 - DNA, 1412 bp, Oryza sativa
  ref <308>: DATABASE ACCESSION NUMBER: AK106379
  ref <309>: DATABASE ENTRY DATE: 2002-08-28
agcagcagcaatggcgggcgttggattcgtggaggacatgctgcgggagcagagcctcctggaggcgacctgcggcgacctcttcgaccacatcgacgacctgctcgacttccccaaggaggagtcggccgccgacgtgctcctgctcgacgcgccggcgccagggagcccgctgtcctcgcgcatcatcggcggccacgccaccatggcggcggcgccgccaccgccgccgcagatgatggcgctccccccgccgccggcccccgcgaaggacgacgcgtcggcgctgttcgacgcggccggcgcgctcggcgccgaggtgttcgaccgcaaggacgcccacattggcccgtgtgatgagctggacatggacatggcgcagctggagtggctgtcggggctgttcgacgatggaaccatcccgcacgagccgagttttccgggcgtcaactgcgcggcgccgatcaaggcgtcggcgctgacggcgaacgccggcgtcgtgctgctggacaaggcggaggaggcgctgttccgcagctccagccccatctccgtgctggagcacagcggcttcaacgtggcaaccagtgggggctcctcctcgtcgtcttcctcgtcatcaccatcaccatggacatggacatggacagcagtgtgatcatcagcagcattgccctcctgaagccatcatccatcatcgatcaccacccgctctgcattggtttccatcagcatcagcatcagcatcatcatcaatccatggatcgatcgccggggtcatactggcgttagttcactagggcttttcttggggttttatttttttcctttttgtctattgattaattggttccccttaaaaagatgattttttgttttgtatagaggtgggtgagagagagagagaggaggagggcaggagaaatagatgaatcacagtggttgttgcattgcagatttgcagttgctcgcaaaattaggtaggtgagaaggagagctaaaccagcagcagagggagacagatttagagaggaaaactttgcagctagtcagtcagtcaattaggaggaggaaaatgagatgtgttttttttaaggggggtgatgaggaagtggagtttgttggtttgctaattagaagtttcttcttgctagtagctactcaggggggacatccatcatagtttatattggagcttgatgtactgaactccgaaaaattctttttgcagttcatctatgtctagggattgataagtgttatttggtttctatactagcaattactttgtagcaattaattatatatctctatatgccttttttctgtttctcctgccttgttggttggtggtgcctccctctgtacaagttgtgatcatccaatttgaggagatatattcctttatgctc

SEQ ID NO: 9032 - DNA, 1471 bp, Oryza sativa
  ref <308>: DATABASE ACCESSION NUMBER: AK106380
  ref <309>: DATABASE ENTRY DATE: 2002-08-28
aaccagtacacacaccattttgcttgtcaatggccgccgccgccgccgatcccctcgtcgccggcgccaccgtctcctccgactccgactccgactccgacgatctccacctcctcctcccgaatctcctcccttccgccgccaccgccgcatcagacgcgcagctccaccacttccacctccccgcgctcccgtcccctatcaccgtccgcaccctcccttccctcggcctcaccttccagctctggccatcggcctccaccctcctccgcgtgctccccgcctcgccgctcctcctctcgcgcgcgcccaccccggagagcccgctgggcatcctcgagctcggctccggcaccggcgccgcgggcctcgccctggccgcggcgctgcccgcccacgccgtcctctcggatctccccgcggcgctccccaacctccgccacaacgcgtccctcaacgcgcccctcctcgacgcccgcggcggctccgtctccgtcgtcccgctcccgtggggcgacgccgccgcgatggaggccgtcgctgctccgccgccggcttctcggttcgacctcgtcgtggcgtcggacgtggtgtactacgaggcgttggttgaccccttgattgagacgatgcggttcttcgtcaagggggaggtggtgttcgtgatggcgcacatgagaaggtggaagcgcacggacaagaagttcttcgccaaggcgaggaagctgttcgacgtcgaggtggtacacgaggacccgccgctcgaagggtggcgccatggcccggtggtctacctctttaccgagaagaagcggcgtgacaagaagtgaagaagctcttccaaaaggtaatgactgcctgctcgattgtgttcgtcatgtgttctttctgtttgttgtgaaagatcatactgttagaattcaaacagagaaaaaaaactgagggccaaaacttggttgtgtggttgcatatggatttggatgtgtcaggtgctatcctttgttttatttatggattctagttaattctcatggagtcacaatgaagtttaggatttcactatcttagaataaccaatctaataatagacgatatgattatgaggtggtagtagcagtacaggactttatgattggcaagggactgccgaaatttgtagtttgaacaagacaaagtttttggttctcaagaacacaagtctagcatgtcttcgtactagcacttcaaatggtgatggacggtctctagagaaaagatcaatggcacaattcctctgcatgcaaggaaggaatgacataaaacattatgttacttaacatggaaagttttttgttcttttgtgttacttttatggaattgaagtggaggcccaagaattatgtgttccattgctgctattttccttcaaattgttcatacatttagtagtaagttccttttgttatgggaataaaactgtagaaatccattt

SEQ ID NO: 9033 - DNA, 1107 bp, Oryza sativa
  ref <308>: DATABASE ACCESSION NUMBER: AK106381
  ref <309>: DATABASE ENTRY DATE: 2002-08-28
atccatcccattcttcaatctaacaagttcaaaatggccagaaccaagtttgtagctcttagcttcgtcgtgctactgagcattgggctgtccaatgctttgccacggaaatatgctagcgccgggggcggcggtggaggagggggaggtggtggtgggtcagggaatggttctggatggggatctggctctggctctgggtatggccaggcaagtggacccggtgggtatgctagtggaggcggtggtggtggaggaggcggtggtggaggcggaaatggtggatctgggtatggttcaggatctggttctgggtatggtcaagctggaggatatgggccttatggaggctatgctcaaggaggtggcggtggtggcggaggcggcggtggacaaaatggtgggtctgggtatggttcaggttccggttctggctatggtcaggccggtggatatggtccttacggtggtggagcatatgctcaaggaggtggcggcggtggaggcgacggtggtggtcaaaatggtggttctggatatggttccggttctggctatggtcaggccgggggatatggtccatatggtggaggatatgctcaaggaggaggcggtggtggaggtggtggtggtggacaaaatggcgggtcagggtatggctcaggctctggttccggatatggtcaagctggtggatatgggccatacggcggatatgctcaagcaggcggtcaaggtggtggcggtggtggtggacaaagtggcccaggcggtagtggttccggaagtggctcaggaagtggatccggatccgccggttggcacccatagagcattcatttgatccggcatgtcaattaaatggctacatcgatactactgattgtgattgctgaagatacaaacgggttgtgtgcatttaaataatactactttgccatggctgtatgtaataaaagtagccatcttgcattgcatatgctgctgctatagcaatgtaagtgtgcttgtataatctttgtgaaatttgttatttgttgtcttacaaagtatatgaataaatccagggtctaggtctctaggctcagcatggaaatgtgataatat

SEQ ID NO: 9034 - DNA, 1033 bp, Oryza sativa
  ref <308>: DATABASE ACCESSION NUMBER: AK106382
  ref <309>: DATABASE ENTRY DATE: 2002-08-28
acgggagacccaccgctaagctccctccctcctctctccggcgcttccgcctcgccggagatgggcggcgccacctcgccggcggcgccctgtctctccgtctgcttgctgcccctcctcttccccttcctccacggatgctggagctgcgtagctatcgagagggagaggacgctggcgatgatcaaaccggacggtctatctggtaattacacggagagaatcaaggaggtcatcttggagtctggatttgatatcgtcaaagaggcagtggttcagctggatgcggagagggcatcactcttctatgcggagcattctgggagaagcttctttgacagtctggtgaagtatatgacaagtggtccagttctcgttatgattctggaaaggcccgatgccatctcacactggcgagttttgattgggccaactgatgcaagaaaggctaaaatttctaatcctaatagcattagagcaatgtgtggagtggactcagagaaaaactgtgtgcatggttcagattcaccacaatctgcagccagagaaatttcatttttctttggagatgttagatctgatactgtggaacatgatgagctgtagtcctgtagaggatagacaggtgtatatgcgacatgtcgtaaggcagataattttgcagtttatttgttccatacagtgcctaacacctggttggacgatgggatttggatccaatggaaatatctgaacatcagatgagatggagttcaaggaaattaactttagattgtgtatggtaaagaccaggacggtgcatgccagaaacaccactgaagcactcatccaaatgtaatcgtttttgtactggtgcaaacttgtgcatccaatcttctgtaagcctcgtatatttagcctagcctgtgctgttcatttcaaagaaatcgttagccatcacgaactacccctgtttctgatcgttagcgatgatagtgatctaaaattttgctgatcattgaccctaaaataaaattctgaacagtaatttcag

SEQ ID NO: 9035 - DNA, 1787 bp, Oryza sativa
  ref <308>: DATABASE ACCESSION NUMBER: AK106383
  ref <309>: DATABASE ENTRY DATE: 2002-08-28
acacacacatagctaatagatattgtagctggaggtcgccggcggcgggtctagtagtcctccggcgccagcggctggtgcgcgccgccgtgcggggcggcgtcggctgacgggatgacgaggtactcgtagagaagcccggcgaggccggcgccgacgaaggggccgagccagtacacccagtggtgcctccagcgccagccgacgagcgccgggccgaacaccctcgccgggttcatcccggcgccgtcgaacgggcccccggcgagcatgttggcgccgaggaggaagccgacggcgagcggcgcgatggtcccgacgtgcccgcgcttcgggtcgatcaccgtcgcgtagtacgcgtacatgagcccgaacgtcatcgtcgcctccagcagcaccgcgtgccagtcccccacccccgacgccagtgcgaaccccggcggccgctgcacgacgtcgccggcgacggcgacgagaaggtatcagagaggaagcttagctagagagagacatcaaggtatatgtacgtaccatgccgccggtgatgaggcggaggaggagggtggcgacgacggcgccgaggagctgggcgagccagtagaagagggcgcggatgagggagaggcggccgccgaggagcgcgccgaaggtgatggccgggttgacgtggccgccggagatgttgacggccaccgccaccgccaccgccagcgccagcgcgtgcgccagcgacaccgccaccagccctcccggcgtgctcatgtcctggtacaacttccctgcacacacacatcgccatgccacatgtcactcccgcgcgccgccgcggctgccatggatggaagaaattatcaagaaacgagtgtgtatgtagtgcgtaccgagggagaggatggagccctcggcggcgaagacgaagatggcggtggcgaggaactcggagatggcggcgcggatggtgtccgggtgcgtcgcgtcctcgctcagccccaccgtgaaccgccgccctggcctcgccgccgccgtgctcatctccacaccgatcactcactctcactactcaccaactctcgccgccgtccggtccgcccaccgccgccgccgccgaagccgcgccttatcctagctagcctcgtctcgatcaccaagtgcgcagtacagttgggggtgtgaagcagctggatctcgtcggccatggccgcgtcgcggtgagcttataacgtggcggagccgggcgcgcgcgcgcgacacgtgtgcatgcgcgcggggcgaagcggtggcacgtctcgccgccgcgacgatgcgtgcgtgagttcgtgttcatctctatcgcggggggagtggggcccacatgacaggtcaccgccacgtcacgcacccacgtacggacgcgccggggagtaggtatcgtctcggcgtctctccttcaagcgatgggcgcatctgatgcatggatgggaggatgcatgggcaacgctgtgctcgcggtcgatgagacaaaatcataaaagagctttgattgatttgatttggaagtgcttaggttcgtcttgtgattaaatgggaaggggttgaagtaatgatgtggatttttggctttaatttggttttattagccggtaaatggatgagttcttttttttttaggggggggggggttgtttgggtgatttgcaagtttagttttgctttaagttgttgattctttcttcttcttcttcttcttcttcttctggtttggagggattagtattgcttaaattggactaaatgacgtggatttagcc

SEQ ID NO: 9036 - DNA, 1236 bp, Oryza sativa
  ref <308>: DATABASE ACCESSION NUMBER: AK106384
  ref <309>: DATABASE ENTRY DATE: 2002-08-28
acgatgccacacacactccgtcccaacaagctactcttcttcttcttctacctcctcacccctacccattctctctctctctctctctctagctagctagagcagcaaccaaccatggagccttcccccgacgcgccacgcgccggggcagcggaagagcagcctggtccgtcctcctcggcgtcggcgccggcgcccgcggcgtcgtcgaacgaagaagaagggagacatcagtcgcaggcgcagcagcaggtgcaagaagcgcagccgcagccgctggcgcagcaggcgccggcggcggcggggctgagcaggtacgagtcgcagaagcggcgggactggaacacgttcctgcagtacctgcggaaccacaagccgccgctgacgctgccgcggtgcagcggcgcgcacgtcatcgagttcctcaagtacctggaccagttcgggaagaccaaggtgcacgccgacgggtgcgcctacttcggcgagcccaacccgccggcgccgtgcgcctgcccgctccgccaggcgtggggcagcctcgacgcgctcatcggccgcctccgcgccgcctacgaggagtccggcggccgcccggagtccaaccccttcgccgcccgcgccgtccgcatctacctccgcgaggtccgcgaggcgcaggccaaggcgcgtgggatcccctacgagaagaagcgcaagcgtggcgccgccgccgccgccgccgcccctcccgtcgtcgtcgcgccgccccccgtcgtcaccgcgcccgacgacgccaccgggacgtcgggaggcgccggcgaggacgacgacgacgacgaggccacccactccggcgagcagcaggacaccacgccggcggcctctcctactactcctccggcaacaagtgtcggtactaccaccgcggcggcgactgcggcggcggcgaagggaagtgcggcgaaaggatcggcgacgagttcgtgataagtgtagagaaatcatttgcctccctttcaatcccctcatcaccctccaaattctaatcccctgcagcatcatcatcatcatcttaatttttagtggttgattaattattatgattattactgttattatttgttggtatgagagtggagaggcctaattaagggggtttgtaggataatgttaggatcgagtacataaaaggctgctaaattaacatgcagaaaatttcaatttgaagaaataagaggaagacaactttctctt

SEQ ID NO: 9037 - DNA, 1603 bp, Oryza sativa
  ref <308>: DATABASE ACCESSION NUMBER: AK106385
  ref <309>: DATABASE ENTRY DATE: 2002-08-28
aagtctccgcggcggaggcgctcgcgtcgcgaccccgtcgccgccgccggcgatccgctccagccgaaccccgccgcaccgccgcggtagctgccgtcggcgaggtgcgtctcggcaccggactccaggaatcgtgctgctgctggaacgccgcgcccgctcagccggcggccgggcgtcccgcgtggctcgctggcatcgatcggggatccctcctacgggctcgccgtcgcggaggtttcaggggaccggcgcttggacacgctctttcctcatcaatctgctgacgttttgaaatattggaatgcttctgtcgtcgaatttggttatctacagcatctgaattggttataacttataacttataagtggcatgtctgcgaaggttccaaggcgcctagaagctaattccgttgggatggcagattgggctggtcttcagactgatatccttggtgtaattgtaaagaagcttgccgtccctgactatctgagattccgtgctgtatgcacatcttggaaccatctctgtagggatgtattcaactgtccaaggatagacccatggctgatgctccctacaaatgcgcttaatgattctaaatttttgtgtgtacctgaaaggaagaaccaaaccattcgtctcccgagcactgttacaatctttggctccacctggattcctgttggttcttcccatggttggctcatcttttacagcccatttcatggaaccatgcagctggttaatcccattagtggcatgcggttcaatcttcccccaatcggacgaagggccttctccaaggccatgttgcttgacatgaatgacacaaacttcactgttgctgtcatcttacgtgaccagaaaggatataaggtaacgcgtaaaggaagcaacagctggtcatcagtggaatcaaagcatgatctagtggatatcttcaagcacaggagacagctttacaccgttgatatatatggcacagttcagttgtgggcagaaccgccccgttcatggccagatgaagatgccccgcaggtgaatgacccgtatcataacctcattcactatccgcatcaacatggaaagcttaactgtttggtggagtccccagctggtgatctaatgagggtgaagcggcaatcaaatgataagtttgtggtctggattctggacaaggggacattttcctgggagaaggttgataacatcggggactttgcgctgtttgtcagctactacagctcggtctgttaccgggcgaaggatcatctcaacctgaagtcgaattgtgtctacttcattgactcctacagcaacctgtgcgcattcaacctggagaacaggacgaaggagctcgtcgaagctcttgagcccgcccatgcccacggtcatccagagcctcacgctgtccggcgcaggccggaaggacagaggtacatgtggttaatcccttcgctgagataaaccaatggaggatgaaagctacggtacacatccccgttgtctctgatcttactacagtatatgtgactgtcgctaatttcataaaagtattgggcatatctatagcacttctgtagataaatcaactgtctg

SEQ ID NO: 9038 - DNA, 1427 bp, Oryza sativa
  ref <308>: DATABASE ACCESSION NUMBER: AK106386
  ref <309>: DATABASE ENTRY DATE: 2002-08-28
atgcaaatggaagacgaggcgacgcgtccctcctctccgccaccggcggcttctgcggcctcgtcggtgctcgccgacgacgacctcctccgcgagatcctcctccgcctcgccttccccaccacgctcgtccgcgccgccctcgtctcctcccgctggctcggcctcgcctccgactcgtccttcctccgccgcttccgcgcccgcaacccgccccgcctcctcggcttctaccacaccgcgcgccgggacgagcagccggcgttcgtgccgcttccccagcccccggagctcgcccccgtgctccgccgcctcggcgggttcgcgctcggcggcgccgacgtctccgccgtggtcttcgactgccgcaacggccgcctcctcagggcggagttcccgcccccgcccgacgagctacgcttcggcgtcgtctccccgctgctgccccccgcgcggaagccgcccgatctgcccccgaacctgcactcgcagctccatcaggtacccaacgatgcccgtgtgctgcgcccgggctggatgctgctcccggaggaggaggaggacgacggcggcgacgatctctcctacacgctggtggttctgatacgaagaggccgtggattgttcgcgagagcagtgttggtgagaggtgaatcagacgaccagatccgcacctccgattcaatcgagctgccgaatcactactggccaaacaagaagatgaaccgtggattgctcttccatgggagcctctacatgctgggcagggagcatgttcttgggttgaatctggcgtcgatgagcttgttcttgatcaagctcccggatggtgtggagcagctggagcatatggggaaccttgagttgttgcgggacggcgattccggattatatcttgctcatctgaaggggtttcagattcatgtttggcatcgtgcgacagacggcggtgggaatggtggtgattgggagatggttgataccatgtctctgcatcaatcgtttggtcaagttgcgaggcccgattgggagtcgggggatccttcacttggggatgctcttgtttcacttcgtagagtcgaggataatgccgagctgttcttgacgatagaccgcgtgatcttccacatacatattgcgagcaggacagcgaacaaggttttcgagatggctccaaaggaagatattggttttgaaatctttcccttcatgatgatatggcctcccactttcccggctttgaactatgacgatgacgatgatcagtaattcagtatgaatgatcccagaggatttttctctagtgctttatgcgatgtctaaccgattctcaattcagcatgtagttatcttgctgtaacaatctaattgttactggtcttttaggagagtcaggcatcttatgtgatgttcctttgttatgcttt

SEQ ID NO: 9039 - DNA, 2085 bp, Oryza sativa
  ref <308>: DATABASE ACCESSION NUMBER: AK106387
  ref <309>: DATABASE ENTRY DATE: 2002-08-28
caagaggaagaaaatcgacagcaagtggaaagccgagtgcctatggtgccataagaggctcggaggggacactaagaatggcaccaaacatttgcacgatcatctcagcaaatgtcctcgtcgcaggagtaataaagtcagcaagccaactccctccaaatgtacaaaggatattgatcaggaacccactgttgcttctttagaaagctccacctttagccaggatgttgccaggatggagcttgcgagaatgattatcttgcatgaatatcctttgtctattatggagcattacggtttccaaaggtttgttagggctcttcaaccattgttccagctggttcccaacagtagtcttaagaaggatgttatcagcatttatgagacggagagggtcagaaccagggaaattttgtgggaggctaaaggtcggattgcaataacagcagatatatggacatcagatgatcaaaatagaggttatgtggctgtcagagctcattttatcgaccaatcctggacattccagtgccgtctactgagctttatacatgtgccatggccgcatacagctcaagcaatttctgaaactctgtcttcttgtttgaacgaatggaatcttggaaggagggtatcaatggtgatggctgatgattgttctacagatgatacggttacggggctcttaaagcaaaggctggataccgaacaacttttgttaggtgggtctttgctgaacatgagatgctgcgcctatgtgctaagtagaattgccaatagttgcctgggtgtgatgggaggtgctgttgataggatccgcgccagtgttgatttctggacagcaacaactgaaagagatgtagtgtttgctgatgttgctcgtggtttgaatgttaatctcgacaagaagttgactcttgattgtaataatagatggtactctaccttatccatgttaaatgttgccataagctacaagcaagtctttgatcacttaaggcaaatagaggaacagtatatttgtgctcctgatgatgatgactggaaattagcaaaagaggtctgcagtaagttgaaactgttttctgacattgcagaactaatttcagaggctaagtatgttactgctaatatgtacttccccaagatttgtggaattcggatggccatgaggagatggcctgggtgtgaggatgaactgataggaaggatgagaaatgaaatagccgaattgtttgagaaatattgcgttgaagttcatgatctcatggctgtggcaactgtcctagaccccagatataagcttgagctactgcagttttatttcccctcaatttttggtgatgaggcatacaatgagataaatagagtccggcagctctgttatgatttgatcaaacagtatcagggtccccaatcaaaagtcggtgcaatgcagccttgtgggggggaggaagagggtccagatcagttatctagcttcgatctatatatcgctttcaagttctccagtgcagatgtcaagtcagaactagacaaatacttggacgagcctgttatccctagagcagtagactttgacataatagattggtggaagattatggggaagaggtttccaactctgcagatgttagcaagagacattttagcggttcctgtctcaagggtagtttctgaatcggcgtttagcattgctggaagggttttgagtccacagcgtagcaagcttttacctgatacactggaggccttgatgtgctcacaagattggcttcatgcagaaaacagaggtgcaggatcgtcagggctcttgagctgcctcacttgcctggaagatgctgatgtaactacaaaggagtgaagtttggacgcctgttgattgtttgctacaaatatatgctgaagttgatctcgcacattcaccagctgaattaaagcgctgagatctgggttagctttttttttggtttatctcaagagtattgtgggtaaggaaggtggtgtgtatgttggaactgtgaggagtctactaaaatgaagaaagcattcagttgatcattcttttcaggaaagattagttgc

SEQ ID NO: 9040 - DNA, 2044 bp, Oryza sativa
  ref <308>: DATABASE ACCESSION NUMBER: AK106388
  ref <309>: DATABASE ENTRY DATE: 2002-08-28
aaaaagaaacaggagcgattctcctgtagccctagccgccgcacctcctgcgctctgccgccgccgctgctgttcctctcttcgccggtgccgccgctggtgcagccgtcgccggtcgccacagccgtcgtcgtccgcagccggtcgtttgaaggagggagagaaggcagaaaagaacaggaaggagggaaagaaggggaaatttgatagaagaagggaaatttggggaatttggtgaatatttccaaattcttcgtttttcttatacattagtactgctagctatgccacctagagtgagtgttcggttggctaacagaggccgcgggagaggcggaggtagaggtcgtggtaggggccaccataatgaagaagttgaaaatactcaggataatgaagaggttgggaacaactcggttgctgaatcccctattcctaatcgtggaggtcgtggtaggggccgtgctggaggccgtggaagaggtcgtggtagaggtcgccataatgaggcagcatcctcgaaccagatggaggatgagcacatggaagaggaggagggtggtagccactcagctgctgtctctgatgatgctcctcgagctgctcaggggatgacactcactagatggacatccatgcgcttagacacatttgatgggtctggtactcccgttaatgctgcagactggttacgcaagatggagaagtatatgaggggatctagaatgactcctgaggagaaggttactttcatgcctttttagttgactggtcaggcggacatttggtgggatggagttgttgaagcgtggaaccctgatcgtggtgctattacttgggaagtttttcttcagcagttcagagctaagtattatccataatcatttagggacaagatgagtgatgagttaaacaatatccaacagggaagcaagaccgttgatgagtatgaacgggagttcagcagtattgtacgctttgtgcctagcgtggcaagtgatgagcgtgagaaggctaggaagttctttcgagggctcaatgctcggtatagagaagtgatgggaagaaacctgcctaccatatacctcaatgcagttgaggaggctcgagggatggaggttgagctccaaattactactgcgcagaagaatcgttctggtaatgtcactggtaatgagcagaagagagctcattaggaagggggtgagaactcgcagcgaccacatttcaagaagtacaaacaaaatcaggtcactcaaccatcatctaaacctaggcagtggggttctcagcctaatgcagcttcacgtccaacggagtctcagttgattcgccctgtgccagggcagggactaatttgctttaagtgtggaaagaatcaccattcagcagagtgtgggtttaccggggcatgtcgtgggtgtggcaaagctggacacatggagttggtatgtaagcgtaacccaaattctatcatcaagtggcaaaagccgagctcctattcagcaacctcttcgacagctagctatcctcgaggttcaggttcatccactagtactccccgtggtgccgttcagatgatgacaacttatccacttccttaccagcagttcacacataattacccaccaccaccatcaccaggacagtattggcccatgcctcaatcttttgctccacgtgctccactccagttgcctgcaccgcctatggcgcatccttctgcttcagctccacctcaccagcaggtctcagcctctactaccccagctatggctggagtctacaacatgcctgtagcttcatcccttggtcgcccggatgtcgttacaggtacactttcagctgattcgcatgatgccctagttctgtttgattctggtgctacattttgctttgtttcgatcgagtttgcgaaaagagctaatctatttagtcaagaggtctctcgatctgtccaagtcagctctccagggggtataatctctagttcagtagtatgtccaggttgtgcaatctctattgatggggaggaatttgtggc

SEQ ID NO: 9041 - DNA, 2058 bp, Oryza sativa
  ref <308>: DATABASE ACCESSION NUMBER: AK106389
  ref <309>: DATABASE ENTRY DATE: 2002-08-28
gatgtgttcatcaacaaccgtagccacatcgcgttccaaaacaaatttcagagaattatctcagctctcagaaccttcggctcttctttgatctttctctgtccctttgggagaagaagaactccgttcttgcttgcggtggctaatttcagacaatcagagcagaagatttcagttgtatgggattgcatcagcatgcatggggtgaagttggcatcgagatcttcagcccaaggtccaagcatatagccatggtgaacaaaatctcaccctgggatcaacaagagaagatggccttgagaagtaatggagcattggtgaagtcactgagcttcaaagaatgggaaggaggtgaacaaaccaaaacaaattcagtgaaccacaagaacaggccgagcctgatcaacgtcgtcgtcgacaaccggagaaattcagacattttcatggcagaatcaagccccatagtgtcttccagccccaaatgtgagcttgatgctgcagcagtgaaggttcagaaggtgtacaagagctaccggacgcggcgaaacctcgccgattgcgcggtcgtcgtcgaggagctatggtggaaagcattggactttgcatcgctgaagcacagctctatatcattcttcaatggcgaaaagcccgaaaccgcggcgtcgcggtgggcaagagcaagaacaagagcagccaaggttggaaaggggttatcgaagaacgggaaggctcagaagctggcattgcagcactggctcgaagctattgatccgaggcatcgatatggccacaatttgcatatttattatggtgtctggtccaggagtgagagtacagagccattcttttattggttggacattggggagggcaaagaagtaaatcttgacaggtgtcctaggaacaagcttcagagccagtgcgtcaagtaccttggaccaaaagagaggcaggagtatgaggttgttgtggagagtggcaggcttgtttacaaacagtctggagtttttgtccacacttcagatgattccaagtggatctttgtcctcagcacaaccaaggcattgtatgttggccagaagaagaaagggtcatttcagcactccagctttctggctggtggagcaatcacatctgctgggagattagtggtcaaagacggaatcctcaaggcaatctggccttacagtggtcactacctcccaaccgaggagaatttcagagagttcatcagctaccttcaggagaacggcgtcgaccttgccgatgtcaagagatgtcccatggacaaagacgacgagtacccattgctgacaaagcctgacgtcaccgccgcctccattgccgccaccaagaacgtcgagaaggtcgccgccgccaccgcagccgcagccgagcggctgaccgagaccgtctccgacgacacggaccacgccgccgtcgacgaagacggcagcatgagcgaaggcgaggacgaagacgccgacgtcccaacggcaaccaaagaagacgagcacaaggcgacctcctcgtcggcggcgagcaccaccgccgccgccgccgccgcagagaaccacctgccgtgcaggtggtcgacggggacggggccgaggatccggtgcgtgcgcgactacccgcaggacctgcagtcgagggcgctggagcacgtcaacctgtcgccgcgcctcgccgccgccggggtggcgccggcgacgaggaagagggacccggtgccgtcgccgcggccgagccccgggatgatactgtcgccgcggctggcctccgtgggcttccggccgccggtggtggcgctcacgctgccggacttcaagaggagcagattgcagtgacactgaaacgaaattttttggttaattttttttagtagtttagtttagctgatgatgaacaggtttagagtaataacagctggtccagaaattttgtgagggaaggacagtgattctttgctgctagggagaattcagattagttgatttttttttttttggttcaaaaaaaaaaaaaaaaaaaaaaaaaaaaaaaaaaaaaaaaaac

SEQ ID NO: 9042 - DNA, 1617 bp, Oryza sativa
  ref <308>: DATABASE ACCESSION NUMBER: AK106390
  ref <309>: DATABASE ENTRY DATE: 2002-08-28
acacaaaaccgagccgagctctgtctctgtctctcctggccatgtccggccatggccgccaccgatcgatctccatccatagagcatcccaaaccaaatccattcgccaccagccaccccgtacaccgaagaacccattttacccactggagcaccgacgcccctcctctccctcctgtcagtttgctcggcagaagaaggaagaggaggaagataacgggaggaaggaggaaaagaaagcctgacaggtgggcccatgaatacgtcgtgcagccgagtgccgggtggaagcgccaaacgataagcgacgttgttgatgacggcgaggacctggtacggtccatagaaacggggcctcaacttgcccttggttgcatccggcagcgacgccggcactcggtggcgaacgcgaagccatagatgcttgtcatagtagcgcttggcgtactgttgggcctgctccagacggacgcgaacgtcggcgaggaatgcgtcccgttcctccatggactgcgccacagccaccacccgcgtctcactggcgtcgtaggcgcggatagatggagggtccctgccatagacgagcttgaatggcgtcgtgcggagtgcggcgtggaaggaggtgttgtagacgtattccgcccatggcaaccagcgaagccagtggcgcggacggtcaccggtgaggcagcgaggatacatggaaatggtcttgttggccgcctccgactgtccgtccgattgggggtggaacgctgagctccggtgcaacttggtgcccgttgccgcgaagagcgctgtccagaacgccgaggggaacacggtgtcccggtcggagacgatggacgtgggtaccccatggagacggacaatgtcggtgaagaacgcgcgcaccaccgtctccgccgtgtacaggtgcgccagggcgatgaagtgggcatacttggagatcttgtccaccaccgttagtatgacggtcttgcctgcaacgcgcggtaaaccctcgacgaagtccatggcgatatcggaccacaccgccgccggcaccggaagcggaagcagcaaccccgccgggtgtaagtgctccgtcttgttgcgctggcagacaaggcagccacgaacaaagtcgctgacgaggcggcggtcatgaggcgtgtggaagtcacgccggagtcgatgcagagtcttttgatgccttcgtgtccttcgtcgtgagcggccgccacgatcgccgatagccacggtgactcgggaggcacgtagatgcggcgcttgaaggtgacgaagccgtccacgagtgcccacggcgcaccgcatgttcctgcgttgatttcatcccggagggtcaccagtgccgggtcggaggccgaggaagaacgcagctcgtggaggaggtcgaatgttggcatcgacaatgcaagaagctggccctccggtggcgcgcggcgtgacagggcgtctgccgccgcgttctgcttccctggtttgtattccacggtgaaatcaaatcccagtaatttacttacccaatggtgctgtggaatcgtggaaagccgctgatcaagcaggtatttgaggctgtaatggtccgtcttcacgagaaattggcgcccccac

SEQ ID NO: 9043 - DNA, 1381 bp, Oryza sativa
  ref <308>: DATABASE ACCESSION NUMBER: AK106391
  ref <309>: DATABASE ENTRY DATE: 2002-08-28
cccgccgtcgccggcacgcgccgcctccgccttgccctcgcgccgccgcgtccaccgcggccacggccgccgcgtccacctccgccgctgtcgcgtcgccgtcagcgaggcgagccgccatctccgccttagccaccgccgtcgtcgagcgccgccgctgccaaccgccacttccggccgccggcgtcccgatccggccgccttcccctcgcagcacgccgtcgccgtcaccgagcgcgccgcctccgcctcacgtcggtgctgccgaccgccgggtccggctgccttcgacggtcgacgtctggatccggcctccgtgttgtcggggcatgcggatctgaccgcccgcgacccctcctcgcctcaccctctcactctccctctccctcttcctctgaccgcccccgtccggatcccacttcgctgccgctctccccgcgacgagcataggcacggctgcatctttccggcggcggcgacatcttctcgacgacgacagcgtcttctcggcgtaggcagcgtggttcataggagagccatggcttttggagatgaagttgcacaacagttgtgggcggggaagacctgtgtcctcgtgggtggagctgtcgagagaaatttcactattgtgaccagcagtagtttcagcgcttggaggattcaatcttcactgtcggtacaatcatttgttgggaaataacttgtcggatgatattcctttccacctgccattttactcctcagattacatctgttgtcgtgttatgcatttggtgtgttgctgcaaatcctggtgaccctggcattttcaagtcggcagagcatccaaaattgaacaaggatggaaggcgatcccagaaaaattcagatcatgggttaagtcaaggaggaaaaatgtcaagtgatggatttaatgctgtttataacagcgagaaattgagcaacatgcttgagctaaaagattcacattcctagcccacattttctgaaatactttgtttccccttttcctgcctttgcaaaagatgcttccatgcggatcatcagtcatctgaacagcacatgagtgaagaaggaatgttcttcttcagcttgtgtgcgaagcagaggtatgatcaactgatgttcagaaattttaattttctaaggttattggggttattggccacaagctccatttgttgcactggtctcttttaatgatgtgtcagtactttagattatagtgtgacatgtgctggtaaatataagccagtaggagtatcagaataatcaatgtaatttagaaacaactatggttaactagattgcattcatacaagaatcatgattgttattagtatcaaatattcatgtaattccaaattataaatgattgtcc

SEQ ID NO: 9044 - DNA, 1496 bp, Oryza sativa
  ref <308>: DATABASE ACCESSION NUMBER: AK106392
  ref <309>: DATABASE ENTRY DATE: 2002-08-28
cacagcggatcacggcggcgacttcggacgaacaccttgcctcgccggagttggagaagaggagaggagttagagagcaagatgatgatgatgggtgagggcgcgcacgcgccgccgtggcagcagcacgtggcgtcgccggtgagcggcgtggagggaggaggtgggagggagagcgaggtggtggccgcgccgtaccacctgctcgacacgctgcggcattacctgccgtcgaacgaggcggcggcggcggaggatgaggaggaggccgcggcggtggcggcggcggtggacgcgtacgcgtgcgatgagttcaggatgtacgagttcaaggtgcggcggtgcgcgcgcgggcggagccatgactggacggagtgccccttcgcgcacccgggggagaaggcgcggcggagggaccccaggcggtactgctactccggcacggcgtgcccggacttccgcaagggcgggtgcaagcgcggcgacgcctgcgagttcgcgcacggggtgttcgagtgctggctccacccggcgcgctaccggacgcagccctgcaaggacggcaccgcctgccgccgccgcgtctgcttcttcgcccacacccccgaccagctccgcgtcctcccgccctcgcagcagcagggctcgaacagcccgaggggttgcggcggcggcggcgcgggcgccgcggcgtccccgctcgccgagtcctacgacggctcgccgctccggcgccaggcgttcgagagctacctcaccaagagcatcatgtcgtcgtcgcccaccagcacgctcgtctccccgccgaggtcgccgccgtccgagtccccgccattgtcgcccgacgccgccggcgcgctccgtcgcggcgcgtgggcaggagtcggctccccggtcaacgacgtgcacgtctcgctccgccagctccgcctcggctccccgaggtcggcgccgtcgtgcgcctccttcctccccgccggctaccagtacggctcccccaaatcccccgccgccgccgctgccgcggcgctctacagcctcccgtccaccccgacaaggctatcgccggtgacggtcaccaccgcctccggcgccaccgtcaccgtcgagccgctcgacctcgggctcatcgaggaggagcaacccatggagagggtggagtccgggagagctctccgggagaaggtgttcgagcgtctcagcaaagaagccaccgtgtccaccgacgccgccgccgccgccgccggcgtcgcgcccgacgtcggctgggtatccgacctcatcaactgagcaaacccaacaaggcgacagccatggctgagtaagaattttcctcatgcctccatagtggaagcagaaggtagcaggaagagaaggaaaaaaaaagaaaatggaaaagtttttccaaccaaaaaaattctattatttttttattttagtttcttgcttgttagattctcctaatccttgtacatatgttcatcaaaaaaaaaaac

SEQ ID NO: 9045 - DNA, 1693 bp, Oryza sativa
  ref <308>: DATABASE ACCESSION NUMBER: AK106393
  ref <309>: DATABASE ENTRY DATE: 2002-08-28
attaatttctactgttatgctaatgaaagtaatctcatatattgcctattgagctgttatttctcaaatattgcacattggtttcttttattctatattttcattactgcattctatggctgtatttttcacacatagttatatttattttgctgctgcttaagacttcatagtttgacttttctctattgttgtaaattagcatataaagaacatggtgctgcttgaatatcttgtcagcacccttgaggctgattttgtacctcgtcagattgcatataaagagtcattagactgggtaattttcagggaatctcttctacagatgcttctggtatgatctacatccagagtccataaagaatatcttagttagatttattggccagttcttgtgctgcttctccatgtcaacatttttttttattgaagtggtgtggaactcatgcaagtttcttacgttgctctatggtattgctggaattcattctgttatccattacatcaggtttcacggaaggtggcattcaaatctttagtaaagaactgcatatcttttctgctcaatcaatataatcagggagttgaagatggcatatcttccaaagaaggttctgctaaatcagcacctgatctagaatcttccttagctatcatatcttttgaattcgaaagaaaagctcttgcatcagttcaaaaacttttcactatggtgagtatttagttgtacacatagcttgcatgaagtacagatgctaacgatttcaagtttttctttttaggttatgaaccttgacttgattagaaaagaagcagacacaatgggtctgacttcaagagctgatgggtgcaggaatcctatcttggacgttattttagatgagctaacttacaacataagctatttatctccatttcttctggtaactgcaaatcattccatctatttgtccctgtcttaccctaaatatctacaattctttgttattgtaattgagtaattctcagcttgcatcagttggtcatgcatcaataacttgataaaaacctattcacagttcctacatgctacctgtgaatttccacttcagtatatgtagctcgccacgtgctaattgttcataaagggggaggtggggaggggggaggcgacgatgccgtcgcacgcggatctggaccggcagatctcgcagctgcgggagtgcaagttcctgggggaggcggaggtgagggcgctgtgcgagcaggcgaaggcgatcctcatggaggagtggaacgtgcagccggtgcggtgccccgtcaccgtctgcggcgacatccacggccagttctacgacctcatcgagctcttccgcatcggcggggactcccccgacaccaactacctcttcatgggtgactacgtcgaccgtggttactattcagtggagactgttacattactagtggctcttaaagtccgttatagagacagaatcacaatattgagaggaaatcacgagagcagacaaatcacccaagtgtgagtttctattcctctgatatgaaaaaaactctgaactgtcttcaataattgccaattgccaattttcagcacagtatctctatattgcaattttttgcaaaacatatatgaccatgctgcaaatcttaccaaatgattatgcttgaaattgatcttttctgcctcctt

SEQ ID NO: 9046 - DNA, 1408 bp, Oryza sativa
  ref <308>: DATABASE ACCESSION NUMBER: AK106394
  ref <309>: DATABASE ENTRY DATE: 2002-08-28
gtgattaatgagatgcaggcagctttgtttcctgggatcgcttgatccggagaaggtgaaggggaagatcgtggtgtgcttgagaggagtgaacccgagggtggagaagggcgaggcggtgctggaagccggcggcgccgggatggtgctcgccaacgacgtcaccaccggcaacgagatcatcgctgacgcccatgtcctccccgccacccacatcaagttcagcgacggccagatcctcttctcctacctcaagaacaccaagtaatcaagcagccgaaaacattgtgctcgccgttgatcgatttgctcgccggcgtcgctgatgtgtgggttgtgttttaggagtccggcggggacgataacgaggccggagacgaggctggggacgaagccggcgcctttcatggcggcgttctcgtcgcaggggccgaacacggtgacgccggggatcctgaagccggacatcacggcgcccggggtgagcgtggtggcggcgtggacgcgagccagcgcgccgacggacctcgccttcgacaagcgccgcgtcgccttcaactccgagtccgggacgtccatgtcgtgcccgcacgtcgccggcgtcgtcggcctgctccgcacgctgcgccccgactggagccccgcggcgatccgctccgcgctcatgaccaccgccgtcgaggtggacaacgagcggcacgccatcctcaactcctccttcgccgccgccaacccgttcggcttcggcgccggccacgtctccccggcccgcgccatgaacccgggcctcgtctacgacctcgccgccgtcgactacctcaacttcctctgctccctcagctacaacgccaccgtcatggccatgttcgccggcggcggcggcgcggcgccgttccggtgcccggcctcgccgcccaaggtgcaggacctcaactacccgtccatcaccgtcgtcaacctcacctcgtcggccaccgtccggcgcacggtgaagaacgtcggcaagccgggggtctacaaggcgtacgtgacctcgccggccggcgtgcgcgtcacggtgagcccggacacgctgccgttcttgctcaagggggagaagaagacgttccaggtgaggttcgaggtgacgaacgcgtcgctcgccatggattactccttcggcgcgctcgtctggaccaacggcaagcagttcgtcaggtcgcctctcgtggtgaagacgacgacgccgacgatggcatgatcgtgattaataattattaattatatatagggtattggttgattaattattaatcgatttaattaggtttaggaggggtggtggtgtgtaaagaagcagacataattaaacgtttgtttgaattctttagcttcagaaaatctaaatgtttcatgtgcatttgctcgg

SEQ ID NO: 9047 - DNA, 1346 bp, Oryza sativa
  ref <308>: DATABASE ACCESSION NUMBER: AK106395
  ref <309>: DATABASE ENTRY DATE: 2002-08-28
attgcgacactgaaactcaggcggcgccaccagccagagtcccacgacgttgctctgctagggttttgctccaccttcctcccacctcgcgccatcggattccaccttcccaggtctcccctcccctcccgtcgccatgcctcacctcgtccgcgagcgcctcttcttcggcgacatcaacgacgccatcgccgcgctcaccaccaccgccgcggacaccggcggcttcacccacctcctctccgtcgtcagctccgcatccatctccttcatcaccgactgccgcccgggcctctccatccccaccgaggaggtccgccgcgtggtcgccggggaggagggcgcgccgccggtctccgccgtggcccccgggcggctgttgcgggtggtggagcgcgctggggtcgggctgcgggtcacgcggatggccgtgccgctgcgggacaccgaggaggagaacctgctcgatcacctcgagccgtgtcttgatttcatcgatgagggcaggaaggaggggaacgtccttgtccattgctttgctggggtctcaaggagtgctaccatcatcgttgcttatcttatgagaacagaacaaaaatctctggaaggttcgactattccaacaaaatgggtgatttttcagtcgttgctttggttattactccagatgaatacctgagttgtctttttgatacacgctggtgacatgccatgctttttgtcttgtttcagaagcactagagtctcttaaggaagtcaatgagtcagcctgcccaaatgacggttttcttgagcagttgaaactgtttgaagaaatgggcttcaaagttgatacttcaagtcctctatacaagcgtttccgtttaaaattgctaggccaatcctacaaaattggagagaaaataggaagctatgtatttgaagatgatcctggtctttctggacagcctaattcttctactcaggatttaccaaacaaacaaacccaacaaacagcataccgctgcaaaaaatgcaggagaattgttgctgtgcagggcaatgttgtgagccatactcctggtgagggtgaatcttgctttcagtggcaaaacaaaagaaagggagagcgatcatatagcaaagaacaagattgctcatcgttgtttgttgagcctctgaagtggatgactccaggtaattcaccctcgtaattcagccctttgcagttacctacggtcacaaatgacttttcatgttgatctcctattgatgtggttcatagcaaacctgtgtttactactgagtgctcgtccaatctgtcatgtgattctgtaattggtcggccaacctttggctgacccggc

SEQ ID NO: 9048 - DNA, 1212 bp, Oryza sativa
  ref <308>: DATABASE ACCESSION NUMBER: AK106396
  ref <309>: DATABASE ENTRY DATE: 2002-08-28
cattcggcctagttctaggggaccatcatttctgacacttactctgaaaatttttgatggtgtccttgcacacaaggagataactgaaggtggaaaggatcataaagatattacaagcttgcttcgccttggaaaaacattgacaattgataatgaaacttttgaagatcttgatgaggttatagacaggtacgtggatccattggtaggccacctgatgagcatgcttttgtaccgcaaattcaagaaaggatcaaaaagtgaggttgatgagatgttaagggctgagaaatcagagaatcctatgagaatagtgtattgtttcggcatatctcatgagcatccaggcacatttattttatcttacattaggagtacaaatccacatcacgagtatattgggttatacccaaagggctttagatttcgtaagagggactttgacaatattgatcgcctagtgtcctatttccagaagcatattgacaaaccaccacctgatgctggtccatcaatgcgaaatgttgctgcaatggtgcctatgaaaagttcaggttggggtaatggtggtggcactggtggtggaaatgatggatggagaggagatggtaacaacgacagggatagacctttctctggaagatcaggaggcaggtttgattcaaggaacagctctggtggtcgtggacgtgggcgcgggcgtggtagaggtaactttggcagtgatgatggtggcggcggaggttggagtggtggcggtggcggtggcggcaacagtgggggatggactgacaatattggaagtggcggaggtggatggggcacaggtggtggttcctcgtgggctggtggtggcgacggaggttctggaggtggtggttctgatggcggcggcggtggctggggagcagcacccggtggatccaacgatgccccaggatggggcagcggcaaaaaggcggtcccagcacaggatggtggtagcgggtggggagcttccgccggcggcggcagcggtggctggaactagtcaaagaactgctagatgaaatattttttttttttgttttctggaccctcttctatatctggtaattgcgctccacgggagaaaaattgtcactgttcggggaccctagtaatctgctactgaatgccgctggttttatacattttggacggccttattttgaatgcatgtacagcttaagc

SEQ ID NO: 9049 - DNA, 1382 bp, Oryza sativa
  ref <308>: DATABASE ACCESSION NUMBER: AK106397
  ref <309>: DATABASE ENTRY DATE: 2002-08-28
gcgagttgtccgttggcgccgccgccggcgagctcgcgcacggccgccgcggcagtacgggatggcggaggcgggagtggcggccgcctcgctcttcggcgccgaccgccgcctctgctccgccgacatcctccctcccgcaccggccatctccgccctcccgctgatcagccggggcgccgccaaccgcggcctgcggcgcgcgctgctgcgcgacgacgtctcgtcggtgtacctctcctacgcctcctgcaagagatccctcacgagggccaacgacgccaaggcattcgttagagtgtggaaggtgatggagatgtgctacaagattttgggggaggggaagctggtcaccctgagggagctgttctacacgctcctctctgaatcgcccacctacttcacctgccagcggcatgtcaaccagactgttcaagatgtcgtctcgttgctccggtgtacgaggcagagcctggggatcatggcgtcgagtagaggggcactgattgggcggcttgtggtgcaggggccggaggaagaacatgttgactgctccattcttggaccttctgggcatgcgatcactggagatctcaatgtattgagcaaattaatcttttcttcagatgcgcggtatatcattgtagtggagaaggatgccatatttcagaggctggctgaagatcgcatatatagtcaccttccgtgtatcctgattactgcaaaaggatatcctgatcttgccacaaggtttatcttgcatcgactgagccagacttatccgaacatgccgattttcgcattagtagactggaacccagcagggcttgctatactatgcacttacaagtatggaagcatttcaatgggtttggaatcatacagatatgcttgcaatgtaaaatggcttggcctaagaggagatgatctgcagcttatacctcagagcgcatatcaagaactgaagccacgtgatctgcagattgccaaaagcttgctgtcatctaagtttctgcaggacaagcacagagctgagctgacactgatgttggagacaggcaagcgtgccgagatcgaagctctctactcacatgggtttgatttcctggggaaatatgttgcaaggaagattgtacagggtgattacatttgacagtgcattgctgcctgcctcatggtttctctggttttactgagaactgaaattttgagctgattccatcagccctggccctgtccagttttcttcaaaaatggcttgtatctttgaagaatgttgctgttgttactgcacgtcccctgcgtgagtatgctgtatgcagaatacttgaaattattacaccatctgaaggtgaaggagaaatctgaaccttgacatacac

SEQ ID NO: 9050 - DNA, 2034 bp, Oryza sativa
  ref <308>: DATABASE ACCESSION NUMBER: AK106398
  ref <309>: DATABASE ENTRY DATE: 2002-08-28
caaaagcagcagtggcagcagccaccactttgcacaaaagaagcaaagtaaatggatggccatcgccgttgaggaagggttggtggccatctagagagagagagagaaactagagagagagaggggtgagcagctgagctctgcatctatatacagcactgcatctctctctatttctctctctatatatatctctatctacagtggattttctctctcctctctctctcttgccgttgctgttcgatactgttgttgtcctctcgtggccattattagatggcctcctgctgctgaaatgtgagtgagagctttgctttgcttgcttgctggctggctggctggctagctgggggttggcttcccctcatcctcgtgcatcatccactgtgctcggctcagctgtctgccctgttcttgctttggtggttggacggttagcatcttcctcctcaagctgagatccttcttgacgccattggaggggtcgctgtcgcctgcgtccttgagcctccctgcttttctttttctctctctctctcctcggcgagggagacgacgacgacggtggcggcggcgatgctgagcttcaagcagagccacgaggggttcggccatgtcgccgccgctggagctggaccgcagcagcagcagcagccgtggtgggcggggtcgcagctgctgtacggggaggcgtcgccggaggaggcggcgctgcgcgacggcggccagttccaggtcgtgcccggaggccgcgccgcgctggatccggcggcgccggagccggagaagacggcggtgccggcgatgcccaagagaggaggaggaggaggggctcctgaggtgctgaaattctcggtgttttcaggtaatttggagccgggagatacaggagagaagaacagagagcactctgccactattgcaatgcaatcgccgttgccagaatacaacggccatttcgagcttggtcttggtcaatccatggtctctcccaattatccttgtattgaccaatgctatggtcttatgaccacctacgcgatgaaatcaatgagtggcgggcgaatgctactgccgctgaacgcgccagccgatgcgccgatctatgtcaacgcgaagcagtacgaaggcatcctccgccgtcgccgtgcccgcgccaaggcccagagggagaacaggctggtcaaaggcaggaagccctacctccacgagtcgcgccaccgccacgccatgcgccgggccagaggctccggcggccgcttcctcaacaccaagaaagaagccaccgccgccggatgcggcggcagcagcaagacgcccctcgcgtccctcgtcagccccgccgacgtagcccatcgtccaggctccggcggccgcgcgtccagcctctccggctccgacgtgtcgtcgccgggaggcgtcatgtacgaccaccaccgccacgacgacgccgacgcggcggaccactacaacagcatcgaccaccacctccgcacgccgttcttcaccccgctcccgatcatcatggacagcggcggcggcggcggcgaccacgcctcacactccgccgccgccgtcgccgcccccttcaggtgggcgacggcggccggcgacggctgctgcgagctcctcaaggcgtgacagccttgaggcggggatctccaggcgtgcccagagctgctgctgatcgatcaccatcagctttggctgcctgtaggcaaatcattcttggctctttacttgcattggggttcttgcaagcaactctcctcgtcacctaccaaaactgtccctgaaacttctctagtgctggggtctcgatcagggatgatgatgtgatggaggagaggcttacccatatgcctgtaaattatggttagtgttctgattaagcaactagtagtacttggtaattactggctatgaattagtagtatggactctggtgtcaggttgctctttgtctgaataaactggagtcgtttgaagctttgcaacagctgtgagtgaaactatgtgcttgcttgcttg

SEQ ID NO: 9051 - DNA, 2512 bp, Oryza sativa
  ref <308>: DATABASE ACCESSION NUMBER: AK106399
  ref <309>: DATABASE ENTRY DATE: 2002-08-28
gatgatattagaacagaaggaattgatatctgttctagaaactcatagagaagaacatgttttaagggatgaacttcttgaaagaatcacagagaaaagaattaatttaattaacatggttttctccttaagagaaaagaatattcaggataaacaaggaaacgagaccacactgttagacatgcacaagcaaaaggaagtggcaaagctgcaagaaacatgcaatttggccgtggaacatcttcgtaaaggtcacattgattcagaggacagggatgccacggtgaagctaataattgaatggtttactttgcttctgtatgcatttttgaatcacatgagatgccagcataacaagttgaagatgcagcaatcaacttcatggaacaaggagttacaattgaaggaaattttccttcagcaagcgaaatctggccacttagatcgtagctttgatcaacaaattcctttaccagattcatgctttactttggaagaattcagccacttcaaggaaatagttggtaatttccctgtcggtgcagctacttcagcaaattgccagcattctttggcatcaaccatggaaattgcattggtccggagtgtcagtccatctgaagttgggaattcagaagcagcgataaatggggctgttgaagttcctgtccacaccgaaaaaagaccaacatcagaagttgggttgtcgcagaacaggatggacaatgattctgatggcattgactcacaaggagggccacctctggctgttcaacattcattaagttctaatcctgcaattgacaattccaataatttggaatcttcagttgccagccatagaagcgaacatcttggggatattgcagtggaagttaatgccgacaattgtggcactactcttgcagattcacctcacttagaggcaccaactgtggctgccctgcccagccagagtgccttgccaatggctatggaagttgacattcagacagatcatgtagttcagtctgcccagcagaacatagtgacaggacgagttccacaagaagaagagcgagaaggttcgaccactgtaacatcagctcagcctttgcaacctgaaatgcgaccatcaagtccagtatccggtattttgcgtgaaagaacaaatcctgatcagaggagggaaagtcgtcagccagaggctgcacctagttcggtggatccaacacaactctttcccgtggcatcactgatgtttaatcacccaccacttggcaatgaaccattgaaaaatgagctgcacagattacaagtacacatggattctcttaataaaatctacgaactgaagaaatcacaacttcaaacggagtgcagccaagaaatcgagaagataaaacagaagtatgatttgttaattaaagaacaagactccgctcatcatcagcacaggaagacactggatgacttgtatgggaaagttctcctaaaccaatcactagctgatgattttcgggtcaaatttgtatcaacatctgcagctcaagccagagccgtttctcctccactttgccagacaactcgccagacagctggggtatctcagcaggtaccaactaggccttcggtggctggatcgattgcattgccagtcggttcatcatcagctagtcgaccatcgctgcagaggcattgtgctcaaccatcgcatgtggatcggtcatcatcatcgggggggagtcattcatcatcgccatcttcacaagttgtacgacctcccccagcaatactaggcagcgttgtcagggcaacatcaactccttttagtcactcacctgcagcccgtggaaactatggagttgggagtgaagtagcacgggcaccagctccccatctccagttcaggctgccacgagcacatcccacggcccctgtaaatcagcagcagcggcagctcccagttaggctagagagcacatgttcaaggacacagttgactcctgtgagcaccccagtaaacgcaaggcagttgagtccacaatcagtttccccggtgagcaattcatcatcatcgtcaagctcacatccaggtccagcacacctcgcactcgcatggatagtcatcgtacagtagatgtggtgtgcttgtccgatgacgaaccagaagagcactagagctagagctagactgacctgacttttgtagtacagcagtattttcttggaatgccattttttgcctgcctggcacaaggagctgaatttggccggactggtggcttgcatgtatatgttgttactactagtttgttattagtagtaccattccattctagcttagcttgtaagctgggtgggttggggttcccttccctccaggccttgtgcagcatgcctagtaaggtctgctagggtaacttaggttgttgtaaatagtactaagtaattagtactgtacaagtaataacttgctaaccagccaaccaggaagtgaattaagcatggtggtaatggcctccttggttgc

SEQ ID NO: 9052 - DNA, 1656 bp, Oryza sativa
  ref <308>: DATABASE ACCESSION NUMBER: AK106400
  ref <309>: DATABASE ENTRY DATE: 2002-08-28
tcgcgtcctcttgtcctcacgcagagagtagacttgcactgctcttttatctctttctctggccaccaagccggttgttgtatattactagtagtaatccgtcgccgatagctgcttcgtgttgctcgatctttgaccagccagtggggttggaggagggagggagctagctatagttgctagcgtgtttacgtttttgccggcgaggcgatcgacggagatgtttgaggggtgctacggcggagtcgggtcggcggcggcggcggcggcgcgggacccgaagccgcggctgcggtggacgccggacctccacgagcgcttcgtcgacgccgtcaccaggctcggcggcccggacaaagcaacacccaagtcggtgctcagattaatgggcatgaaaggcctcaccctgtaccatctaaaaagccacctccagaaatatagactgggaaggcaaagcaagaaatcagcaggcctggagctagcagtagcagatagtggtggtatgtgcctaccttgaaatattactgtcatgactcatgagcagaatcaaaagtatcatgccttaaagctaagatttgtccacacttcctacctttattttatcagaatttacagcggaaggcatcagtttttctatcggagcgcctccaaggaatcctgccggaggaaacaacacggggtaactagcaattgcccttctgcttgtcctcataatgcactacaatagaatcatcatagtctattacagctacaatggtatatttgtaatgggatgtaaatcctactgaatgccttttgttatgtgatctttggggatttttaatttccttcagtggaagttctatgagtgtctgactaaccatctttagaacatttctcttgtgaagcagagaaataccgcttgcagatgcgctaaagtatcaagtcgaagtccaaagaaaactgcaagaacaacttgaggttcaaaagaagctgcagatgcgaatagaagcccaagggaggtatttaaaggaaatactagagaaagctcagaaaaacatttccctggatgtaaatgggtctgctaacctctcatcaaccagatcacagattacagacatcaacctagctctttcaggtttcatggacaatgcaacacaagttcaggaggaaaacaatgaactgatgaaacctatatctgatgacaacctaaaagttaataatttgggctttcagctctaccatttaggaagtcaggagagtaaggatgttaagtgcactccaaaaactgaagagttgcttctactagacttgaatattcaaggaggatatgaactctcttctagaggaatgcaagggtgtgagttggatctgaagatcaaccagcagagaagatagagagttgtttcacaaacctaacagttttggaaagttgaccgttcgctattagtttattctttttccatgtgccagtgttgagcatgcttgtgttcacaagtttgttttttctgtctgctaatgttaaatttcctgaaaggaacttctgaataaatatggtattatttagttgtttgaagcttcaattgtatatacgagtgaagtgtgcaaaatgagggaacatccaacacagatgtgtatattctatccaagtatcctataaattgatgttttactttt

SEQ ID NO: 9053 - DNA, 1599 bp, Oryza sativa
  ref <308>: DATABASE ACCESSION NUMBER: AK106401
  ref <309>: DATABASE ENTRY DATE: 2002-08-28
acagatgcactgatgtatcttgtacacggtacacccaaagttgcatttctttgctttctccgtagccggtgcacgtaggtacgtatgcaaagaaattagcaaggtatagaacggttcaacttctaatccatttgctgggccgctctcgctctcagtctcactccaagctccgatgctctccctctccactccgtcgtcgcctccgcctcctcttcctcctcgccgcgccaccaccgctcccacccccgtcagcctcctccgcggggcagctgaccggcgggatgcgccgctcacctccgcgctccacgctgccctcctcaagtccggcgcgctcgaccgtacccagcctctcaccgcgtcgaactctctcctgcactgtttcaggatccttgaagtatggaaagggaatccatgcgcacttgattaaaatgaatgatttgccaagcattagcatcgaaaactccctgatgggcatgtatgctagatttgagcaagttgatgcagcatatgtggtgttcaaaggtatgcaaattaaggatattgtttcgtggaacaccatgatctcatgcctggtaaagagtgatcatgtggatgaagccttggagctttttagtattcttcatggtggtgatggacttgtgcctgactttgtcactgtcttgagcgtagtgcaggcatgttctaatgctggattactgcagcaagggcagatgctccatggatacattataaagtctggatctttgtatgatgtctcaatctgcaatgccctgataagtatgtatgctaagttgggaagaattgatttctctgagcagatatttgagcagatggatattaaggacatcgtttcgtggaactcaatgatcaatgcttatggtattcatggagatgggctatcatctctaaggatttttaatgagctgcaggatgatggaacatgttcacccaatgctatcacatttgtgagtctgatatcggcttgcagtcattctggtttggtttcagaaggctacagatgctttcaaagcatgaaaaacgactacagaattgagcctagcatggatcattatgcttctgtagttgatctacttggaagatctgggaggtttgctgaggcagaacaatttatcagaaacatgcctgttcatcccaattcatccatttggggacctcttctggctgcttgctctctttacgggaacattgatcttgcagaaaaagctgctatagaattgtcaatcttggaaccggagagtgacatatggagagtctccttgtcaaatgtctatgccgttgttgggagatggaaggactctgcaaagattaggactgaaatgaagagagttggcttgaaaaaggaagcggggtggagttttgtagatgtaggaggggtcgaaggttttaagtttgtggcagcagatacaaggcacggcgactctgagcaaatatatgcagtattgcgcagtatgaacaaacacatggcagatgtagctggtgatgtacatcaatcgagtctagtgagtgtaattagttgatgtctcaatatactcatatacactgattctctcttttaatttagtaatttactaatgtgtg

SEQ ID NO: 9054 - DNA, 694 bp, Oryza sativa
  ref <308>: DATABASE ACCESSION NUMBER: AK106402
  ref <309>: DATABASE ENTRY DATE: 2002-08-28
taaaacaaactgcgaaggagattaattagatagacctttttatttttcgtcatttgatcacgaaaacagggattctggaacggccaagaatcccagcggttgttcgggtcgaaaaaccgagaacaagacatgccacaaagtggcagatgaaggcaggggggagagcctagtctctccctcttgtctctctcccgctcatgggcggcggagcgacgaggaggccggctggaacggcgcacggcggccgagcaacgaggaggccggctggagcgggcgacatcgtggcggcgctggggggcgggggtggacggaacgggtgccccggcgcatggcgtagaacacctcctgctcgaacgccgggtcgccgtcggcgaggagacggtggacgagcaccagcatcttgagcgtgacgcccaggcagcgcgacagcgacgcgacgcaggcgcaggagtggagcgtgagcgcaatcacctcccggacgtggtgctcatcggcggggaagccatggacggtgtgggagaggtcacgcctgacctcttgacacatggatactctcgtttaattatctcgttattacaaacatggttaattacaacttccaaataaagatcaaagcagacatattatgttaaacttgtgcctgcaaaagctgttttattcagttaggatagtactttcctttcatgcacgttat

SEQ ID NO: 9055 - DNA, 1387 bp, Oryza sativa
  ref <308>: DATABASE ACCESSION NUMBER: AK106403
  ref <309>: DATABASE ENTRY DATE: 2002-08-28
aaaaaaaaaaaaacccttgctcccacaggagtgaacacgacgcgacccgagccggagaaggggaagggaaggcggccgccgcgcagccgccgccgccggtcaccgccgcgacgctcgtctacctcgagagccccaccgacaccccggggcagaagctcgtcggcgcgctcctcgacgccgccgtcttcgtcgccctcgtcgccgtcgtcaccttcgtcctcgtcgcgctctactactaccgctgcacgggcttcctcaagaactacatgcgcttctccgccttcttcgtcctcttctccatgggcggcgccatcgccgccgccgtcctccgccgcctcggcgccccgctcgacgccgccaccgcgctcgtgctcctcttcaacgcctccgccgtcggcgtcctctccgtcttcgcctccgcggtccccatcgtcgtgcgccagggctacatggtcgccctcgccgtcatcgtcgccgcctggctctccaggctgcccgagtggaccacctgggtcatgctcatcgcgctcgccctgtatgacctcgtcgccgtgctcgcgccgcggggtcctctcaggatgcttgtggagctcgcctcatccagggacgatgagctccctgcgctcgtctacgagtcgagaccgacggttgggccggcctccggttcttcctcctacgcttcagccatgggatcagttgagatgcagccggtggccgatcccggtcgatcgggtggaaatcagtatgacagagtagagcaggaggatgattcgagccgcgccgtggtggaaatgagggatgttggtggtagccgatcaagcattcgtgagaggaacctcgaaagggaggcgccgatggcggtatcggtatcagggcattcatcgaatcagggtgggagttcacagcatgctgtgattcagattgagcagcacgaggaaggagagacagtgccattggtatcagcggcatctgccaacaatgcagcccctaatgaggagcacagagaaaactcttcttcagactctggtatggagttcgagatgttcgagtccaccaggggcatcaagctgggacttggtgattttatcttctacagcgtgcttgtggggagggctgcgatgtatgatctgatgacggtgtatgcgtgctaccttgccatcattgctgggcttggctgcacccttatcttgctgtcaatatgcaagcatgcattgcctgcactcccgatctccatcttgctgggtgtcacattctacttcttgactcggttgctgatggagccgttcgtcgttggctcttcaaccaacttggtgatgttctgattaatctgctattgccattttacatatgtgaaacaagaaagaggaaatgattggcattttttttc

SEQ ID NO: 9056 - DNA, 1871 bp, Oryza sativa
  ref <308>: DATABASE ACCESSION NUMBER: AK106404
  ref <309>: DATABASE ENTRY DATE: 2002-08-28
ccccacccaagctcacacatctccctctctccctcttcttcttctcctcctctcgccatggatgccaccaccaccgtgtccatggagatggaattgccgtggggcgcgcggtgcgcggggctcgccttcttcgcgttctcggtgtgcctggcggcgctcggcgtcgtgctcctggtggcgaggcggtggccgtggtacagctgccatgtgtgccgcgcctacctgacggggtcgtgggcgagggagttcaccaacctcggcgactggtacgcgcacctgctccgccgctcgccgacgggaaccgtccacgtccacgtcctcggctgcaccgtcacggcgaacccggcgaacgtcgagcacatgctcaggacgcggttcgacaacttccccaaggggaggcccttcgccgcgctcctcggcgacctcctcggcgacggcatcttcaacgtcgacggccacgcgtggcgccaccagcggaagatggccagcctcgagctcggcagcgtcgccgtgcgctcctacgcctacaagatcatcgcccaggaggtggaggcccgcctcatgccggtgctcgccgacgccgccgaccggggcgccgtgctcgatctgcaggacgtgttccgccgcttcgccttcgacaacatctgcaagatctccttcggcctcgaccccggctgcctcgaccgggaaatgcccgtgtccgagctcgccgacgcgttcgacgccgcgtcgcgcctctccgccatgcgtggcgcagcggcgtcgccgttgctgtggagggcgaagcggttcctcaacgtcgggtcggagagggagctcaggaaggccatcaaggtcgtcgacgagctcgcggcggcgatgatccgggagcgccagaagctgggcgtcggcagcagccacgacctcctgtcgcggttcatggcctccaccggcgtcgacgacgccgccgcggacgacaagttcctccgcgacatcgtcgtcagcttcctcctcgccgggcgggacacggtgtccaccgcgctcaccacgctgttcatgctcctgtccaagaaccccgaagtcgccgccgccatgcgcgcggaggcggaggccggcgacggcggcgagacgggcgccgccatcacctacgagcacctcaagggcctccactacacccacgccgtgctgcacgagaacatgcggctgttcccgccggtgcagttcgactccaagttctgcgccgccgccgacgtgctccccgacggcacctacgtcggcggcgacgcgcgcgtcatgtaccacccctacgccatggggcggatgccgcacatctggggcgccgactacgccgcgttccggccggcgcggtggctcaccggccccggcgcgtcgttcgtcccggcgaacccgtacaaatacccggtgttccaggccggccaacgcgtgtgcctcggcaaggagctcgccgtcaccgagatgaaggcggccagcgtcgccgtcgtgagggcgttcgacgtcgaggtcgtcggcgagaatggccggagcggcggcgccgccgccgcgccacggttcgtgccggggctcaccgcgtcgatcagtggcgggctccaagtgagagtcaggcgccgcgttcacacttagacagctaggagacttcacttctactgcaacaacaaactgaaacaagttattacaggcttgtacatagaaaaataggagaaattaattagtagggaaatttgggtttctaatgagacaaaacagaaaattcagatattgattcgtgttcgtcatggtttcctcgtatggtgatcattctgcaattggacattgttagttgaaatcacaaatcgggtaatcgaaaacaaaagaaaaaacatacaaaattgggt

SEQ ID NO: 9057 - DNA, 1649 bp, Oryza sativa
  ref <308>: DATABASE ACCESSION NUMBER: AK106405
  ref <309>: DATABASE ENTRY DATE: 2002-08-28
agtccagaccagttcctagctccgaacagagtccttctccgaagtgcgaactcgctgcaagccgaatccgccgcgccgccacacggagacgagagggagaggtcgagagggagagggcgagggcgagatggacgcggcggtgcaggaggcgaagctgctgcgccaggtgaacgccctcatcgtggcgcacctccgcgaccacaacctcacgcaggctgccgccgccgtcgccgccgccaccatgacgcccctcgccccgcccgagcccgacggcgacgactccgtccccgccaaccagctcctccgcctcgtcgccaagggcctcgcggtggagcgggaggagacggggaggggaggaggggcgttcgactctgctgccgccgccgctggatacggtggattgttgccgccgctcggcaccaatgccgtggatttcagcacgcaggatgttaagggctcatccaagagcttccccaagcacgaggccaggcacgtatctgatcacaagaatgttgtccgatgtgcaaaatttagtcctgatgggaaatattttgcatccgggagtggtgacacatcaattaagttcttcgaggttgctaaaataaagcagatgatgctaggggattccaaagatggccctgtccgtcctgtgatccgtactttttacgatcacacgcagcccatcaatgatcttgattttcatcctgagagccccatactgatatctgcagcaaaagacaatacagtaaggttcttcgacttctcaaaaactgttgcaaggaaagcattcagagttattcaggacactcacaatgttagatccgtatgttttcatccttgtggggattaccttttagcagggactgatcacccagtggctcatctatatgatattaacactttcacatgctacttatcggcaaattcacatgattccaatgctgccattaatcaggtccgatactcttctactgggagcctgtatgtgactgcttccaaggatggttctctgcgcatctgggatgggatatccgctgaatgtgtccggcccataattggagcacatgcatctgcagaggttactagtgcaattttcacaaaagatgagaggtatgtcctatcatgtgggaaggattcttgtataaaattatgggaagttggctctggacgacttgtcaagcaatatgtaggcgctgttcacagacaatttcgatgtcaggctgtcttcaaccaaacggaggaatttgtagtatcaaccgatgaacaaaacagtgaggttgtcgtctgggatgcacttaccgctgaaaatgtagcaaggttgccctctggccacaccggtgccccgaggtggcttggccactcccctgcagaaccagcctttgttacatgcggtaacgatagatccgtcagattctggaaacaaaccgtgtagaaaatgtagatccaccaacgaatcaacccagaagttggtggtagaattaactaatacattgagattaaaaaaccttgttcatgtgctgttccttaattatttgattagttgtacacttgtacatgctactgaagttgtacactgatgatactgtacccaacttggtaggaaaattttggctcttgttggcattcatgtaagcagaattcagaacttg

SEQ ID NO: 9058 - DNA, 1637 bp, Oryza sativa
  ref <308>: DATABASE ACCESSION NUMBER: AK106406
  ref <309>: DATABASE ENTRY DATE: 2002-08-28
tgcgaagagacacaaagctattgaaatctggcaggaagagccagcaagagagcacggtgaacatcgaacagcgcaaagagatcgaccacgctggccttgagaaatcgaatgagttgttgagggagaagctccacaagctgcagagcgaggtgcaggcactcagaagcaaagaacagccggtgatcgatgtcaagtcctgcgatgccgagatcacaaaactgcttaccaacatgcagatggccactgccaacgcggctctcttcaaggagaaggtgcttgagctcatcgcgtcgtgcgagagcttcgagataagcgagatggtgcagaaggaggtcctgaaggaggagatcacccggaggaactcctacgtgaatgcgctcaaggacaagctcaacgccgtcgagatcgagaacagtaggctgaaggttgatctcaatggtgacttcacactgttgggagcgttgcaaactgaagtcagtgccctggagaagcaaaccatgtcactggccaaagattgcttaccatcaaataagctcaggatggaggaattctcggtgtcaccgcagctgtccaagatcgcggtgaagcccatccatggtgagccgaacgcgacgaagatggtgaaggacatggagctggagaagctgcacgggacgatcaaggcgctccagaaggtggtcaccgacaccggcgtcgtcctcgagcaggagcgcctcgacttcaacgccaacctcctcgacgcccgccgccagatcgacctcctccgcctccgcgacgacatggccgccgccgtcgacgacagcgacgccgccagcgacccagccgccgcggcctacgaccgccgcttgctcaaggacatccagctcgacctcgtccagaccacaactccgaccaaccggagccgagctgccaccgccaccgccaccgccgcggcgtcatcgcagcgtcaccaccggaggaggaacggcggctcgacggaggcgccgccgcttgggctgtggagcgtggtcagagcgagcaggcggcggcagcaggaggagggtggcgatggcgatgacgacgatctccagccgcagccagcgcaagatcctcgagcgtgtccgcaagatgtcggagaagatcgcgcggctcgagcaggagacgcagcgcttccagcacgcgctgctccgccacgaggaggagcgcgccacccgccgcgccgccgccgccgcggcgacggcggcggcgagcagcggcaagtcgtccgccgccgtgcagcggcgatcgtcgagggtgcagctggtggagtacctctacgggcgccggcgcgacagccgccggcagcggcgcgggccgtcgtgctgcatgagagccaaggccatcgacgactaactctaatcaagaatctccatggatggatggacaaagcaagaagcgtttaatttttatttactacttcgttttaatttcattttacccagttttaattaatcaaaagtgaaaaactcgtaatcattttaatgtcgtgggggtgtagggtaaataatctcgtggactaatcctagtttcgtgctcttaatcatatatatatcatgaacttcgattaagcatcgttgtaaatggttaattaattagtaatttttcctcctcgttattgt

SEQ ID NO: 9059 - DNA, 1360 bp, Oryza sativa
  ref <308>: DATABASE ACCESSION NUMBER: AK106407
  ref <309>: DATABASE ENTRY DATE: 2002-08-28
gaggattcccagtgattgggaggtgcgtggagattgggcttccaatgcttgtcctgtttgttgctctttcccaatatctgaagcatgtacaagtgcgccattttccgatattggagaggttctcagtgctcatttcgatcgcgcttgtctgggtttatgctcacatcctcacagcaagtgggacatacaaacatacctctctgctcacccagataaactgccgaacagaccgtgccaatctcatcacttctgcagactggattgacatcccatacccactgcaatggggtccgccaacattcagcgcagatcatgcatttggtatgatggctgctgttgtggtgtccttgatagagtcagctggagcattcaaggctgctgcgcggttggcgagtgcaacacccccaccaccatatgtcctcagcagaggcattggatggcagggaattgggctgctgtttgatgggctatttggtactggaactggctccacggtctctgtagagaacattggtcttcttggatcaaccaggattggcagcagaagagtgatacagatctccgctggtttcatgatcttcttctccattctagggagatttggggctctgtttgcttcgattccattcacaatgtttgccgccatatactgcgtcatgtttggatatgttggtgcagtggggctctccttcatgcagttcaccaacatgaactcgatgcgcagcctcttcatcatcggcgtctcgctgttcctcggcatttccatcccggagtacttcttccgctacaccatgagcgttctgcacggccctgcacacaccagggcaggatggttcaatgactacatcaacaccgtcttctcctcgcccccgaccgtcggtctgatcgtcgcggtgatcctcgacaacaccctggaggtgagggatgcggcgagggaccgggggatgccatggtgggcgaggttcaggacgttcagaggcgacagccggaatgaggagttctacaccctgcccttcaacctcaaccggttcttccctccatcttaaagacaagctcttggaggcaaggagagctaaagcattaggaatggaagccggccattgagtgaatctaaccatccccaccatggttgtaattgtggttgtgttctccatagtgaaactaagagtagagaggtagatgtagaagaagtagagcaaaagaaatgctgggaatggctagaaactccagtctttaccagcaagaacaaaaaaaaggatggaaattggttgggtttgatggaatgcttgcctggattcattgtacatgcattttgagttcatggttagtgatgagcaatgagattgacttgatctgtttc

SEQ ID NO: 9060 - DNA, 2069 bp, Oryza sativa
  ref <308>: DATABASE ACCESSION NUMBER: AK106408
  ref <309>: DATABASE ENTRY DATE: 2002-08-28
atgccgcccttttgctgcccacgtcgccgccgaatcaagcgccctcccactcgcgccctcacgcccaaaccgagcgaaatcggttcccctccatctcctccaccaaatcccctacttttccccaatttttggcgccaaatcaagtccccacttcacccacgttgagctccacgtcgccggctgctgccgccccaaattcgccactccccggcctccccgttgctccctcgcgctataaaaatgctctcgagtcctcctcttccgtttccccctccttcccgagctcctcgccccccctcccgctctccccacgtcgagccgtgcgccgccgcttgccatcgagctccagccggtcgccaccgccgctagtctccaccgcgccaatccgccaccgccgttagcttcgccgcaccacatagcaccccggcatccactttatttccccgaaccaccaccgtgacgccgtgtccacacgcagcccgagccgccgccgctttttccgcctcttgccgccgctcccgtcgctgccaaaccgcgccactgccgtcgtcggcatctccgtgcctagctccaccccggcagctgctcctctccctcaaatcgccaccacaactaccatcccaccatgcaagccgagccgttgccctttccaccgcctccggccactccccgccggcgagacaggcctcgcccggtcgtgctgccgccaccctcagcaccaccgcgctccaccgctcctcggcgtccactcctcttcgccgaagacccgccggaatcccaaccacctcgcattctggtctcgccgaccctcggcctcccctcctcctgtgccgcacgccgccaaatcgtcgtcgttgtcctcgcccgagggacaccgccgcctcctcgcctccctccgtcgaccgcctctccccgccgtcgactgcttgcgtgtagaatccgtcgtttcggaagttcgcggtcacgaggataagagttcagaagatccaagtgaagaagcaagaagtgtagagcttctgagctgaagacgaagttataggaccaaggctcagaccccagttaagttttgcctgtggagtggagctaaagccccgctaagatcgcctttttccgctgctgctgctttcttttcgattctggaaatttagggctaaatttctgggcgtgacacgacgtcggcaggatcaggagcctcgagcgcatgtgtgtctcctcctcctgtgtcatgtggggaattttgtttcacaaacgctgtgaaggaattggacaccgaagaatggtcgcatgggaggaagttcaggtgcgcaaagtcgtagctgattagggtttcgttttctattcatatttttagagacaaagttgttaaatgagtttgttagtctaagtcttataaaagctgtaatcaggatggttcggatcaacaagagaaattaatctaaatcttcctgctatattctaatccttcttccccatcggtgtgctcttccccagcgcacttctttctttttgttcgtctaattgccaacatgcctcgaccgtcgaggcgattgaggcgttggtgttgacgaccaaatttggtagtaccatgggttggattcaaaattggagaccaagccgattcggaaaaagcccgttcgggaaatctgagtacacgtcggctatgaacagcatcggctaccacacaaattggctacagtggtatcggctaccacatatcggctaaacaccggatcaaacaaagtcaaagccggcgccaccaatctcaagaaaggtggccccataaccgtcgtcgggttggatgaagacctccatcgttattgccacacaaggataggagtcctgaaaagggcaattgtatctattaattaggacattttctagttttccttagagatagtttggtaatggtccacctgaaggactcatttgtattttgaattatgttagagataagagtcgtgtccagcaaggacctgtcatgtacttcgggtataaatatggcccgaccccatgtaatcaagggacgacagttcaatacacttcggcgcatcgccaccctttttaccctt

SEQ ID NO: 9061 - DNA, 1360 bp, Oryza sativa
  ref <308>: DATABASE ACCESSION NUMBER: AK106409
  ref <309>: DATABASE ENTRY DATE: 2002-08-28
atctgaaactactcatgggtgtctttcaaaagggagaagatcagaaaggagagagtgcaaatatgaagcctatacctcttctaagttcttatgatatggggaagttcaacttgtcacacagggttgtgctagcaccactaacaagatctagatcatatgacaatctcccgcaatcacatgccatggaatactactcacagagggcaaccaaaggaggccttctaattgctgaagctacaggtgtgtcatctgatgcacaagggatgagtgtaatccctcacaccccagggatatggaccaaggaacaagtagaggcatggaagcctattgtagatgcagtgcatgctaagggtggtatatttttctgtcaaatctggcatgttggaagagcatcggacatggaggaacggcccatctcaagcacagataaacccatagagaagactgaagagaactacttcctgggtttctccaccccaaggagcttaactgttgaagagatccctgatgtcatcaagcatttcacacttgctgccaaaaatgccttggaggctggttttgatggggttgaggttcacgccgcaaacggcttcctcctggaccagttcatgaaggacggcgtcaacgcccgcgccgacgagtacggcggcggcgtggcgggccgctgccgcttcgcgctggaggtggtcgacgccgtggcggcggaggccggggccggccgcaccggcgtccgcctctccccgtactcccgctgcctcgactgcgccgactccgacccggacgcgctcgccgcccacatggcgcgcgagctgggctcgcgcggcgtcctctactgcaacgtggtggagccggagatggtggcgacgccggcggagggcggcagcggcggcgagacgatgcggatcccgcaccggctgcgcgccgtgcgggaggcgttcgccggcacgctgatggtcggcggcgggtacgacagggaggagggcaactgggccgtcgccggcggctacgccgacctcgtcgtctacggccgcctcttcctggccaacccggacctcccccggaggttccggctcggcgcgccgctcaacgggtacgacagggcgacgttctacaccgccgaccccgtcgccggctacaccgactacccgttcctcgacgacgacggcgacgacggcctcgcggcgtcggcggcgtcggcgagctccaacaagagcggcgatcaggacggcgtttagctccgaggcagtacactactgcaactgcacctgaataattcttagcttttttgctgctgcttaagctttaataatgttgacaatcgagagctctcttcgttgatccaaaccatatgtttctgtct

SEQ ID NO: 9062 - DNA, 1947 bp, Oryza sativa
  ref <308>: DATABASE ACCESSION NUMBER: AK106410
  ref <309>: DATABASE ENTRY DATE: 2002-08-28
agtccacaccacacgacgccccaaaccctcgtcggctcgtccccttccctagttcccttccggccccggcggcggcgagcggcgaccatggacacccgcgtgccgcccgtccccatgggccgcgcgatggcggccgagttccggcggcgcggggacgacccggacgacgtgcaggggacggtggcgcgcgtgctctcctacatccactacgccctccccgacccgcccgtctccgccgccgcgcgcctctacgcgctcgccccgcacgacgccgtcgaccgcatcagcgccctccccgacgcgctcctccgcagggtcgtctcccgcctccccgtcaaggacgccgcgcgcaccgccgcgctctcccgccgctggcgcccgctctggcgctccacgccgctcgtcctcgtcgacgcccacctcctctcctcctcctccgccgcccccggcgctcccgacgactcctccaagaaggcgcgggaggcggcacgcggcgtcacccacgccgtgtcccgcgtcatgggcgcgcacccgggcccgttccggtgcgtccacctcacgtccagctgcatggaggagttccagggcatgctcgcgaactggctccaggtgctcgccatgaagggcatccaggagctcgtcctcgtgaaccgcccgtggccgctcgacctgggcctccccgccaccttcttcggcatggccacgctcacccgcctctacctcggcctctggaagttccccgccacggctgacctcccgcgcggcgtctcgttccccaacctccgcgagctcggcctctgcagcgtcgtcatggacacgcaggacatggatctcgtcctcgccaggagccccgtcctggagacgctctgcatcaaggggaacctgttcaggatgcgcatccgcctcgccagccgcagcctccggtgcgcgcagatcatcggctcctcctacgaggagatcgccgtggtggacacgccgtgccttgagcgcctcatcgtctccggcacatggaggcatgacggcgcctcctccggcagcgtcaagattgggaatgcgccggctctgcgcgtgtttggatacttggaccctgcagcgaacgttcttgtggttggcaaaaccgccatcaagtccgcgacaaaggtgagcccaagcaatatggtaccaaacgtcaagatccttgctctggaggtgcgtttcggtgtccgcaacgatgccaagatgatccccaatgtcctcagatgctttcccaacattgagaggctccacatcaagtctggaaaaactgatgaaaccactggcaagctcaacttcaagttctggcaggagtctggtcccatcgagtgcattcggtcaagcatccagatgattgttttccatgattttcatggcactcggagtgaggttaactttctcaagtttttcttcgagactacgcgggtgctgaagatagtggtcattttgtttgacactggaagtttttcttcgatggatgaggtgcgttccaaggtggaggttctgagggctgcaaaacggccgactggttgtttagtcctggtcaccccaagtacagaacctgaagagtgtaacatttggagcttcaagagaggatctgatttttctcgttttgaccctttcacggactactgaaagaaaaagatgcatttccatgtcattttgtgatccaagacaaatatctttggaagtggttagtgctctgtttgcagcttcatggtattcatgttagagtttcggcttcccttttattgaagattggacagcggacttgattatactgtcttgagaagtgttgaaattagtgcttgaatagtgttatctatcatgcaaatgtcaaattatgttttctggatgacaactaagaactactgtgtctgctatgcgtttcatttgttgttggacgatgatgatgttatgttgcactgttttgct

SEQ ID NO: 9063 - DNA, 2632 bp, Oryza sativa
  ref <308>: DATABASE ACCESSION NUMBER: AK106411
  ref <309>: DATABASE ENTRY DATE: 2002-08-28
ctacaacgccctcatgtccgcctactcccgcgccggccgccacggcgaggtcctccgcctcttccgctccctgcccttcgcccccacggcgccgctctttaccacgctcatctcctccctcgccgcctcagggcggcccctcgccgcgcgcgccgccttcgcctcgctcctcaagtccggcgtcccgcccaccgcctccgccttcaccgcgctgctcaggtcgtcgagcgacgcgctcgacttcgtggacagcgtgttccgcgccatggaggccctgggctgctccccggatgccgccgtctacaactgggtcatctcgatgctctgcgacttccagctggtgcaggaggccctggggttcctcgaccacatgctcgagaacggaccgcgacccaccgctcgctccttcacagcgattctacgtgcttactgcgagcagggaaggttcttcgacgcagggagattagtcgatacgatgatccagaacggttgcccaccggatgtagtatcatacaccgtgctcattgaggggctctgccgtgttggggaattcagcacggtggaaatgatcttaggtgaaagtgagtcgcaagggtggatgccaactgctgttacatataatatttacatgtctggcttgtgcaggatggggttcttggatgaggcatttcgtcaagtagatatcatgcgcggcagagggctgtccgtgacagctgagacagtgcatattctcttcgattgtttgtgccgaaatgcaatgttttcagaagcagtgtgcttgctggaacatagtgaagagctgggctgggatgttgatgtgttttgctataacactctgatgagtaggctttgtgacgttgatgattttgccagggtcttgaagctgctggttgatctgttgaagaagggcattggaccagataagtttagttttaccattgcaattcggagcctctgccgagctgggaaacttcggctggcaaagtgccttatagaaaataaggggattaagtatgatgttgtggctttcaataccttgattcatgggttctgcatagctggggatttagacagggttcagcaaactcgtacagatatgatcaatagggatgttattccaaataattttactgatgcaatgctgattgatagtttatgtaaagagcgaaagtttggcgaggcaaaaagatttgttcttgactctttggtaaatggtttggtgcctgatcatcttattcgtctgaataattggttggtaaaagcaaaaaaaatgacactgttactgaagttactctatgaaatacgctgtaaaggaattgtggtagatacttccattatcagtccattggttagggtattttgctgggaggggtactgtcggcgtgacaatttctatcaaatttcacctatacttgacattatagtaacatatgtcgagcagtaatggagcgcagagcagtgtgattatgtgaaactcattttggttttattctctgctaagcaaacaatggttgacaattgctacatcagagataatcatctttcatcaggtcagttggtgccagaaaatatattatctataatattaatgtcttcacaagatattaatctttgttaggttttcaggggaggaatagctgagtttgaacaaatgacacttagatttgaggagtccattcgaagctatcaagtttaaatgtgcttttagataaataatggacagagaggtatgcttttttttgggggggcttgttctgtatttactcccacaagggcaatccctatgctgaaatcattgtattataccacctctgtttttttgtgaaagaaaatcattgttgtactagatatttttggagatgacatgtccttttgttgtaattttgactcttcaatagaaacttcaataagccccaggttctttttagaaaaaccgaatctgactttcttttgtttattaatggtgacaatcacctaatggtctgaaatgcccttcccttgaataggagccagtggtgacaagtcatgggtatggctaatatgctggaaggtgcacttgttgacattataagttctcaaccaaggtctcttctgcatatacatatgaatgcaaccttggaaatgaagggtggtcacgcatttgtcaagtgtactcatctgataagatgtctgagagcatgtctagtatgaacacatttgttcattcaactttggatcatcgatgtgaatttatcattttagccgagtaacaggaccatcttcgttttcatttggggtgtggaaggctggaagctgctaggggcgcatcaacctacttagatttgcctacccatttggatgatgataaatcacatgggctacacaatatacattcggtgtgccctacttggaaagtgatgtgctgttagaatgagaatggcataggcatactgtaattagcataagagtttgttggatggaccttgtaactcctgtctcctaagttccctgagatggcactgtaatagtaactagcacttctgagtcgtgtgtggagctctcagacctaacttatttgctagtagatgagtagagacacagaactgcttagtgctactgtttactgcctgaaacacagttcattcttctggtc

SEQ ID NO: 9064 - DNA, 1764 bp, Oryza sativa
  ref <308>: DATABASE ACCESSION NUMBER: AK106412
  ref <309>: DATABASE ENTRY DATE: 2002-08-28
ctcacgcaagggggccaaccccgcgaggcgctcgcgctgttcaagcggttgcgccgcgccgggctcccgccgaacgagttcacgctcgtgagcgcgctcaatgcgagctcgttcgtcggtggcgccggcgttggccgcgcgcggcagctgttcgcgctcgccgtccggcttgggttcgactccaacgtcttcctcacgaacgcgttcctcgcggcgatggtccgccacgggcagctcgccgacgcggtgcggctgttcgacaatgccaatgcctgggacatcgtgtcgtggaacacgctgctcaccgcgttcgcgcaccgttcatccctgcgcctgtgcacgctctggcgaaggatggccatcgaaggtgtcagcgcagacggcttctccttcagcaccgtgctgtctgggttgtccggaagcgcgaacgtggcggcgaccggcttacaagttcacgcgcagcttgtcaagagcggcttcgtcgacgatgtctgcgtgggcaactccttgctggagatgtacatgaagaacaaacagctggaatccggcatcagagcattcaccgagatgcgccatagagatgtcgtgtcctggacagagctggctgcaggtctcctacattgtggagagcctgctgagtccctcagagttgtcagtgacatgatcctggatggaatcaggcctaacaactacaccattgtagctgctgccaatgcttgcgcgaaccttgccaatctgaaccaaggaaggaagatccatggatatgtgatcaagctgggaggagactccaatgtgggtgtcaacaatgctctgatcgacatgtatgcgaagtgcagatcagtaaccggtgcacacaaggtgttccagtcgatgcagcgacagtcggttgtgtcctggacggcgatgatcatggcgtttgcgcagaacgggcaagcgagggaggctgtgaaggtgttcgacgacatgctgttggaaggcatggcaccgaaccacgccgcgttttactctgtcctgtatgcttgcagccaaggtgggtttgtggacgaaggctggatatacttcgacgccatggcagacaagtttggtgttgagccaggcgaggatcactttgcttgcatggtcgatctgctcacaaaggcaggtcgcatcgaagaggctgaagagctgatttctcggatgccatttcgccctggagttgttgcctgaaattttggatgtgatctgatgatgcttgtcaacttcacagcaacgagactgcaggcagacgagatgtaaagcatgcacttgagcttgtagttgttgctgttaagcatacataatggcagcagaggtgaaaggactcaaggggacagagaagccatgaagctgcccatctctattttgttcgagtccatgcctgagaactgttgccaggcacactttcaatttcctatttccatgtcaaaagctgagagaaggcaagctttgtacaagcacctggtaggcatcacctacggtctacagagataagttgattgattgtccaaatgatggaatttttggctcgatggatttctgcataacctcgtgggtaaaaagttgcacctgaccaacaaatacaatgtaaaaatttaatccttcgtaaacgaaattggttttcagtagggcaaatattatcatttgaacttgcttagcaattaccccttctattgttttcttaaggtacacacgctgagcctcaatttttttttcaaccaatagttattccaaaaactatttctttcc

SEQ ID NO: 9065 - DNA, 1516 bp, Oryza sativa
  ref <308>: DATABASE ACCESSION NUMBER: AK106413
  ref <309>: DATABASE ENTRY DATE: 2002-08-28
gaatgcaccaccgcctcctcctccgccgcggcgcgatgcccgtccccccgccgctgcccccgcggacgccgccgccgggggtcgcgcgccccttcgcctccctccctcccccaccgcctctccagtcacgcagggaggtgcatgtttggtatgtttgccctgatgagctgaatgatcactcccacctggatatgtacatggaactcctttctccctccgaaaggaagaacgcgctgtctatgaacgggccgaggctgcagaaagatgctatgttgtcgcgtgcattgctgcgcactaccctctcaagatatacaaattctaaaattgatccaagatcatttgagtttaagaagaataaatttggtaagcctgagatattgtggcggtctgatgatagcaatatggagtggccttggcattttaatatttcacacacatcttctctgattgcctgcggcattgcgatggatgctcctattggcattgatgttgaagaaaagaagagaaagacaaccaagagtattttatctcttgctcgccgttactttaccccttcagaagttgattctctagctaaaattgctgattctgatgctcagcaaaaggaattcataaaactatggaccctaaaagaggcatatgttaaggctcttggaagggggttttcaggtgctccttttaataggttttcaatccaattgaaaacaaatagccgaattcagattactaaggcaccaaaagtgtgtaatgattctgattctggtgattatctttctgagaactggcggtttgcacttacagagctaaacagttcttattatatggcggtttgtatagaggacaactcaagaggttctgaaaatggttcagtaccactaggattgaaagtatggaagaccgttccattcatagaagatacacttgtttctggaacagatgccgtaaaacttattacgtgactacatataagaatctaccatttatcatgtgaattcatcatatgacaacatggatattggacctagagaggaaactctagtattcttcgatcgttattagtaatgcctgacattgcgtgctcgggaggacctaggaaatgcaacaccgttttctccagattcatacttcggttattagttcccacttcccagcctgccgcataaacatgttttccgaaggaacaaccatcatttttactgattggaaggatgtcaacactagtacaagctggcatgttgaaagctagaaatttcaccatctactcgcaagattgaagccccactttgcaaacacgattgcattccaggttaaagagttgtttgtatttgtcactattagagcttagagaataggaataggagtgctctgtgttttgtgttattacattggattggaataagatgtgctcctgccaagttaattatgttggcttggtttgaggtagcagttaaaattcatgtgctgtttgaactgatgcactgataagtttaattttcttgagtgatcgattatttcc

SEQ ID NO: 9066 - DNA, 991 bp, Oryza sativa
  ref <308>: DATABASE ACCESSION NUMBER: AK106414
  ref <309>: DATABASE ENTRY DATE: 2002-08-28
aatggaggacgacaagacgacccaagaatcatcggcggcggcggcgccgccgctgaggagcctcgcggactacgccgtcggccccatcccgaccctcctctacgtccccggcttcatctccgacgccgagcagtcccagcttctccaccatatttaccaggcgccagcgcccaagtggaagtcactcaagaaccggaggctgcagaactggggaggagtggttcatgagaaggggctcctgccgcaggcattaccttcatggctaacaaagataaccgaccgaatctgccaatggactggtttatttccttcagcaatcaatcatgttttaattaatgagtatcatccaaatcaagggatcatgccacaccaagatggtcctgcctacttccctgttgttgctataatttctcttgcttcaccggttgtgattgactttacccctcatcaaaggcttaaaggggaggactttacagatccccaaaatgcacactctggagagtcgcaggcaactacaacagagagcaatggttcccataatcttgaaggtgcaaatgaaactgaccctgcttcttcatcacttcttctgatgccgtgcagcctgctgatattcaaagatcaggcttatacagactaccgtaggactgcgaggagagtctcgctaacgtgtcggctggtgttgaaagttcacaagaagctgttcaaaatgtagtctattcctgttggttgggttaacaagaaacagtgtagagtatattctaagagtaacctgtgacattatgctggtaccgaagactactgactggtgtacaaggccttgatctgcaagctggaacagcatgatttgtctaaattctgaaagaaagaaaaaactgtagttgtttggactaatgggcaatatgctgctgcatggaagagggccctgactcctcaatagtgtttagttttgagacattactgtgcttttaatgcccgtaggaattcaatggtt

SEQ ID NO: 9067 - DNA, 1480 bp, Oryza sativa
  ref <308>: DATABASE ACCESSION NUMBER: AK106415
  ref <309>: DATABASE ENTRY DATE: 2002-08-28
gtcaccggccaactcaactcaactccacctcgtcgcctccgccgcttggagaagaagaagaagaagaagaaaatctctctcgcctcggagagaggaggaggaggaggagatccggcggcgatggagctgttcgcgagggcgcaggtggtgaggctgaagagccaccacgacaagttcctctacgccgacgaggacgaggtgcacgtcacgcaggacaggaacggcgccgccacgaacgcgcggtggacggtggagcgggtgccgcactcacccggcgtcgtgcgcctccgcagccgatacggccgctacctctccgcctccaacgagcccttcctgctcgggatgacgggccgcaaggtgctgcaggcgccgccgcccggcggccgcgccaccgactcgtcgctggagtgggagcccgtcaaggacggcttccaggcgaagctcaagacgcggtacggccactacctccgcgccaacggcggcctcccgccgtggcggaactcggtcacgcacgacgtgccgcaccgcaccgccacgcaggactgggtgctctgggacgtcgagatcgtgcaggtgctcacccccggccacgaccgcgcccccacctccgccgcgccgccgtcgccggcccacgcgcccgagcttaagaagccgccgccgccgccggaggcgcaccaccggcccaccaagtcctacaccgggcacccgccgccgccgccgctggagaaagacgcgccgccgcagccgccgcgaccgcaggaggtccaccaccggcccaccaaatcgtacaccgggaacccgccgcagccgctggagaaagacgcgtcgccgcagcctccaccgccgaagcccgcgccctctagactcgagtcctccctttctttctctgcgccattgcacaaggtggagggccgtgcaatctactaccacattgcagatgataagggcgatgtggacgaagacgacgagacacgctcattcacattcaatggctccaacttggaggagctcacacacaagttgcaggaagagacgggcctccatgacataatcatctgcacacgcagccctatcactggcaaactcgctcctctccgcttgcagctgccaccaaacaatgcagcaatgcatattgtgcttgtccaggagtcctcaaaagtggcaaaaacatttccatggccatacggtccataatctatggagagaaggtagcgaattgggtggaatgattggttgtacatttactccattcatttttttccctgtaccagtggagtacttggtaggatctaattgtcgtgtgtatatagcctagcctaaattaaattagctgaggtattcgcatgcaaaaaaagaaaaagaaaagaagaggagatatttatagttcatagttgagttttgagacctcaaaccatctatacggctatacccttcatttattgatgatcttttttgggggaaaaaaaaaaaaaaaaaaaag

SEQ ID NO: 9068 - DNA, 1987 bp, Oryza sativa
  ref <308>: DATABASE ACCESSION NUMBER: AK106416
  ref <309>: DATABASE ENTRY DATE: 2002-08-28
aattgagatgtgcaagtccagatccgacgcagtgcccgtctcctccgttgcttcccgatcccgccgctcctcggccaccacctcttcctcctcctcctcttcccggcggccgggcccggcctcttcgtcgatctccggtagcacagccagcgccgcgtcttccagttcaagctcccttgccgccgcccgcgcctccctcccggatccgcccgtgctctacccgttccaggaggtcgccggcgccaccaacaacttcctcgccaagcgcgccccggcctccacctactggccctgcaccttgcgcggccgccacgccgccctcttccagctccgccgcgcaccacctccacgcgacaccgtgaccggcaagctactcgccgccaccgccaggtaccaccataccagcctcgcccccctgctgggcggctgcgtcgcgggagcccacctgtacatcgcctacgagttacccccgggcgccgccacgctgagcgcctgcctccgcagccctcgcaaccccagcttcaccgccctccgcacctggctctcccgcgtccaggtagccgccgacgtcgcccaaggcctcgactacatccaccaccatgccgccgccgtgcacggccgcgtctcctcctccaccgtgctcgtctccgaccccggcctccgcgcgcggctcacgcacatgggcgcggcgcagttggcggaattggaagatgaggaggagccgtcgcgggaggcagacgtgcgcgccttcgggctgctgctgctggagctgctgtccggagagcaggcgaccacgtaccgggtccgggaggcggtggttgagacggcggcggcggcgcgggccaacgggcgggtgaggagctgggtggacaggaggctgggcgactcgttcccgcaggcggtggcggagaggctgctggatgtggggctgcggtgcgcctccgcctcgccaccgccggagatgacgtgggtcgccggaaagatatccaaggcctacctcgattcacgggcttgggaccactcgcttcagcgcccgcaggcccacctctcgtctgtctcgctcgccccgcgctgaggcccagctgcttcttctcttctcatgtttccaaggcccaactcaatatttgggccttctttcgtttcggtactaattccgcccgccaaactactcttcttctttcctctaattcattcatgattcctatcaaattcatccactatttactgcctgacaagaaaaaccaaggactagcaaacaaacatcaattcgtacgtggatggaggaacttaccttttctttgaccaaactctgcattcaattcattattacgtgcgcggtgctaatactaagcttgtcttctctgcgcccaaaatttttttttctcttcagtctgaccagcacggaataaaacacaacaaaagtcactagctacttcttctgtacaaatatgcatttgaccagctacatgtatacctagctcctcttgcaatggttggttccatatcatatctgacagtgaccatttcttaagtttgacttaagccatctgttccttgttttagcccggccgctacaacaatcaatcatacatccaacctggtcatgcaagtttgtttgttaatttgtcatgaaaaacaacaaatgagcatggaattatgactagtagctccgctggatcaggagcatcgatctattttgacctttttgcaccttatgcacccagctcgtagctactattactctgtctgtggtagtagttcggtcaattcaaaagtcgcatctatagaatgcatctatcgttatacttaattataatttaaaatatgatcgatgtgtctacgtacactgttatcaggtcaacgtgaggaaggaattgaagaagctacatgctccctctgattatttatttatacattatatcgatattgtgttttcgtgcacatgaattaaacaaacaactaattaaataattaatgtggttatacc

SEQ ID NO: 9069 - DNA, 1624 bp, Oryza sativa
  ref <308>: DATABASE ACCESSION NUMBER: AK106417
  ref <309>: DATABASE ENTRY DATE: 2002-08-28
atgccaacaacaacaacccttcctcctcctccattcgccacccctcctgcttccatccatggacgccactcccgtcttcttgattgctgattagtcagctgcctgcgctgcgttctccttgtgcttgtgtgcgtgtgagagagtgttcgagcgaaggagaggaggaggggaggcaatggcggcggcgaggaggctgtcggagctgctgcaggagcagcaggagccgttcctcatcgaggccgccaagatcaggcggctgcggcgcggcggcggccgcggtggaggtggaggtggagcgtgctgccccgtggccgcgtgcaggaggctgctcaggctctgcaaccacgggttcaagaagaggcgaggctgcggcggcgtcggcggcggcggcggtgtcggcgggggcggcgtcagggggctgaggtcggcgctgagcaaggcgctgtgcggcaaggccgtgaggagggtgctccgctgggacagccttggctgcttccccggcggcgtcgaccgcgagttccgccggctgcggcggtccaccggcgacagcggcgagtgcgacccccgcgccatggacttcagcggccacagcaacgacgagcggccgccggggaggtggaaggcgcccggcattggcatggacatggacgtcgacgagtcgtcgcggcagctcagcccggtctccgtcctcgacctgcactccgacgacggcgactctcctgtgcactgccgctgtaagttctctgacctctacagtgccctctgcactctgcactactacgctttaccattttaccaacccgtcagtacttttgattaggcattcaatgtgtcttaacatttcgatttaccccccatgtttattactcttaccaccttaatcaacattttcccctctctctctccagcaacaatggttaaaattaacctttactacaaatgctacttattaacatgttaactgcacatttaatgtgtcaccattgccattaacccgatgtttatcagtactccatcttaagattcatctttcccatcttaacactccatttctattatcacaggggaggatgcaaagccctcgacctcagggagctcgccaccatccgagggcttcatcggcgccacctcaccatgcttcacctacaacatccatggcaagatcatcccaatggaggtagaagaagacgaagaagaaggcgacgaggaggaggaggagatggccagagccggcaagtccatcgagcagcagatctcctcgtgggagaggatcgcagaggacatctccaacatcccgagaatggtggagatggacttctcccagtcgatacaacaatggggcgagctcaagctcgaggcagccatggagatcggcacgaggatagagaccctaatctttgatgagatcaggagagaaaccgtctgtgacatgcttgcttcacactgtacattggcagctgcaacatcttgttgaccacagaaaagagagagagagagagagatagtagtatgtggactgaggaggaggagaggggggtgtggttaaaaaaaatggaggatctgtataatttgagagggttcatgtggaattcatttttttccctaactccaaagtcttggtccc

SEQ ID NO: 9070 - DNA, 1464 bp, Oryza sativa
  ref <308>: DATABASE ACCESSION NUMBER: AK106418
  ref <309>: DATABASE ENTRY DATE: 2002-08-28
aagaagaagaagctcgagcactgcggcggagcctgctgagcctgatccacatcgactacatcgaggccatccggcggctccccgccgccgacctccggaccgcgctcgcgcggggcgtcctcgtcggcggccactgctacgggcccctccaccaccccgccgacaacatcctcctcaactccatctggtacgccgccgcgttccccctccacgccgacgaccggatcgacgtcgccgtcatcaccgccaactccctaagccgcgccgtgcagcgctccctcgacgggctcgtcgcctccctgcgccaccgccgccccgacctctcccgcgacgacgcgctccggcacctccgcgccgacctccgcgccgccgtcgcatccgcacgcggctctccaccaccaccactacccgcggaatcggactcggaggctgaagccgccgcgtatcgggcggctcagcacccaaaacctgctgctctggctcacttcttggccaccgtgctgcccgccgtggtgaccgacgcggcgtcggtgctcgccggcaagcccagcctctcctcatccgacatcgcgcgcgtctccgccatgctggcgccttcaccgctaccagatgagccgccacagcctcctctccgagagcggagtccaaagatcatccggatcatcaatgacaggaggaacaacctcagaggctggtacaagatcctgctccaattggcgaatgcagcgctgcgcaagtatgcccagcaaactggggaagaatatgagcttcataccatctatggtgaagccttcctcaaggatcgcaacgagcgtgctgagtatatccacatcaatttcatggcttctccctccagctgccagtgcctgcaagcttctccagtctgcttctttgctgaagttcttcgtccaccacgctttaagtatcatgaagccgacatcactttgtgctgcatagtgcgaccgtcgccaaatgatgccgatagttgccatggttgtcttatcgagaaccacagaattgatcacccggaagctggcatgcgtttttgtgggaagaagcatagcaagatggatccaaatggctatggccatggctgggattggccaagcatagctgacgtcgaatacaggttttttgatcctgacaaggacgtcggacttgttgagtacttggatggagttataaccgatatcaaagcacgtatcagagacctatctatcagggatgaagacgacagtgacgaggacagtagcgatgatgatatctccggctattccatgagatttgtctgatgttgtgatgctctaacttgcagtactattcttcacctacaactttctcgaacagttatttacttacgtataaatgtttgaaactacagagctagcttaacgttggtgttattattctgaaatattctgtggcaagtatgacataatgcacgattggtagttttggttgttt

SEQ ID NO: 9071 - DNA, 4184 bp, Oryza sativa
  ref <308>: DATABASE ACCESSION NUMBER: AK106419
  ref <309>: DATABASE ENTRY DATE: 2002-08-28
cgccgccacctcgctcccatcgctgcctcctcctctgcttcgtcgccgcggcggcatctcgccggcggcgatcggcgtgaccccgagcgcccgcaacacgccaggcgcgatcggaagcggaagcgcccccctccgccgccgccgccgcagccaccatgcaggggttccccggcggcgcccccgatccgcagcagctgcagtccaccatgctggccatcgagcaggcctgctccctcatccagatgcacatgagtccagctgatgcggaaaaagttataagttcactgcattcatctccaatgccttatcaagcatgcagatttattcttgagacatcccacatgccaaatgcgagattccaagctgctggagcaattggtgatgcagcaataagggagtggggaatcctttcagatgacaacaaaaaaagcctaatagtatattgcttgaactatgttatggagcatgcaagttccccggaaggttatgtgcaagcaaaagtttctgccgtggcagctagactactcaaaagaggctgggttgagttttcagaccaagaaaaagctgccatcttctttgagattgagcaatgcgtacgaggcatccatggacctaatcgacaatttgctaccatcaatttcttagaagccttggtttcggagttttcccctggggctgcttctgctatgtgcctgcctaaggaattccatgagcaatgccaatggtcacttgaagtgaagtttctgaaggacttctattgctgggcacaagctgctgtgttcaattctgcagacaggatattgaatgtaaatgcaagtgtagcagaggagaaagcatgctcagcagcatttcgccttatgttccagatattaagctggagtttcaagcacaatgtggagcatgcaaattcagaagctaagataaattctggtttgaggagtgatgccataaatctgaagaaatttgagcgttcgctggtgaagccagggtctgtgtggagtgatgttctaatatcaagtgggcatgttcagtgggttttgaacttttatactgctgcccgccagaagttctcatatgatacgctatgggttgattctcctattgctacctcctgcagacagctcatagtgcagctatgctcgttgacaggctctgtgtttcctaatgataacgcagatggacagattcaataccttgtgcgcatattatctgctgttgtacattggattgaacctcctgatgtcattgctgcatcaattcgaagtggagcaagtgaaagtgagtttgtagatggatgccatgcccttctttcaatggcgtctttgactacttgttcgctttttgacaacctcctgaagtcaacgaggaactatggcacaatcaacctactttctgctttgacatccgaagctgtcaagtcttttctggataaccagaatgaagaagaaacctggggctcggagtctcttgatatattgttagaaacatggaatgttattctgggggatgttgattccgagaaaagtcctatgtcagttgatggagcaattgctgcttcaagtttgtttaagatcatcgtggagtcacatttgaaggctgctgctgattctgcattcgaggatactgatgatgccgaatactttcatgtttctgtttcaaagcgtgatgagcagctggccttgtatgctcagattgcacgttcagctgctgacacaactataccctttcttgcacaattgttttcagagcgatttgcacggctgagtcagagaaatggtgaaaatgatcctactcagactttagaagagttgtactggctgttgctgataaccagtcatgtcctaacagattcaggcgaaggagaaacactgcttataccagaagcattgcaggttggattcccctatgtagttgaagtagcacagcatcctgtagttgcactctcatggtccataataaatttttctcgacagtgtctagatccaggaatcagggcaaggtacttcagtccgcgactcatggaggctgtgatttggttcttggccagatgggtcgcaacctatttagtaccacttgatgtgagtagggggcaagtaaacagagcagaaattgacagtgtggataaacacatgctccaacattctagaaaaatgctaaacagttttgcttgggagaataaccaaggagagcgtgttcttgattttgttgttcttatttcaatggtagcacttactacatatcagggagaaattgagctgcagacacttacatgccagaagctacttgctacagttgttcgacggaagcacacatgtacttatgttgttcagttggactcgtggcgtgatcttacaagagcttttgcaagtggacgttctttattttcattaactggacgcttacagagatctctagcagaaacacttgcctgtgcagcttcctgcatcaaagatcctgaagcatctgtgcagtatttgagggacctcatgggaccggttgctggatgcctagtagagaatgctaacaggagtgatctcaaatctgtggcacagcaagcagatgttgtttatatggtctgttgtctattggaacgactaagaggagctgctagagctacccagcctcgcactcaaaaggttctatttgagatgggtcacactgtgatgaactcgctcttgactcttctggaggtgtacaaaaatcagtctgcagtcatatacatgatactcaagttcgtcgttgattttgttgatggtcaagctgtgtttttggatgctaaggaaacatcagttttggtgagcttttgcctgaaactactccaaatatactcctctcataatattggaaaggtaatgctctcactttcttcaagtttgcgcagtgagtcacaagctgaaaaatataaggatctacgtgctttgcttcgtcttctgactaatatatgctcaaaggatttggttggtttcctatctgatagtagcattgaaggttcacaagatattgctgaggtcatctatgttggagttgatattgtgactcccttgatatctttggaccttctgaagtaccctaaactcagtcgtgattattttgctcttatctctcatttgctggaagtgtacccggagaaggttgctaacttaaataaggttgcctttgcaagaattattggaagtcttgagtttggcctgcgtaatcaggattgcgacattgtcgacaggtgccttacagcaataaatgctctcgcttcttaccatttcaaagagagacttggaggtaggggaggacttagctcacagcttatggaatcagaaggatcaaatggcaaacttcaggaaagcatatcaagtcactttttgaggctgcttctgcaattgcttctgttcgaagatttcagaatggaactagcaggttctgctgcagatgctttgcttcctttgattttatgtgaacaaccgttatatcagaggctgctgcaggagttagttgagaaacaacagaatccaacagtgaaatcaaggctgggaatggcatttcataacctcacaagctccaacaatctctccaactcgctcgaccgcccaaataggcagagattcaggaaaaacctccgcactttcttgggcgatgtctcgggcttcatgcagataaaatagacgtgacaacatgataccagtgttcactgatcggtcactgaaaccacagaagatctaccccccgtcgtgccaggagcgcatgtgtgaatgatgcgatgcgagtcgtgagcaggaatgtttgacatcacaaggaacactctctccagtcgatgacaaaagggttgcttctccaggaaggacagggatatcttttgtgtgtgtcacaggaatatctccacatttgtcacgctggtgacaaccggatgccatgtccacacacaatgagacgtcatgtaaatggttttcgtttcggttaaacatgctagggcaccatacacatcaaggtagtagtagggattttgttgcgacatgtcacccacatctttgctcagcctatgatcagtgtaggaattaaagataggagtcgctttagcctttagcatccacttgctggtgtcaactgtacccatcatactgtacttaaaccattatcctctctctgcattggtgagagagagagagcacacaaagcttcaggtttcttgctgt

SEQ ID NO: 9072 - DNA, 1590 bp, Oryza sativa
  ref <308>: DATABASE ACCESSION NUMBER: AK106420
  ref <309>: DATABASE ENTRY DATE: 2002-08-28
gacttctttttcgtcgcatctgcttcagtaagtccagtgccgatcactcccagtctcccaggtcccaaacacttgctagcctatctatatatgcggccacgagcagcactagatttcagtgagcaaagaagctttactcagttagtgtttggtcttaattaaacactggcctcccaattgattaagagtactcagggggagtactgactactgagaatctagcatcgatcaagcatgcaacaaaaggaagccggcgaggaagccgtcgtcgtcgtgggcgccgggatcgccggcctcgccgtggctctcgggctgcacaggaaaggggtgaagtgctcggtgctgaagtcgtcgccggagctccgggcgtcggggttcgccttcgcgacgtggacgaacgcgtggcaagcgcttgacaaccttggggtgggcgacaagatcaggaagcttcatctgcatcttcaggagttgcatgtcttctcttcgtctacgggagagataacacgaagagcggatctcacggtgcaggggaaacgaggacccaatgaactgcgctgcgtcaggcgggactggctgctccgagcactagaggaagagctaccaaaaggcaccatccgttactcctccaagatcgttgcaatcgaagaggatggcaacgccaagatcatacaccttgccgacgccgcaattctcagagcaaaggtgctgatcggctgcgacggggtgaattccgttgtggcaaaatggctggggctcacaaagccgtcgtcctcggggcgcttggcgacgagaggcctcgcgcattaccctgatggccatggattggacccaaggttcaagatgttcgtcggccatggcttccgtgctggcgtgatcccctgcaacgagactgatgcctactggttcttcacctggtctccttccgaacacgaaagtaatggcgtcgaggagagcgcggaaaagatgaagcagttcgtgctgaccaagctgaggagctccaagatcccaaccgaggtgctcgaggtcgtcgagaggagcaacataaacgacgtggtcgcgtcgccgctgcgtttccggcccccgctgtcgctcctgctcgcgagcatcagcaaggggaacgcgtgcgtcgccggtgacgcgctgcacccgatgacgcctgaccttggccagggcggctgcgcggcgctcgaggacggcgtcgtgctggcgagatgcctcggcgacgcccttctcggtcggcggcggcgccgccgagagcgagaggatcgaggcgagtctacgtgagtacgctagaatccggcggtggaggagcgtcgagctcgtcgggacagcctacgtcgtcggcatcgtgcagcagagtaacaatgcggtcatcagctttctgcgggacaagtggttggccggagtgctcgccggaaggcttctgaaaatggcggactatgactgtggcaagctctaaaacgtgggaactcagttttgtacccaagttaataagattacgaaatggattttgtacccatgtgtctgaacaaatgatggaattggattttgtgataaaagctgcctcaaaacatgtatgggtttaggtct

SEQ ID NO: 9073 - DNA, 1395 bp, Oryza sativa
  ref <308>: DATABASE ACCESSION NUMBER: AK106421
  ref <309>: DATABASE ENTRY DATE: 2002-08-28
aagaccatactccattttggagttcgcagcaactgctcatctgggattgcagttgcggtgatcaaggattaagaggttcatccaaaatggggaactgcgtgggctcatccaagtgcgccagtgcatcggctccacttgaatcaaaggttacgagaagcagcaactcgacgacgacgacggacaacacctccaaggcatcgcagcgcagctcgtcggcgttctcgtcggggcagttctcgcgagccagctccgacgagtcgtcggcggcgccgtcgctgtcgtccctcaagtcgttcaacatgggcgacctccgcgcggcgaccaagaacttcggttccaactcgttcctgggagagggcgggttcgggtgcgtgtacaagggttggatcgacgagctcaccctcgcccctaccaagcccggcgtcggcaagatggtcgccatcaagaagctcaagaaggagagcttccagggtcacaaggagtggctggcagaggtgacctacttggggcagctccaccatgagaacctggtgaagctggtgggctactgctcggattccgacagcaacaagctgctcgtctacgagtacatgctcagaggcagcctcgagaaccacctcttcagaagagggacgcagccgctgtcgtgggcgatgcgggtgaacatcgcggtggacgtggcgagggggctgtccttcttgcacgggctggagaaccccatcatcttccgggacctcaagtcgtccaacgtcctcctcgccggcgactaccgggccaagctgtcggacttcgggctggcgcggaacgggcccaccggcgacaagagccacgtgtccacccgcgtcgtcggcaccaggggctacgccgcgccggagtacgtcgccacgggccacctctccgtcaagagcgacgtctacagcttcggcgtcgtgctgctcgagctcctcacggggcgccgcgcgctcgacgccgcccgcggcgccaccgccgagatgctcgtcgactgggcgaggccccacctcggcgatcgccggaaggtcaaccgcatcatggacaccaggctcggcggcagcagaacaccaagccatcctcctcgtcgacctcggcgccggcgcacaggtcgaggccattccaagcgctagcgagctagctagctaggcgtcttgttaattaattacttcgtcatctctcaattactccagtattatttgtttgtcaatttcatgctagcatagtagcatgtggtgtctatacagacaaaagaatcgatgaacatctagctacctagtttgtaattagttaggtaggagatatatatcattgctgtgtgaaaattgtgaattatatattgctagctgcaaattaagtagataatattattatagctaggttcag

SEQ ID NO: 9074 - DNA, 2035 bp, Oryza sativa
  ref <308>: DATABASE ACCESSION NUMBER: AK106422
  ref <309>: DATABASE ENTRY DATE: 2002-08-28
actactttccaatcttggagatgagcgattcgaaggcgccgacgagcgccttcaccttgctcttcctggcaatggcgagcttcccggcggtctcctcgatcacgctgttgtacagccgccggctccgcttcttctccagcgtcttctggtgccggagcgccaccgccggcaccacgaaccccccgccgccgcccgccgccgccgtcccgccgatgctgcctcgcctcctgaggctcctcatcctgagatgaaatccgctgccgccgccaccgccgctgctgctgccgccggcgtcgcccctcctgaagaatctgagccgtgtcgtcgccggcgcgtcttctggtggcgccgccgtcgcggcggcgcggctgctcctggagcggatgaccttgaaggcggtggtggtggtggtggtggtggacctgctcgcctgccgcgtgaacgggaagcggactgatttggcgctgccggtgatgctcatgctcctcgctcgccggtgcgacggtcgcggcggcggcgacggcggcggcgccatgccggatttcttctcttcttggcaaggagggttgtgtggcttctcttctttgatatcatttgctgctgatgatgatgatgattggtgagaaatttgttggctaatttcgacgagatttctcttcggtttgggaggcttcaagctgttcgtcctggtcgtggtcatcttcttcttgctcttgtgagaagaaggtggagtcgatttctcgccggctttgagctccggcgatggaggcggcttgccggttagcttcgacccgacggatttgaccagcttcttcttcgatgatggtccatcgatgacgtcatcggttgattcagcgacgatcttgctcttaccatgtggagatgatttgattggtttcttccccttggtcacactcacatccttcttcttcctggcgtcgccgccgccggcggcgatggtggtcttctccggcggcagtggggttgactcgtacgccacgatgtccttccacaccaccacgccggcgtcgcccttcttccccgtgtcgtcaacggcggtggccgccgctttcttcccggccttcacgggcttggtgagatccccgacccgtctccgcgacgacgccgaccgcagcttagccatcgccgtcgccgccgcgagcggcggtggcggcggcgtcttccggggcctcggctaggccgccgccggccggcgagactcccgctcctcgaaggcgtgcgcgccgccgtacttgcaggcgtggtggcaggacccagccgacggccggtggtagcaagcagggacggcgctggccttcgcctcgccgcggtgacgcggacggcggcgcccctcgctgctcccggcccctccggcgatctcctccatcggagagatcaaatcacgatctgatcaaaccttcttgattcagacgagagtgacagaaaactctacaaaaagtcaaagcgcaagagcaggccgggatgcacgcacgaacacgccgcgccgcgtcactcgccgcgcgccatggccggagctagaagacgagcttggagttggagctagagctcgagctggtcagagctgctggcgtgtgtgcacacacctatatatctccatgggtgatcgggtcaggtcaggtcatgggcgctgactgagaaggacggagcggagctcgatcgatcgccattggcgagcgcggggtaggagaggagacgatcgggtcaagagaggcaaatattttctttctttttctagaaattaaatttggcgggaggaattgtggagaaagcttcttcggagaagggcggtcaaatgcggcggggggtttggtgggtttgcgtctctttgaccggtcgtctgggcctacctgcagtgtcgccggctgggcgactttaggtggggcccactgtacagtgagttggttgagagggttgcagaagtccacacgtcgcacacgccgggttcaaatgctgttgatttgagtggaatttatgatcagtttaaaaataggattgcagtgttttttgatttttc

SEQ ID NO: 9075 - DNA, 1049 bp, Oryza sativa
  ref <308>: DATABASE ACCESSION NUMBER: AK106423
  ref <309>: DATABASE ENTRY DATE: 2002-08-28
actttgctcagctccactccactccacgcctccacccacccactccgccgaagcttccagaccccgagggttagggtacgcatggcggcggcggcggcggcggaggccgcgatccggcgtgggctgcttgtctccggggccgtcagcgtagcggcggcgctcggcgcgctgtggctggcctgcgccctcaggatcgccagcgccgtcaaccactgcctcgcggtgaaggcggcgggcgtctccgtctgggccgacgccaggtgcgacgccacgatcgagctcgccgctcccgccgacgtcgtcctgctcatcctcaacgccgtggccgcgcgccgggaggccaaggccgaagcggaggccgacgcgcagatccgcgaggctgcgggtgcagctgcacgcaacgtcgttcctgatcccggcgacctgcagcagccgctggttaccctcgcactaccggcttcgactccgagtccgagaccggagcgcctccgcctgcgtggttccgatgcagtactcatgttcgtcgtcgccttcatctacgtgtgctgtgccgttctcatcgtcgtgggcgagctgctcccagtggtcggcgatctcatccccgtggactgccagcgccagtgccaggtgcagcggcggtgccttgcttggttcttcaagaacatcggctacctgtggctggctgttggtcattgctgcctcattattccttacgccgtgctcaggctgaggaggctcgccaggaagaaggttgccagcttcttcgtgtcggtgccatgcatggtacaccctcaaaggtataaggaacatgatcttttttaaactggggattcttagggaaatggctattggactacagcatactgaaacatgttttgaactatctcaaatattcgaggctgcaactcacaagttaattactgaactgtgctagggtcgttgtaggatatggctagctgtgtataatgctcacgttttttttttggatagattggttttgcaaatccagcggacaattatgttgcaaagtacgtacatcatgttctggt

SEQ ID NO: 9076 - DNA, 1878 bp, Oryza sativa
  ref <308>: DATABASE ACCESSION NUMBER: AK106424
  ref <309>: DATABASE ENTRY DATE: 2002-08-28
aaaaaaatgacaaacaaacacacactcagtagctcgtagtgttcgtacgtggtgagctactagctagctaagctccggttcaccatggacaacttgtacttgatcctcggtgcaatcctcgccgccgccgtcgtcccgttcattctgttccgcggcaatggcggcaagcgcggccgccgcctcccgcccggcccgccggcggtgccgttgctcggcagcgtcgtgctgctgaccaaggcgctgaccgacgtcgagccggagctgctcctccagaggctgatcgctcggtacggccccatcgtgtcgctgcgcatggggacgcgagtgtccgtcttcgtcgccgaccgccgcctcgcgcacgcggcgctcgtcgagggcggcgccgcgctggccgaccgccccggcgtgccggcgagcaggctcctcggcgagaacgacaacatcatcacgcgcgccgggtacgggcccgtgtggcgcctcctccgccgcaacctcgtctccgagacgctgcacccgtcgcgcgcccgcctgttcgcgccggcgcgctactgggtgcaccgcgtcatcgtcaacaagctggcggcgtccggccaggcaccccacgacgtcgtggacacgctccagtacgccatgttctgcctcctcgtgaatatgtgcttcggcgagcgcctcgacgaggccacggtgcgcgccgtcgaggacgcccagcgcgacctgctcatctacatcacgagccagatggccgtcttcgcctacttcccggcgatcaccaagcacctcttccgcggccgcctcgagaagatctacgccctccgccgccggcagagggagctcttcatgccactgatcaacgcgcgccgggagtacaagaaacacggcggcgagacgacgaagacgacgaacaaagagaccacgttggagcactcgtacgtcgacacgctgctcgacatcaagctccccgaggacggcaaccgcgcgctcaccgacgacgagatcatcaagctctgctccgagttcctcaacgccggcacggacacgacgtccaccgcgctgcagtggatcatggccgagctggtcaagaacccatccatccagtcaaagctccacgacgagatcaagtccaagaccggcgacgaccagccggaggtcaccgaggaggacgtccacggcatgccgtacctgagggcggtggtgctggagggcctccggaagcacccgccggggcacttcgtgctgccgcacagggcggcggaggacgtggaggtcggcggctacctcatccccaagggcgcgacggtgaacttcatggtggccgagatcgggagggacgagcgggagtgggcgaagccaatggagttcatcccggagcggttcctccccggcggcgacggcgagggggtggacgtgacgggcagcaaggggatccgcatgatgccgttcggcgtcgggcggaggatctgcgcggggctcagcttcgccatgcaccacctggagtacttcgtggccaacatggtgagggagttcgagtggaaggaggtggccggcgacgaggtggagttcgccgagaagcgggagttcgccaccgtcatggccaagccgctccgcgcgcgcctcgtgcccaggaggacgacctagaataataatgctacgtatatgccgttacgtacggatgcatgcacgtacgtcgctggacactatcttaatcgtgtcgaacagtcgaagcgctcatacttttttttttttttgcttcttagccatggtgatgctggcatcgtgaattccgctacgttcgtatgtactactcatgcataaacccctttgttttggttatcgaataaaatcagacaagctgctgctgtagcttgatcgcaagttcgc

SEQ ID NO: 9077 - DNA, 1346 bp, Oryza sativa
  ref <308>: DATABASE ACCESSION NUMBER: AK106425
  ref <309>: DATABASE ENTRY DATE: 2002-08-28
atttttttttacgccaattcttttccctcgccgatctcccccaatttccagctcgatccccatcccctctcctccctccttcttcctccgcctcccaccctcccaccgcgaccgcgtcgacccgccacccacccaaccgcgccgagatccagatccagatccgccgccatgaacccggggcgcccggcgccggcgtcgttccgcgaccgcaccaacgagttccgcgccgccgtcgagagcgccgcgcgctacgcctcctcctccgcggcggcggcgcccagcagcagcagcggcggcggcgttggcggcccgctcgacgtgtcgcggggggcggcctcggcgcactcggagttcaaccgccgcgcctccaagatcgggctcgggatccaccagacctcgcagaagctcgcccgcctcgccaaactggcaaagaggacatctgtttttgatgaccctacggtagagatacaagagctgactgcagttatcaagaaagatatcactgctttgaattctgccgttgtagacctacaggttctctgcaattcacaaaatgagagcggcaacctttccaaggatacaacaaatcattccactacagttgtggacaatctaaaaaatcgcctgatgagcgcaacaaaagaatttaaggaagttcttaccatgcggacagagaacttgaaagttcatgagaatagaaggcaaatgttctcatcatcagctgcgaacaatgcatcaaatccatttgttcgtcaacgtccccttgttaccagggatggtcctgaatcctctgtacccccggcaccatgggccagtgattctgccactactccattgtttcagaggaagaagactaatggagatcatggagcatcatcatcatcttctcagccattcatgcagcagcagttagtacagcaggacagttacatgcagagtagagcggaggctctccaaaatgttgaatcaaccatccatgagctaagcaacatttttacacaactggcaactatggtttctcagcagggagagctagcaatcagaattgatgagaacatggatgacacactagccaatgttgagggagctcagggccagctactgaagtatctcaacagcatttcatcgaaccggtggctgatgatgaagatattctttgtgctgatggttttcctcatgatctttatattcttcgttgcatgatttccacttgcaatgtcaccatgaatgttctgcatagtttgtctgctatgcgtagtatattcttttgatttttaccaaactacaacatgtacacaattttcacccgggatgataagcagccgtctagccttttgtggtcatgt

SEQ ID NO: 9078 - DNA, 839 bp, Oryza sativa
  ref <308>: DATABASE ACCESSION NUMBER: AK106426
  ref <309>: DATABASE ENTRY DATE: 2002-08-28
acggtcacacacagaattcctaaagccgccttgccttttgctcgcgagtaggactgtaggagagatatcgatctgatggccacctgcaggagccgtggcgtcgagaggggcggcgcgccgcacgtcctcgcggtggacgacagctccgtggaccgcgccgtcatctccggcatcctccggagctctcagttccgcgtgacggctgtggacagcgggaagagggcattggagctgctaggctcggaaccgaatgtgagcatgattatcactgactactggatgccggagatgaccgggtatgaactcctgaagaaggtcaaggagtcgtccaggctgaaggagatccctgtggtgatcatgtcctcggagaacgtctctacaaggatcaacaggtgcttggaggaaggagcggaggatttcttgctgaagcccgtgcagccgtcggacgtgtcgcggctgtgcagccgcgtcctccggtgagccgtgcaggcggcggccggtcgggtgggcgtcgtgggcgactgaagcgtccctgcatgcatatgcggcttcagtgttttgggggttggaattaatagcagcagaagcagaagcagtagtagtagtgattagtggtagccaaacgcactgtgcgcttgcagatgttgtggttaatgggctgaatttgcctctccctttctctatttttctcattccgaatgtcatgttctagctgttccctgtgtcgatctagaatgcagtttgttccatcggtttgttcattcagttgaaaaacctgttgcaacaaatgtctaattttatgttcttaacagttcatccgtttttctagttatattcat

SEQ ID NO: 9079 - DNA, 1508 bp, Oryza sativa
  ref <308>: DATABASE ACCESSION NUMBER: AK106427
  ref <309>: DATABASE ENTRY DATE: 2002-08-28
aatttcgaaaggagtcccgttccgtcccgtccgagccgtcgccaccatgggcggagatcccaccgccgacccctcctccgcatacttcatcgacgccgaccacccgtacgccgccgccgccgcctccgcgctcacctcccaccgctccaggtccaagtggtcccacctctcctccctcgccgtgcccgatcccctcccggcctccgccgtcgcggcggtccccctcctgctccgccgccgcccccacgtggccctcagcttccacctcttcgccacccgccgcctcctcccctctggctctccgcccccgctcctcctctccgtctccgccgcccatgtcgccgccgcttcccgcctccgccgcgccgccatctccctcctctcctccgccgcccgccactacccgcattctcaaatcttcgccgccctggccgccacctaccgccggttcgcctccgcgcccttcgtctttgaccttctcctcctcgcctacctccgctcccgccgcgacgccctcgccgcggcctccgtcgcccgccgcatcctcgctgccggcgcccaccccctcccctccacctccgccgccctcctccgctccctcccctccgccgccgcggccctcgacatgtaccgcgaaatctacacgcgcccgagttcaaggatcaacagccagctactgccgaccgttcataccttcaactccctcctcctcgctttctaccgtgaagggaagtgcgatgttttcaaggttgtgctccaggaaatggacagatattcctgcgtacacaatgtgtgcacctacaatatccggatggccgcgtattgtgatagcaaggaggtggagaaggcacgagggctgtgggatgagatggttgagggaggaatccaaccggatgttcccgcgtacaacacgatgatcagtgggtactgtggtgtgggggaggtaggtatggcagaggagatgtttaaggatatggagatgggtgggatcgacccaagcgttacgacatttgaatggttggttagagggcattgtagggtgggggatatcgatgcggcaatgcttgtgcgtgcagacatgagcaggagggggttccagatggcggcagaggttgtagaggaggtggtgaatgtactgtgtcagaagaagagagtgaaggaggcattaggtgttttgaaggaagagatgaggaaggaagagtttgtgccaagtcgggaatgttacgaggtattgataagggaactttgtgagcaaggggaggtggaggtggcaatgagactccaggcggagatggctggtatgggattcaaggttggcagtgaggtgtactgtgcctttgtctgtgcctatgagaaggctgaggattatgagatggcagagaagttgaggaaagaattgtcggtgataagcattcaggatggatgatattttccttatctttacacagtgatgcatgatttttcatctctgttcattgcaatgaaaaagtctggtaaaattcatgtcg

SEQ ID NO: 9080 - DNA, 1387 bp, Oryza sativa
  ref <308>: DATABASE ACCESSION NUMBER: AK106428
  ref <309>: DATABASE ENTRY DATE: 2002-08-28
atcagttgcttttgaaagaggggacactgttcagattataaggcaagaattgaagagccaaaggaggcatgtgaaaagcttgaagaaaaagtccctttggaataagatgctcgaagacgtcatggataaacttgtggatattgtccactttttacatgtagagattcaagaatcttttgggacctatgatggagctttacaattgaatcaaccttcagagagccgtcagacgttaggatcagctggcctctcgctgcactatgccaatatcatttcacagattgacaacattgtttcccgaagcaccgttccaccacaaagcacaagagatgcgctctatcaaggactgcccccaactattaagtctgctcttcgaaaaaaactacataattgcccacaaccacaagaggttccgatcactgaaatcagatcttcaatggagagaaccttgcaatggattatccctattgccaacaatacagccagagctcaccatggattcggatgggtcggcgagtgggcgaacacagggaacgatgcgatgcggagggcggctgggcagccagacgtgatcaagatcgagacattctaccatgcggacaaggccaagacggaggcgtgcatcctggacctcgtcctgtggcttcaccacctcatcagctacagccgcccaagcaacggtggcaggtccaggtcgccgagcaggtcgccggtgcgctcccctcccctcacgccgccgcaccaggtgccgacgacgacgtcgtcgtcctcgccgccaccgccggcggtggcgaggccgagcggcggcaccggcggtggcctcaccagggaggaccgcgcgatgctccaggacgtgtacgcgggccgccggcgtcgcgctccctgtcacagcaggagccaggagctgtcgtcagctcgcggcggcggcggcgccggcggcgacagctcgtcggcggtggcagccgcggcgcagctgagcaagaacgacaggctgagcaagagcagcaacgatgctccggcgcggagcggcggcggcggcggcggcgggaagctcttcccgctgagcaggaggccctcctccgccgtggtgtcgcccgccgtcgacttcgacatcgacggcatcaaggcgctggcggatgcacagaagcggcagtgaccgtgacgtcacagccaccatcttcttctccgccgcaaattttgctcaaactgtccactgctcaaacgcagcgacgccggaaaaccgtgagaaaaaataagagaaaaaaaatcaagaaagaaatggagatggccagatgatgagaaaccaagatcggtgatggatgcttaattagggtgtgattgatacatgatcaattaattaattaatcgccattgtatattgtaggag

SEQ ID NO: 9081 - DNA, 2064 bp, Oryza sativa
  ref <308>: DATABASE ACCESSION NUMBER: AK106429
  ref <309>: DATABASE ENTRY DATE: 2002-08-28
aagtctcctcttcttctacgtactcctcctcccccttctcctcctcgccccggcctccgcctccaccgtcgccatcgccgccggccccaccgcctgcgccgtcgcggagggaaactccaccgtctactgcgcctccgccaccaactcgtcctcctccgccgccgtcgcgccgttcgtcagcttctcccaggtgtccggcggcgggggggcgttcgtctgcgggctgcaggtcggggggcgcgcgctcttctgctggcccgccgcggcgccgggtcagctcaggcgggtgtacaacggcccgggccagctgtcacagctcgccgtcgggggcggccatgtcgcggcgtacgacgccgcggcgcgggtgatacggtggtggcgtggcggggaccggttccctctctggttcggcggtgggttcgcctccctcgtctccggcgacgacttcacctgcgccgtggagacgagcacctccgccgtccggtgctggggcccgcgcggcggcgccgtggaggcgggttttctcaacgcctccgtctccgccctcgccgcgggaggttcccgcgcgtgcggggtgaggaggaacgacggcggcgtgctctgctccggcggtggcgtgctcgcgccgcgcgaggacctgtacgtggacggcctggccgtcggcgactcccacgcgtgcggcctcctccggccgaaccacaccgccgcgtgctggagcctcgggggcgccaccaccacgctctactacccggcggtcggcacggcgttcgagctcctcgtcgccggcggtaacctcacgtgcggcctcgtgtcggccaacttcagcctgctctgctggtcgagggatgggttggtggcggcggaggtgaacctgccgccgatcctccccggcgtctgcgtctccgacaacagctcgtgcaaatgcggcccgctcccggactccgggaggttctgcaaggtctccggcgacgtcatctgcagaaggttctgtgacacgttgccgccgccgccgccgccgtctcctcgtacgccgtcgccgccggcgaccccgagctcgagacgcggcgtgtccaaaggctggatcgcgttcgccgtcgtcggcgcggtgggctgcttcgcggggctctgctccatcgtctactgcctcctcttcggcttctgcagccacaagaaggtgcacaactctgtccagcccaacatcgccggtggccacgtcgtggaagctgcgcatcaagatcctgctcgacgcgtcgcgcggcatcgactacctccactcgtacgccgtgccgccgatcatccaccgcgacatcaagtcgtcgaacatcctgctcgacggcagctgggtggcgcgcgtgtcggacttcgggctgtcgctgatggggccggagacggaggaggtgaagcacctgtcgatgaaggccgccgggacggtggggtacatggacccggagtactacggcctccaccacctcaccgtcaagagcgacgtctacggcttcggcgtcgtcatgctcgaggcgctcaccgggaagcgcgccatcttcaaggaggccgagggcgggagccccgtcagcgtggtggactacgccgtccccagcatcgtcgccggcgagctcagcaaggtgctcgacgcccgcgcgccggagccgagcgcgcacgaggccgaggccgtcgagctggtcgcctacacggcggtgcactgcgtccggctggaggggaaggaccggccggcgatggcggacatcgtggccaacctcgagacggcggtggcgctctgcgaggacagcgccaccggcggcggcgccgccggccatggcaacagctcgtccagcgccagcctctccatcacgtccatggagttgagtaggatggattgattgagattagtagcttccctaattcaaatccagagtttcaaattgtgattagccccggaaggagattttaaaatttgttgcttcacttcattttttttagaggagaacatcatttgtgtgattctctcacacattttgttcatggtggctgtacatgattttgtattgaactgatttctcttttcat

SEQ ID NO: 9082 - DNA, 2680 bp, Oryza sativa
  ref <308>: DATABASE ACCESSION NUMBER: AK106430
  ref <309>: DATABASE ENTRY DATE: 2002-08-28
acatacacacacatatctcatcttgttgtttctgagctgctccaagaagcagagctctgtccatggaggaggagcagagcccgaggctcgccgccggcgagccggagcgcaagctcgaggacggagtcaccgacgccgaggaccccgggtgcacgggcaatgcggccatgagctcgctggagcagccgcttctgaagcggagcaacacgctaacggccagccacctcgccatggttggcgccaaggtctcccacatcgagagcctcgactacgaaattatcgagaatgatctgttcaagcacgactggaggaggcgatcgaacgtggaggtgctgcagtacatcttcctcaagtgggccatggcgttcctcgtcggcctcctcaccggcgtcatcgcgtcgctcatcaacctcgccatcgagaacatctccggcctcaagatgctccacatggtgcagctcgtccgcaagaaaagatactgggccggtttcttgtatttcgccggcgtcaacttcggcctgacgttcatcgccgccatgctctgcgtcgtcttcgccccgaccgccgccggccccggcatcccggagatcaaggcctacctcaacggcgtcgacacgcccaacatgttcggcgcgccgcagctcattgtcaagatcatcggtagcatctgcgcggtgtcgtcggggctggatctcgggaaggaagggccactggtgcacatcggcgcgtgcctggcgaacttgctgagccagggcggctccggccggcaccgcctccggttgcggtggctgcgctacttcgacaacgaccgcgaccggcgcgacctgatcacctgcggcgcgtcgtcgggcgtgtgcgcggcgttccgggcgcccgtcggcggcgtgctgttcgcgctggaggaggtggcgacgtggtggcggagcgcgctgctgtggcgcaccttcttcagcacggccaccgtcgtcgtcgtcctccgcgggttcatcgaggtgtgcaggaacgggcggtgcggtctgttcggcgagggcgggctcatcctgttcgacgtcggcgacgtcgccgtccggtaccacgccggcgacctcctcccggtgaccatcgtcggcgtgcttggcggcgtcctcggcgcgctgtacaaccacgtcctccacaaggtgctccgcgtgtacaacctcatcaacgagaagggccgcgccgcgaagctcgccctggcgctcgccgtgtgcgcgctcacgtcggcgctgctgtacgtgacgccgttcgccgtgccgtgcacgccgtgcgacccggcgttcggcggcgcgtgcccgacgctggggaagagcggcaacttcaagcggttcaactgccccgagggccactacaacgacctcgccaccctcctccacgccaccaacgtcgacgcgacgcggaacatcttctccacgggcaccgccggcgagttcaggctcgactcgctgctcatcttcttcgccgtctactgcgtcctgggcctcttcaccttcggcatcgccgtcccctcggggctcttcctccccatcatcctcatgggctccgcctacggccgcgtcacggcgctcgtgctgtcgcggttcgcccgcatcgaccacggcctatacgccgtgctcggcgcggcggcgctcatgtcggggtccatgcggatgaccgtgtcgctcgtcgtcatcttcctcgagctcaccaacaacctcctcctcctcccaatcaccatgttcgtcctcctcatcgccaagaccgtcggcgacgcgttcaaccccagcatctacgagatcatcctcgacctcaagggcctcccgttcctggaggcgaagccggagccgtggatgaaggacctcaccgtcggcgagctcgccgccgccaagccccgcgccgtggcgctccaggtggtggagcgcgtgtccacggtggtggaggcgctccgggcgacgcggcacaacgggttcccggtgctggaccggccgcggcccggggtatcggagctgcacgggctggtgctccggtcgcacctcgtcgccgcgctgaggaagcggtggttcctgccggagaggaggaggacggaggagtgggaggcccgcgagatgttcagctcggcggagctcgcggacaagtgcggcggcgtggacgagctggagatctcgccggaggagatggggatgtacgtggacctccacccgctgacgaacacgacgccgtacaccgtggtggagaccatgtcggtggcgaaggccgtcgtgctgttccgctccgtcgcgctccgccacatgctcatcatgcccaagttccaaggacccgagatatctccaattgtggggatcttgacaaggcaggacctgatagcacacaacatcctcggtgcatttccacaccttgcaagcaagaggaaaacacattgagaggaaccatttttgagagttaatccatctttattgtcttgaagccaaatatcagagtcacctgcatatacagcttttatgaggctttgagttttttttcttttttttttcagttatcctcttctctgtaagtagattcaggattattatttgctgctcttctgagagtgcttgaataattgctgccaatgtaaaatcacacatgtaactatgccagatgtaatcaaaagggacacaaccatgatgcaatagagcaattctttttt

SEQ ID NO: 9083 - DNA, 1801 bp, Oryza sativa
  ref <308>: DATABASE ACCESSION NUMBER: AK106431
  ref <309>: DATABASE ENTRY DATE: 2002-08-28
atgaaccggaagcctggttacggtgccgaactgcgcgctaacctagaacccacaaagggtgttggtcgattaagacagcaggacggtggtcatggaagtcgaaatccgctaaggagtgtgtaacaactcacctgccgaatcaactagccccgaaaatggatggcgctgaagcgcgcgacccacaccaggccatctgggcgagcgccatgccccgatgagtaggagggcgcggcggccgccgcaaaacccggggcgcgagcccgggcggagcggccgtcggtgcagatcttggtggtagtagcaaatattcaaatgagaactttgaaggccgaagaggagaaaggttccatgtgaacggcacttgcacatgggtaagccgatcctaagggacggggtaaccccggcagagagcgcgaccacgcgcgtgccccgaaagggaatcgggttaagatttcccgagccgggacgtggcggttgacggcgacgttaggaagtccggagacgccggcgggggcctcgggaagagttatcttttctgcttaacggcccgccaaccctggaaacggttcagccggaggtagggtccagcggccggaagagcaccgcacgtcgcgcggtgtccggtgcgcccccggcggcccttgaaaatccggaggaccgagtaccgtccacgcccggtcgtactcataaccgcatcaggtctccaaggtgaacagcctctggccaatggaacaatgtaggcaagggaagtcggcaaaacggatccgtaacttcgggaaaaggattggctctgagggctgggctcgggggtcccggccccgaacccgtcggctgccggcggactgctcgagctgctcgcgcggcgagagcgggccgccgcgtgccggccgggggacggaccgggaacggccccctcgggggccttccccgggcgtcgaacagccgactcagaactggtacggacaaggggaatccgactgtttaattaaaacaaagcattgcgatggtcctcgcggatgctgacgcaatgtgatttctgcccagtgctctgaatgtcaaagtgaagaaattcaaccaagcgcgggtaaacggcgggagtaacaattaacaataaaaagatatggttgggtggagaacgtcatcaatccgtcgccaacatgagctaccaaaacatcgacttcttgttcgtaatgagaaatatcctcatattgtccatgttgataaaggagcaacgaacagtaatgaagcagaagctcgttctgatctttatgacccagaaggtatatttttctgtttgttagttaccccgaactgtcaaagttgattgttcatcaatagatgacaaaaatcccttctatttgcagaggagatgattagaggccttacacaagtaccgtgggaacgtgttgatgtgagcttccagaaaagtagtcaaagattggttgcgcataacaccatccaggtgaagagctattggctaaactcagacggcgcggacgttatcaatcacatgatggataattttatcgtctagtccctgaactctacgtgctgcactgtaccaatattcagagaattttagcgattggcaattcaattttgcttaggtattttttttcccttgtaggttacagttctcatagataatgtgattcaattatttaggtttcactctaaatgtttctgatccccattcttccccattaacttagttatcacatccaaagtgtatcataacttgtaccctctactgtatcagagtacaatgaagctaatagatatttcctgttgaattgtattt

SEQ ID NO: 9084 - DNA, 1933 bp, Oryza sativa
  ref <308>: DATABASE ACCESSION NUMBER: AK106432
  ref <309>: DATABASE ENTRY DATE: 2002-08-28
gaatgcccagtatgtaacaagacgtttgaggaacagtcacggtactttggtcacattggatcccatgcaaagtatcaggggctgactcctgaagcattcctacaaaccttttcaggaaaggttggtaacaattcttttgcaggtttgtcatctagccttcaagtattggtcggatcaccacaactgaatgagaagactactgcttgtgaagcacgatcgcagcatcacgattgttcaactaaacatggaggcaatagtacaagaggtatagacctttttaactcaaatcatcctgctaacttcaatgggcataatcaatcttggtgtagatctgatgaaattcctcccaccacagaagctcaaagcacatggacttatagaaataatgagatgaactgtgctgatagaactgttccgagaacagtacctcagcccaatgatcacgaggattgcagggttagtggctttgctgaagcaactaattttaatgatcaagcaggaagacaccaaggttttagacctttctcctttggaactaccaaccattgtcaaggccagataattgatcatgcagtagctgcttccaagcatgctgaggttaataatagtatgaaatcaagagatgtcaacctcaattcacgcctgaacacaatatcctttcctattgcaactgcaaacaatgaaacatcgactgcccttaatgacgtgaatcggtcatgcattactggaaaaggttttagtggaagtttcagtaacaatgatggtgctgcatctatcgtgttgcccagttctggattaaacaataaaatttctagctccctcggtgtagctgacagatcatctattgctgccagatccttcaatgctggttatgtttatgaaaatggcgcttctgaagctaacaatattggcaacaaaaacaataccatggtgtatcaaacaagtttggccatgcgtccactctctcctccatttttttagccattggatctcccttcaagattcgtgcaccctcaacgtgatccagtccaagcaatcgcatgttgccaaaaatgcccagcccaagcagcagtgggaccctcacctcgcatcacattttttcatcccgacacgcgcccatctgctacagtttgaaaaacagtaatctcctctttcctttttttctccattgcgcacgagagaaagagagagagagaagctgtcagtgagagtgggggaaatctcggtgagagggaaggagagaaggtggcggcgatgcagcagcgggagcgctatgccgtcatcttctccggcagggggagccctcgcgctgccgttgccgtcttctgtggcggagggagcccttgggcttggcagagagcgtgggggaggagggtcgtcgtgttttgtccgagagacacgttttgttgtccccacggcggtcgtcgacgaggcttccgtggagccattcgtgtgcagcggcgatgcgcatatggtactacctgcaccggtggttgagctgaccaagtattctcaaccaaatctcatcatgaatcccaggagttctgaaccggaggcaagcaacaaagagaccacaacgattcacaaggtgagctagtttattttctgcaacaaggaaaccacatggtttctgatttttgtgtgttgattcgaatgaggagtggtggtgtactatctcatttttttttcttagacactgtgctttcagatctgagacaagggtgatttgtggaatgaacaaagtcatatgtctttcttagacaccatgcttttcagatctgagcaagggtcatttttgtggaatgaacaaagcgatatgtcttcttagacattttgtttgcagatgtaagcaagggtgatttggcatgaacaaccgtgtgcacttttctgattttgtgatgtcagtttaacacttagattttccagttttcag

SEQ ID NO: 9085 - DNA, 1324 bp, Oryza sativa
  ref <308>: DATABASE ACCESSION NUMBER: AK106433
  ref <309>: DATABASE ENTRY DATE: 2002-08-28
cgatacgatgtgtttgttgactactagtatggcgggaaaggagcggagccacgtgcacttgtgcctcaccgactacagggacggcacctacacctacacggtgcaccacatcgacgtcgcccccttcttcctccgctccgacgaccccgacgtcccagacccgggagccatggaggaggctgtcctgcccccacccgccacgcgcctcgccacgcgcccggagaccaacggcctcgagttccaccacctcctccgcgccgccgacggaggcgacatgatcgtggccaccgacgaccagcgccgcaccctcatctacgacgtcgccgcccgcgccgtcggcccggggcacatgctgctctccgacaagcgcgtcccggtctccgccgccgtcgccgaccgcctctacgtcctcgacacctcgcacgccgcccggcgcgccacctgcttcgaggccctcgtgtacgacggcgtcgaggacccgctgcgcgccgactggtactggcgccgcctcccgggccctccctacgccgacgacggcatcggccgccctctccccggctcccgtgtcaccgccctcgcggtggtcggcgcaggcatctggaccacgacggcgccggcggaggacggcgtcgcctccgtccgcccctgctcccggctcgaccccaggcgcggcgtctggacgacgcccaagggcgccggcgccggccccggcacctactcgttcgacaccgagcggcaagcctggaggagagagggcgactgggagctgccgttcgccggcaaggccgagctcgtcccgggctgcaacctgtggttcggcttctcccgcgccgacgggtcgtcgtcgctctgcgccgccgacctcgccgcggcgccgcacagggcgtgcggtgtgtgggaggacttccgcccgcccaaggagtggttcagctgcggccgccacctcgtcagcctcggctccggcaagctctgcgtcgtcaggttcttcgccaccgaccccctcgacaaatggaggcgtagggaccctgtcgccatcatcaccgccatggaggtgcggactatgcctgcttgcgacggcgacgacgacggcggaagaggaggagaacggcggatcaaggtggtgaagcacatgtctaggtgtatcaagctcccaaattacaataaaggcagaaattgggtcctctaatactcgttaaatttcactctaaaatgcacaagtatgatttctttaattaatttatagatctaaaagatgtatgtatctacataaaattcaatgcaactccaacatttccttccaagtaaatggtattaataatctctc

SEQ ID NO: 9086 - DNA, 1486 bp, Oryza sativa
  ref <308>: DATABASE ACCESSION NUMBER: AK106434
  ref <309>: DATABASE ENTRY DATE: 2002-08-28
gagtgcaaaaccacccgacgcgacgcgaggcttccactccgccaccgccaccgccaccgccgcgcctcccctccccgccggcgacggctgccatcccaccggccaccgggagcaggaagccaggaaccccaccgcaccagcagcttacgccgcaaccagcccatgggcagcatcggcggcgacgaggcggcggtgctgcgggcggaggagtcggcgtcggggggcgtcgacgtgtggagcgacgccgtctcctcccacgaccccgaccacctcctcgtcatggtccacggcatcctcggcagtaatgctgactggcaatatgcggctaacgaatttgtaaagcaacttcctgatgatgtaatcgtgcactgcagtgagaaaaacattaataccttgactctagaaggtgtagatgttatgggggaacgtttagcagatgaggtgatcgatgtaatcattcgaaagccagaactcactaagatttcctttcttgcacactctgttggaggattagcagcaagatatgcaattgcaaagctttgtagacatccaagtgacacatccaagagtgaaacgaaaggaaccatcggcgggttggaagcaatgaactttataaccgtagcaacacctcaccttgggtctcgagggaacaatcaggttccccttctctttgggtccattgcaatggaaaattttgcttctcgtgtggtccattggatatttaggagaactgggaaacatctttttctcactgatgatgatgagggagaaccaccattattgcagcgcatggctgaagattatggtgatctttatttcatatctgctttgcatgcatttagacgacgagtggcttatgcaaatgccgactgcgatcacattgttggctggagaacatcgtctatcagaagaaagactgagctgcctaagtgggaggaatcgatatctgaaaagtacccccacattgtacatgaggaatactcagaagaactcggtgatgaaacatgtcaaaattcggcaacagtttgtgattcagacatattggaagaaaaaatggtgacaggacttcgacgagtatcatgggaaaaagtagatgttagcttccataccagcatgcagagatttgctgcacacagcataatccaggtcaagtaccagtttatgaacgaaggcgcggatgtcatacagcacataatagaccacttccaagtctgatagttcctcactcttggaaacatggagcagagctgcagatggttttccactctacttacagaaaattagaatccagatttgctttgttgtacaccaaaatctcccagagctgtacataagaggaatatcatagaaaaaaacaaaaatcttataagactctttcagagaatggccactgttgacctgacaatgttcatttcccccagagaacttctcatgtggaatgtaacaacattgcatgagatatacgtcaggcaccctttgaaaacgt

SEQ ID NO: 9087 - DNA, 612 bp, Oryza sativa
  ref <308>: DATABASE ACCESSION NUMBER: AK106435
  ref <309>: DATABASE ENTRY DATE: 2002-08-28
aaaagagcttatccggcgcgcgaagaggaggctcgccgcctcgccgctgcagctccgtgcggtcgtcgtcggcggcggcgctctttcggtcctcgccggcgggtctcgggaaccgagtgctcaaatgggtcatggcccaaggaggctggtctctggtgcatatgccatgccaccctgggtgcctattgaagtgaaaattgatcagaaatggaaacgagcatttgtattgagacaagccgatcacaggggactctgtcttgtaagagttacagggacacccgatgctgagccagtcatggtgccattgtcaacgattcgattaccttctcgggtccatcgtgctaagagaagaccagaaactgccatgcaaatacaagtgaagaaggctaggattgagcaaagcagtgacgacgaagaatagtataatgcatgcctgtaagtatgtatgttgctataacacatgttgtttttttaggatataagaattcttagcaacatttttacctttcatgcctttgtaacagaatatttggtcatattgtagccatgcgattcaaaattattcttcaaaaaaaaaaaaaaaaaaaaaaaaaaaaaaaaaaaaaaaaaaac

SEQ ID NO: 9088 - DNA, 2180 bp, Oryza sativa
  ref <308>: DATABASE ACCESSION NUMBER: AK106436
  ref <309>: DATABASE ENTRY DATE: 2002-08-28
aagagtgacaagagagattcagatagtttctcgctactcgctcccgccaagctaagttagccacgtacaaacacggccatgtccaccgagaactacgacccgtgctaccccgaccagccggtggtgcaccggtacctccccgtgtgggccaagctgccggcgttcgccgccaagccggccttcgtctgggcggacgacggcgacacggccatgtcgtacgcaacactgacatactcccagctcgacgccgccgtcgaacgcatgtcgtccggcctcctcggtgccctccggcgagctgacaccgtcctcgtgctggcctcgccgggcctccgcctcgtcaagctcctcttcgcgtgccagcgagcggtgctcacggcggtgcccatcataccacccgacccctccaggcccggcgccggcggcgccgcgcactcgcaccttctgcgcgccgtgtcgcagacgcggccgagggcggccgtcgccgacgcccgatacattgacgccatcaagaagtcgaatgccgtcgtcgacgtcgccggagaacctgatcggctcgccgccatgttaaggagcctacggtggctgtccgtcgacgagctggagcaaggaggtgccaatggagcggcgccggtgacgccgttcgtgggcggcgagccggaagacgcgtacctgatccagtacacctccggcgcgacgggcgcgcagaagcccgtggtgatcacggcgggcgcggcggcgcacaacgcgcgggcggcgaggagggcctacgaactgcaccccggcagcgtcgtcgtgtcgtggttgccgcagtaccacgactgcggcctcatgttcctcctcctcaccgtcgtcgccggcgccacctgcgtgctggcctcccccgacgccttcgtccgccgcccgcgcctctggctcgagctcgtcaccgagttcagggcgacgtgcacgcccgtgccatcgttcgcgctgccgctggtgctcagacgcggccgctcgccggacgggcggcggcggcggcctctcgagctcggcagcctggagaatctcatcctgataaacgagccgatttacaagtcgtgcgtcgacgagttcgtcgcggagttccgcggtgacgggctgcttcccgcgtccatctcgccgtcgtacggcctcgcggagaactgcacgttcgtgtccaccgcgtggcggagccgccggtgcgtggacctcccgtcgtacaagaagcttctgccgtcggcgaggctgtcgttccacatggccgacgaggagccggagatcgagatcatcatggtggacgaggagaccggcgagccggtggaagacggcgtggagggggagatctgggtgtcctcgccgagcaacgcgtcgggttacctcggccacccgtcggcgacccgcgaggtgttctgcgcgacgctgccggggaagggctcgtgctacgtgcgcacgggcgaccgtggcgtggtggtggtcaggggagcagagcggtatctctacgtcgtcggccggagcgccgacgtcctcgcgctcgacgtcgacggcggccagcgcagcgtgtgcgcgcactacattgagacggcggcgttcggcggcgcgccggatcgcctgagaggcggctgcattgctgccttcgccacctcgccggtgccgtcgacttcgcttgtggtcgtcgtggcggagctactgaagggaagcggcggcggcggcggcggcggcgaccacaaggatatctgcgagggcataaagcgagcagtgtgggaagaggaaggtgtgagggttggctggatcgtgttggtcgacagcggcgtcgtgccgaagacaacgtcggggaagctccgccgcggggcggcgagagagaagctgctcgccgggaagcttccaattctcttggaagcacggtatgacggagatgagagctcgagctcggtgccatgggacggtggcgaagaggagatggagaagtgtcctggcatggatgcggcttatgggagtgcaagccgccgtctgcgtctgcagtcgtttctttgagtgaacatcagtgttggctcttggctccaagccttcctacttgggcatccttaatgatttaggcccatatcgaccataagtgggatgcaatcattttattcatggcaaatgttactgtgttttggatctcgtctttaccttgagcttaggcc

SEQ ID NO: 9089 - DNA, 1774 bp, Oryza sativa
  ref <308>: DATABASE ACCESSION NUMBER: AK106437
  ref <309>: DATABASE ENTRY DATE: 2002-08-28
ctgcccaggaagcacgcgatgctacaactgctggtactcagggcacatcgctaggaattgccctacctcccgtgcggctagggcgcagccggccactggttcaaaagaagtggcaacgaagccagcgggaggtgaaaaaccgcggaaagaagtgctagaagctttgcctcccagaaagaaggggcgagaagagggagtggctgctggtgatggcatggctagctttcagatctgcgctcagcagccctctcgggtcatgaaggagtggcggaccggggacgccaacatccggccggagtcggggcggtgcaccatctcctggacgccgcgcatggtggagacggaggccatcttcgagcagaaggtgctcctggccacagtgcttggcaaccagccagcgctctcacctagagatctggttgcggtgatcgtcgactgtggcatcctccccgcgcacttccgggtggaggtaacgacccctgaggactacctaattgtgtttcgttctgccagagaaaaggattgggtcctcggcaaatccaaacaagtcttcttccaaggggcgccaatcgccttcaagagctggaacaggcgcctgctggccagcagcacgaggttccaattcttcaccaagctgtcattagaagggcttccccagcacgcctgggatgaggaggcgatggcccagctgatccgtgagctgggtggagagttggtggagcttgttccgccggcggacgcgagggttctcaccatgttcgcctggctcaagaacccgtctgcggtgccaacaacgctggaggtggagatcccagagcgcgcggggggcggcccgccgtgctgggaacgtatggcgggatcaatcaggattccaagggcgcctctgcacaagtgcacgctgacgtacaatatcattgtgcacattgaggagatcattgacccgacgcccctccatgttcccctctccacggcctccaacgacgaagatgatgatgacgtcccgcgccaggttacgttctcctgctgggctggccgaatcgacggcacagggccgtggacgtcgaaacaaggcggaggtcggccttttggcggagcatctggctttgctggtgggctaccggggcgcacctggtcgacatcttcagttcagcgggtgtccgagatgatccctaccaaccccggcgcgctgagggataccgcccgcgacgacgagcacactgaacacgccggctcgggcctgcatgtttcggacagggatacgatagaggaacactcaagtggcgagcctgggaataggatggcggggaggggagatgatgctgcgtgtaatgtcgtgccgcgtgtgcttgccacgagcacggcgctggtggcggggagagacgttctggcgacggggaaagatgtgctggcgacggagaatggcgttctggcggcggggaaggatgtgctggcaacagggggcgaggttgctctggtcgcgagaagtgatgcttagcggttgggaagtgaggttcaggcgacaggacgatccgaagagggtagcaaggtaactgcaatgccttcgtcgaagatctggttctcaccacaattgcagccaaagagctgtgcagcgccatcccttgcagtctcctgcgatgtcgtcgttctggatgagatgcagcgaagcccatcagctgatcagttcacacagatcatgtagcgcccgttccgtcgtggcgcctagcgggaaaattatctctcaaaaaccctaattgcgaaatttgttccaaaaaac

SEQ ID NO: 9090 - DNA, 1509 bp, Oryza sativa
  ref <308>: DATABASE ACCESSION NUMBER: AK106438
  ref <309>: DATABASE ENTRY DATE: 2002-08-28
aaccgaaacccgtacctgcaaccgcgtcgcgtcgatgtgctgaggtgatctgatcgattcaacgaggtcgacgccttaacgagagagagagagagagagaggagaagaaaaagaagcttagctcgatcgatcgctccatgctctgtgttgttgcgagatttggagagaagtattgatggttgtgcagaagatgtggatgcccgtggatctccgactcgctccagcaggatctcaaggcgcagaggatcaaggtgcgtcgcctcaaggaggagtccctctggaaccagagctacgagaaggccgtcggcctcatggcgcgcgccgcgtgcgccgtgttcagccgcatctgtaccatcttcggcgcgttcgtccccggcctcccgccgccgctgccgtcggccgccaccgacagcgtccagacaaggctgtccaagctgctcaacccgcgggcggtcagggcgaaggcgtcgtccgggccgatcacgcggcgagacgggccgtcgcgagtccacccgccggtgatcagcagctcgtgcccgatcatcgggctgaggccgtccgggcagaaggccgccatcgactggcgcaagctcctggacgcgccggccagcacggtgggcggcgcggggctggaccagcagtacgcgaacgtgatcgtgtccgcggagcagctgctgcagatggaggccgaagggcggcaggaggaagcgaacgcggagcgcgccgagatgtacgagatgctgccggcgaagctcagggcggcggtgcggtccaagctgcgcgactggtggcgggacccggggccgctggacgccgggctggcgcaggggtggaaggacgcggtggaccggatcatggcgtggctggggccgatggcgcgcgacacggtgcagtggcaggcggagcggaacatggaccggacgcggcggttcgacggcggggcgcgggtgtacgcgctgcagacgctccggtgggcggacaaggagaaggccgaggcggcgctcgtcgaggtgctcgtcgcgctcagctgcgtctgctggtacgaggagcggcggcgcggctccgtccgcctcctctgaatccatccattgaaccgttcaaccattcaacacgcgggaaacttttgcccaaagattctacctttggcttttctccttcttccttcttcctcttcctcttcctcgcttcatttgtcaatgctttgattgaaagagttgattttttttgttttctttttgggagggagggggttggtagatcaggttagaaccggtgaactattcaacgggttagagtagtagcagtaacagtaatagtttgaaaggttggagggagaaagaaaagtaaaaaacgatggaggagagtttgattggttggtttgtgtgtggcgacagtcagtggtctgaggctgacatgccgggcccgcgtgtcggcctcacactggtgacggagtccggtgtgtaagacgtgttacaggaaatttgtacaatatacacgattgattctttg

SEQ ID NO: 9091 - DNA, 1420 bp, Oryza sativa
  ref <308>: DATABASE ACCESSION NUMBER: AK106439
  ref <309>: DATABASE ENTRY DATE: 2002-08-28
acttcactacttcagcacacactgaacttgttgcaaagagagacatatagtatatagttagtagcttaatttgcagcgctaataagctctagctttctcttcttcctagcaaattataattaacactaggttctagctagcatgggtgtcgagaagacgacggcgaacggcggcagtggcgccgcggcggtctccggcggagggcgcaccgtctgcgtcaccggcgccggcgggttcatcgcgtcgtggctcgtcaagctcctcctcgagaagggctacgccgtccgcggcaccgttcggaaccctgatgacgctgccaagaacgcgcatctcatggcgctggccggtgccgcggagcggctgaccctcgtccgggcggagctgctcgacaaggagagcctcgccgccgcgttcgccggctgcgagggcgtcttccacaccgcctcccccatcaccgacgacccggagaagatgatcgagccggcggtgagcggggcgaggaacgtgatcaccgcggcggcggacgcgggcggcgtccgccgcgtggtgatgacgtcgtcgatcggcgccgtgtacatgggcggcggcggcggcgaggaggtggacgagacgtgctggagcgacctcgaccactgcagggacaccggaaactggtactgctacgccaagacggtggcggagcaggcggcgtgggagctcgccaaggagcggcggctggacctcgtcgtcgtcaacccgtcgctggtgctcggcccgctgctgcagcgcggggtgaacgccagcacgtggcacgtgctcaagtacctggacggctcggcgcgcacctacgccgacgcggcgcaggcgtacgtgcacgtccgcgacgtcgcggacgcgcacgcgcgcgcctacgagtcccccgccgcgcgcggccgctacctctgcgccggccgcacgctgcaccgcggcgaggtgtgccgcatcctggccgccctcttcccggggtacccggtgcccaccaggtgcaagggcgacgccggcgagacggccgaggggtgccggttcagcagccgcaagctggcggagctcggtgtcgccgtcatgccggcgagccagtgcctgtacgacaccgtcgtcagcctccaggacaagggcctgcttcccttcgtccctgccgccgccatgccgtgagctagcgatcgccggcgcgccgcttttgttttacataccgctccggccggccgatgatgaccacggcgacgtgtcgccaccggctggcctgcgtgcgtacgtgcctgtatgttcgtcggaagatcagaagttgtacaactgtatttctcctaagggccggtccttttcggagcacctataaatcgggcaccgattagtttgtcaaaaatagcgtgctgtttcactaattaaaaaaaatgtttcaccaact

SEQ ID NO: 9092 - DNA, 1515 bp, Oryza sativa
  ref <308>: DATABASE ACCESSION NUMBER: AK106440
  ref <309>: DATABASE ENTRY DATE: 2002-08-28
atcacaaactcatctagctagcgggctagcactggcactggcactggcactggcactggcaccggagagagttaacagacacagtcaacagatacttcttgcacatcggttaatcaagcaaccggtcgagatgcaaaatctagccttcgtcatagtcacattgcttgcagcgcttgccatttctcgctgcaatgctgcggcgaccgtccggatgcagctcacgcacgccgacgccgggcgcggcctggccgcgcgggagctgatgcagcgcatggcgctgcgcagcaaggcccgcgcagcgcggcggctctcgagctcagcgagcgcgccggtatcccccgggacctacgacaacggcgtccctacgacggagtacctggtgcacttggccatcggcacgccgccgcagcccgtgcagctgacgctcgacaccggcagcgacctcatctggacgcagtgccagccgtgccccgcatgcttcgaccaggctctcccttacttcgacccgtcgacatcctccacgctctcgctgacttcctgcgactccacgctgtgccagggcctgccggttgcgtcgtgcggcagcccaaagttctggccgaaccagacatgcgtatacacgtactcctacggcgacaagtcggtgacgacaggcttcctcgaagtggacaagttcacgttcgtaggcgccggcgcgtccgtgcccggcgtggcgttcggctgcggcctctttaacaacggggttttcaagtccaacgagaccggcatcgccgggttcggccgcggcccactgtccctgccgtcgcagctcaaagtgggcaacttctcccactgcttcaccgccgtaaacggattgaaaccgagcactgtcctgctcgacctgccggccgatctctacaagagtggccgcggcgccgtccagtccacccctctaatccagaatcctgccaatccaactttttactacctctcgctgaagggcatcaccgtcgggtcgacgaggctgccggtgccggagtccgagttcgctctaaagaacgggaccggcggaacgatcatcgactccggcacggccatgacgtcgctgccgacgcgtgtttaccggctcgtccgtgacgcgttcgccgcgcaggtgaagcttcccgtggtgtccggcaacacgacggatccctacttctgtttgtcggcgccgctgcgggcgaaaccgtacgtgccgaagatggtgctgcacttcgagggcgcgacgatggacctgccccgggagaactacgtgttcgaggtcgaggacgcgggcagcagtatcctctgccttgccattattgaaggcggagaggtgaccaccataggcaatttccagcagcagaacatgcacgtactctatgatctgcagaatagcaagctgtccttcgtccctgctcagtgcgacaaactttagtctcgcattgctctgaccataatttgttatagctgaatagtttggatttgagcaactctatgccgtacagacatccatgt

SEQ ID NO: 9093 - DNA, 3119 bp, Oryza sativa
  ref <308>: DATABASE ACCESSION NUMBER: AK106441
  ref <309>: DATABASE ENTRY DATE: 2002-08-28
tccgattcccccttccgcttttctaccaccaccgctgctgctgctgctgctaaccccgccgccgaagcaatccccccgcggcggcctccccgactccgattccggcggcctcctcctcctcttcctccgccgaccccgagtcccccccggcctccgattccgtacgccgccgctcccgcccccgtcctggttgtgtgctgtggcatgggagataagcctgaagctcttttcactcgccgttttcttaaatgatgtccttccttccgaagggcaaaactacacaaacagcgtttaagtggccatggagaggtgaatcgcagctatcggcgcatcttctcattgatattccacctgaaatcgaattgtcggactaccgaagattgccaagccctggtaatgagagcccatcagggctacttcatggagaagactttaaggaggaggtgatccctgacttggatattttctttgagaggctctatgagtatttctgcgcgaaaggtctgcggtgcatcatcaccaagtggataattgagatcctcaatgtgacgtttatggtttgctgtatcgggtttttcttcttgtttgttgattggcctgcccttggcgatttgaaatgtggagtggaagcgctcgagtcaggggcaaaaccttgtgacctaatgaaactcattaagtatcgtcccctagatcctttcacatttacaaagtttatcactattggatccatggttatactctcaacttacggaatcattaactttgtgaagttttttgtaaaactgagaagcacactcaaggtccgtgacttctactgtaacagtctcaaggttacagatctcgaaattcagactatatcatggcctagagtagttgagaaggtcgtacttctgcagaagtcacaacgactttgtgtcgttaaagatctcacggagcatgatataatcatgcgaataatgcgtaaacaaaactacctgattgggatggttaataaaggtatcatcgcattgccaatcccctcttggcttcctggagttggcccaactgtcagctcacgtatgcatggaaaaaaaagctatctgatgcttccaaaggccctggagtggacattgaattggtgcatcttccaaaccatgtttgataggaaattttgtgttagaaaagacattctgacaagtccgtctttattgaagaaacggcttgtatttatgggtattgccatgtttcttctgtcaccttgtcttgttatcttcccattggtatacctatttctgagatatgcagaagaattctacaatcaccccagtacggcatcatctcgaaaatggtcgaatctttcaaagtggattttgagggaatacaatgaggttgaccatttcttcaaacataggttgaacaacagtagtgtcaactcactaaattatttgaagcagtttccaactccactagtatctattattgcaaaattcatatcgtttgtatctggtggattggctggaattcttctcatccttggatttctaggtgaatccatccttgagggtcatgtatttggccgaaatcttctctggtatactattgtttttggaacaatagcaactgttagtcggaatgttgtggttgatgaactccaagtgattgatccagaaggagctatgtcctttgttctgcagcagacacactacatgcctaaaaggtggcgcggtaaagagggcagtgaacttgtacgaagggactttgaatctctgtttcagtataccataacgatgctactagaagagatggcctcaattttcatcactccatatctgctaatatttgtggttccaaagcgtgttgatgatattctacgcttcatatcagacttcacagtttatgttgatggagtgggagatgtgtgcagcttaagcatgttcgacttaagaagacatggaaatagaaactacggttcaccacataatgcagttaaaagcatgagaagctcccaaggaaaaatggagaaatcactattaagttccaaagcacctacacatcatgggagccaaacgcagatggcaagaaatttatttgcaacctccagaaattcaaggagaaacaaatccgtcaacatacctttcaaacaacggaatcatcacagcttgggttgagttgtagaggtcaaactgcagttttccatcgactgctccctagaaacatctatcctggcaatggggtcatttttaactttgatccattaggactgctcgacacagatcaaagagcttgtccatatatcctggattggtattacacacaccaacacacaaatagagaagcgggctcatcttcccaccttaatgaagcatcacctgagcaacaggaggagatatggccacctctgagcaaaccattaacagaaattgaagatgagcaaatctgggattctgatttatatagaagagctcgaagctacctggaggcatcaacatcaagtgcattctttcgacaggccaccaccttcaagcgccatggcagggaacaaaattctaccagccatcaatggtgggctcaggcctcgaggcagcaggctgatccacgaaacagttttcaaaggcctcctcaagacagttttcttgagcctccggacttccgaaatcatttggaagctagccatgattccggccatcaaagtgattgtaggctgacctccagaaggtcaactgatccacaagacagcttcgttgagcctcctgattttggtgattacatgtcctgtcatagctctagctatcatggcgatgaaacgtcggatggaaactcagaactagatcaaagcaacaatagttggcgaagcccccatgccctgtcaaagacaaggtacatgggtgatgatgatcttgacctagaacaaggcccgagtttccattttactgatgcccctcagaaggacagtggaagtgaaggagatggacatggtgtagccaatatttacagctccacgccagccagccttcctgtacggataatacctagaagcagtgacccagtttaggttggtagacacacgaaaaagtactagttggaacacttgtgaacgcgcattttccgtgttctgatagatatatactacctccttccct

SEQ ID NO: 9094 - DNA, 1989 bp, Oryza sativa
  ref <308>: DATABASE ACCESSION NUMBER: AK106442
  ref <309>: DATABASE ENTRY DATE: 2002-08-28
aaaattttgataatttgagttgagagggagaggaggagaagacggcgatgggtttagggttttagcaggcggaggtagagcgccggcgaggtctaccgcggctgggtcggcatggccactgtggaagggagacggggctggataccgtgggctaggagggctatgggcgaggacgccgagatggggagcttgaggagggcggcggcggcgggagaggacgacgagaagggggtaccggagagcgagacggcggcgaagggagacggggcggcgagctacgggtacatccctgtgccgcaggacgccgatggggacaagtgcgttgttcttgttcccacggcgaacgccgctgactggagcgtcgcggagatgaaggacggcggcggcggcggaggaggaggagaggatgctacggccaccaccaagatgatccagatgcgtcccgttgggctaggcatcgctcgtaccagaccgggaggcgaccgccttgacggcatcgaggacggcatcgaggacgacatcgacgaggtgaaagatccaggggaggatcaggccgtacaccaaccgatgctgccggttctcgtcaggggctcagcgccagagaagagtgatttggttcgtttgcttgttttgttttgggaagatttgggatgggtttattgaaagtttgttttcgtctgggtagattttgagatggattcattgaaagtttgtcttgggtcgatttaagatggatttattgaaaaaacctagcttttaggttgtgtttagttcacacaaaaattggaaattttgttgaaattagaacgatgtgaccgaaaagttgaaagtttatgtttttggaaacttccaacttttccatcacatcaaaacttttctacacacaaatttttaacttcttcgtcacatcgttccaattttatccaaacttttaattttagtgtgaactaagcacaacctaaactcggccttaaccgtgtgcttccaacttgaaacaggaaaaaaactgggatcgagatcaagtgggttatggtgtgcatttgttgggctccttcatctatcctgcagccgtggcaatctcaatgaaggatcacccaggagatttaactgcggtgctcttgatttttgggacgatgtggtgcattttggctatgggttttcttcttcatttgcatgctaaggaatccaaggctcttcagcgctttacatctattatccctagagtcttcctttcatgcttctcatatctagtcatgtaccacatttccttccttatacccaacaagaaggcagcccatattttctggtatgtgaaagtgacagtacttctgtcactcttccatgctggaattctgatttgggtaaggagaaacacaaaacattcattctgtgaaattttgccattagatatgttctctctctagttacactgttataataaagtttttttttcatttaggttgtaatccacaagattttgaagaaacattcgaatatctcaatgcatcaggacactcctatcaatgatttcaaatatgtacccagaaatgatctatttgatattgatgaatatgggcactacatcccatccagaccaagatctgaattgcaaaccacctcatctcggttcaggggcaaaaggagccaatcaaagagtacatcaagcagagagaagcaacggaacttgtgaaagttgagtggatacatctggcgcctgtgaagtcaaggggagatttggatgcgtcaaggggaccgttgcttgccagcatccgcgagataggagatcattgcaacagccctgcaaacgatgattcgctgtgattatatttcctggcttgtcttttgctgtgccagcagcccctgagagactgcgtgatccatgctttggttgatagctggaatccccagcagatgttttcttttgtttctctagactatatatgaactcttatgctttcaagaaaaagcagggcgtaatgccttttgtcc

SEQ ID NO: 9095 - DNA, 2781 bp, Oryza sativa
  ref <308>: DATABASE ACCESSION NUMBER: AK106443
  ref <309>: DATABASE ENTRY DATE: 2002-08-28
atcacatgcacgagacacccgcgcgctctcatttttttttcaactacatacaaactcaaatcctcctcttcttcgacctcgcctcctcctccgccgccgccgccgcatttcgccgatggggatgtcctcgccggtgacggaggcggagatggcgacggtgaagacgtcgtccaacggcgtgtggcagggggacgacccgctccacttcgccttcccgctcctcatcctccaagctctcctcatcctcctcctcagccgcctcctcgccctcctgctccgcccgctccgccagcccaaggtcatcgccgagatcgtcgccggcatcctcctcggcccctccgcgctcggccgcaacaaggcctacctccgcgcgctcttcccgccctggagcgcgcccgtgctcgagtcagtcgccagcctcggcctcctcttcttcctcttcctcgtcggcctcgagctcgacctccgctccgtgcgccgtagcggccgccgcgccttcgccatcgccgccgcggggatctcgctcccgttcgcgtgcggcgtcggcgtcgccttcgtcctccgcggcgagctcccgggcgccgcgcgggcgggctacgcgccgttcctcgtcttcatgggcgtcgcgctctccatcaccgcgttccccgtcctcgcgcgcatcctcgccgagctgaagctgctcaccacccccatcggcgagacggcgctggcggcggcggcgttcaacgacgtggcggcgtgggtgctgctcgctctggccgtggccatctcgggcagcggcgaccaccggagccccatcgtctccctctgggtgctcctgtcgggcgcggcgttcgtcacaatatggatggtgttcgtcaagccggccatggcgtgggtggcgcggcggtcggacgggcagggcggcggcgaggtgtgggtggcggcgacgctggcgggcgttctggcgtcggggctcgccacggacatgatcgggatccacgccatcttcggggcgttcgtgttcgggctgacggtgcccaaggagggggagttcgcgaggagggtgacggagagggtggaggacctggtgtcggagctgctgctgccgctctacttcgcgtcgagcggcctcaagacggacgtcgccaccatccggggcggcggggcgtgggggatgctggcgctcgtcatcgggacggcgtgcgccgggaagatcgtcgggacgttcgcggtggccatggcgtgcgggatgtcggcgcgcgaggcgctggtgctcggcgtcgtcatgaacaccaagggcctcgtcgagctcatcgtcctcaacattggcagaggacgcaaggtgctggacgaggagacgtttgcgatcctggtgctaatggcgctggtcaccaccttcatcaccacccccacagtcatggccatctacaagccggcgcgcaacgccggccgccgccgcctgcaccaccgcaagctgcatggcccctccgcgccgtcctcaccgtccgcggctgccaccgccggcgccaaggagctgcgcgtgctggcctgcatacacggcggccacgacgtgccggcgctgatcaacctcatcgagaccatccgcggccacacccagccgcgccgcctcgtcaagctctacatcctccgcatggtcgagctcaccgagcgcacctcctccatcctcatggcccgcgccgcgcgccgcaacggcgtccccttcctccgccctcgccgcggcggcggcgaccaggtcgacgtcgccttcgacacctacgcgcagctcggccacgtccacgtccgccccatgaccgccgtctccgcgctccacaccatccacgacgacgtcgccgccgtcgccgaggacaagcgcgtctccctcgtcgtgctcccgttccaagcgccacccgggccacggccatggcgacgacctcggccccgagtggcgcgccgtcaaccggaggatcctgcgcgaggcgccttgctcggtcgccgtcctcgtcgaccgcggcttcggcggcggcgagcaggtcagctcggagcaggtcgcgcacggcgtctgcgtcgtcttcttcggcgggccggacgaccgcgaggcgctcgagctcgccgggaggatggccgagcaccccggcgtgcaggtcaccgtcgtgcggttcgtcgacggcaaggaaggtagcgaggagcacgccgaggtgacgctgcgcccgtcgaacaccaagaacgccgacaagagctacaccttctcaacggccatcgtcgacacccacaaggagaaggagctggacgaggcggcggtggcggaattccggcagaggatgggggccatggtgaggtacgaggagagggtggtggtggggaacgtgatcgaggaggtggtgtcgatcgggaagagccgggagtacggcctggtggtggtcggcaaggggcggctgccgtcggcgatggtggcggagctggccgtccgggcggcggagcacccggagctggggcccatcggcgacgcgctggcgtcggcggggcacggggtgacgtcgtcggtgctggtggtgcagcagcatgacatgagcaacgccgacgagctgccggtgtccatcgtcgtcgacggccacgcccacgacgacggcgagctcggcggcaacaaggacatggccgagccataaaaacacagaaaaatcattcactagctaggatgatgacgacgatggtgataaagataaattactcctgtttaattagctagcttgtaatcgaatggcagaaaaaaatttaaaataagccagatttgctagtagt

SEQ ID NO: 9096 - DNA, 2375 bp, Oryza sativa
  ref <308>: DATABASE ACCESSION NUMBER: AK106444
  ref <309>: DATABASE ENTRY DATE: 2002-08-28
agaaggtgatataatagccatgtccactcaaaagccaaagcatgtttctgatttgacacaaaataaagcatcatatgttttaggttcggttctcaaatgtggagatgatgaagatttcccaactgattgctgcattgttcagctgtcatcttctattcctgttgaggcagatcctgaaaccaaaatgcctaaaggagcaatatttgctgtgtttctcataaatatgaagacatacaatcgtatatggaaatgccttcgattgggagcaaatgatggtaatcttgccaatcttcagaacaaaagcagtactaatatggtcaatcttgtgcggcaatacaaaccaaaggtagtggaagacaactcatcccaagtatctcagtgcttgaaacatggatcaatggatttccttggccttgagaagttaaacctaaatgcttcacagctgaatgcagtagcagattgtgtctcagtaatggagaaccaattgtcttccctaaaactgatatggggccctcctgggacgggtaaaaccaaaaccatcagcactatattgtgggcaatgctcatcaaaggccgaaagacacttacttgtgcacctaccaatacttccatattggaggtagcatctcgaattgtccgtcttgttaggggatgttcagatggtagtgcctgcttcctaagtgatattgttctgtttggaaacaaaaagaggatgaagatagatgatggtcatgagctttctgtgatatttcttgactctcgtgctgagcgattgttaccatgttttgtgccaaacacgggttggaggcattgcttgtgctcactgatagatcttcttgagaattctgtgaccaagtacaagtattacattgaggatgtacttgagaaaaggaaggatatagaaaaggagactgctgagaaggataaaggtgaaaatgttccttggagaatgcaatttggaaatggtagctgtgagaagaaatgtgggagacctgaagataaggaagaggcatccagattgcttccattcaaatattatttgaaagatggttacaacaacctttctcagaatttgagctattgcattgagatactgtacaacaatcatccaagaaattcaggaacagaacggagctttcagtgtatgctggaggtacttgaattgatcaaaattcttcatggaatgataaactgctataagggcaatgctgacatatggtcagatgaactgcttgaaaccatgatagaagaggatagtgatcctgttttgtggtctgagcagttagtctctgtgcaaactagcacatgcattaaatccaagttcaggcttgccagattgctgtgtgtgcaagaattaaaatatctcgtcaagaacttggagcttccaaattattacagtatacagccaattaaactctatctgctgcaaagaacaaaatgcattctctgtactgtttctagctctttcaggctgtacaacgtgcccatggatgtttctccctcgggcatatgtggaccgttcaagcagcctgaaaaggcaaatcttctggagatgctaattgttgatgaggctgcacaactcaaagagtgtgagaccttaattcctttgcagcttcctggtattacgcaggctgttttgattggagatgaatatcagctacctgctttggtgaaaagcaaaatagctgacaatgctttctttggacgaagtgtttttgagaggctaagtttgttgggctacagtaagcaccttctcaatgtccaatacaggatgcatccagaaataagcaggtttccagttgctacattttatgatggcaagatatctgacggctccaatgtcactactgagaagaatggtcgtagcctgaaaaacacaatagaagttgctacagttttgagaatagttcagagattattcaaagaagcagtttctacacaaagcaagctctctgttggtgttgtgtccccatacaatgctcaagttagagctatccaggagaaagtcggtaaatttatcaaaaatggactcgatgcatataagccggccaaggtttcagaaaccaaggccaaactaccgttcatgagaagtctgaagcttgcaagattcagtttgtctggacgcttgaaatatcgtatggcgtcggtgtcaaggcttgtttgttcagttgtcactcgggtttgccgaaggaagaaaaccatgtgtgttactgttagtattgtgttgctgacaatgtgagccctacattttgttgaaccatatgagcttttgatgcacgctggttgctcaagctcacttatcacttgtgttacttgacaaatcatactccgtaactttttgtactgtattagtataatccaatgccattctctgg

SEQ ID NO: 9097 - DNA, 1598 bp, Oryza sativa
  ref <308>: DATABASE ACCESSION NUMBER: AK106445
  ref <309>: DATABASE ENTRY DATE: 2002-08-28
actgcttgctttcctcctctctctctctcccccttcgccgtagacgcgaacgccgcggcggcgagaaggtcacggcgaggggagctcgtgtcgaggcgaggcgaggtgggggttgattatgcccgagggggggataccggcatgcttccgcggcgcgccgggagggggcgcgggagggggcggtggcggtggcgtgggcgtggcggggcagtcgtcagggggcgtggggactagcctggcgacgtcggtgtacgagacgcggctcggggttgcggcgctgtcgtggtcgcgcgcggcgctcgggctcagcctccgtgtcgtgctccgcgtggcgggcggggcgggggcgggggcgtgggccgcggcgtcgtcctcggcggcgtcggattacgggtgctacgacgagggggcggagtgctacgggggggaggaggaggaggaggaggaggaggcgaccgtcgcggtgcgggtccggccgtggctgctgtggcggcggcgcgggtcgaagcggttccgcgtgcgggaccggcgggtcgacctggcgtgggacctcacgcgcgcgcggttcgcctgcccaggctcgcccgaaccgtcgtcggggtacttcgtcgccgtcgtggtcgacggcgagatggcgctcgtcgcgggcgacatggcggaggaggcgtacaggaagacgaaagcgcggcgcggccccggccccgacgccgtcctcatctcccggcgggagcacgtgtcgatgcgcgacgcggggcacggccgcggccacaagaccttcgtcaacgtccgcggcaaggaacgggagatctcggtggatctcgtgtcgcgcggccacggcaaggacagggacaaggacaaggacaaggagagggacaaggccgacgtcggcatgtcggtcaccgtcgacggcgagcgcgtgctccacatccggcgcctgcgctggaagttccgcggcaccgagaaggtcgacctcggcggcggcgacggcgtccaggtctcctgggacctccaccactggctcttccccaaccgcgacacggcccccgccgacgcctccgcggtcaccccgcctccccagcccgcccacgccgtcttcatcttccgcttcgagctcgccgacatcgccggcgacgaccgcgactctgccgaggtcaaggacgagcacctcctcgaaaacgccgggagcggcggcggcggcggcgcgtgggcaggctacctcgggaggtgggggcgaggggactggagcgagagcagcagcaacggggagaaccggaggaagagggggcaagcccggaggctggccaaggcgagctcgtcgtcatcggcgtcggtggcttcctcctccgcgtcgtgggcgagcggctcgacggtgatggactgggcgagccccgaggaggccgagctgcagcgcggccatggcttctccctcctcgtctacgcctggaaatgctagcaattggcgccgagcaaagcattctttccattgatgatgattgatggtaattcagtgagattttttcttcttcttcttcttctatcttcttcggattgttgtaagttgcaattgttatccgagcaatgttcttgtgcagtttttg

SEQ ID NO: 9098 - DNA, 2583 bp, Oryza sativa
  ref <308>: DATABASE ACCESSION NUMBER: AK106446
  ref <309>: DATABASE ENTRY DATE: 2002-08-28
tgtggtgttcagtctaaggctttttgaaaagcggatttctcccttctctcatccatcgtctttgttaaagtatggaattctcacccagagctgcggaacttacgactctattagaaagtagaatgaccaacttttacacgaattttcaagtggatgagatcggtcgagtggtctcagttggagatgggattgcacgtgtttatggattgaacgagattcaagctggagaaatggtggaatttgccagcggtgtgaaaggaatagccttgaatcttgagaatgagaatgtaggtattgttgtctttggtagtgataccgctattaaagaaggagatcttgtcaagcgcactggatctattgtggatgttcctgcgggaaaggccatgttaggccgtgtggtcgacgccttgggagtacctattgatggaaaaggggctctaagcgatcacgaacgaagacgtgtcgaagtgaaagccccagggattattgaacgtaaatctgtgcacgaacccatgcaaacaggcttaaaagcagtggatagcctggttcctataggccgtggtcaacgagaacttataatcggggacagacaaactggaaaaacagcaatagctatcgatactatattaaaccaaaagcaaatgaactcaaggggcacaaatgagagtgagacattgtattgtgtctatgttgcgattggacaaaaacgctcgactgtggcacaattagttcaaattctttcagaagcgaatgctttggaatattccattcttgtagcagccaccgcttcggatcctgctcctctgcaatttctggccccatattcagggtgtgccatgggggaatatttccgcgataatggaatgcacgcattaattatatatgatgatctaagtaaacaggcggtggcatatcgacaaatgtcattattgttacgccgaccaccaggccgtgaggctttcccaggggatgttttctatttacattcccgtctcttagaaagagccgctaaacgatcggaccagacaggtgcaggtagcttgactgcgttacccgtgattgaaacacaagctggagacgtatcggcctatatccccaccaatgtgatctccattacagatggacaaatctgtttggaaacagagctcttttatcgcggaattagacctgctattaacgttggcttatccgtcagtcgcgtcgggtctgccgctcagttgaaagctatgaaacaagtctgcggtagtttaaaactggaattggcacaatatcgcgaagtggccgccttcgctcaatttgggtcagaccttgatgctgcgactcaggcattactcaatagaggtgcaaggcttacagaagtgctcaaacaaccacaatatgaaccacttccaattgaaaaacaaattgttgtgatttatgctgctgtcaacggcttctgtgatcgaatgccactagacagaatttctcaatatgaaaaagccattctaagtactattaatccagaattactaaaatccttcaacgaaaaagggggattaactaacgaaagaaagattgaacttgatgcttttttaaaacaaactgcgaaggagattaattagatagacctttttatttttcgtcatttgatcacgaaaacagggattctggaacggccaagaatcccagcggttgttcgggtcgaaaaaccgagaacaagacatgccacaaagtggcagatgaaggcaggggggagagcctagtcctcaacctcttcttccccaaaaggtagttatgaacgtgccaaacttattggatttattcttggaatgctcataaccacctttactctttttttcattctttactcagaggaagtcatgccgtttggagaagagcaccaagtggggggagtgtggagtccccgaaagaggagctttctaaaggcaagagaaaagctccgatggagcccttggagctacagggaccaccaacccttcgcagcttggacgatttgattcttgtgccactcagccctgaggagggcgcctgctcgacccagtcaggtactactccgccgccggccccgagtaactctgcgggggtcggtgcagccctttcttctattccggagtgcataaacaaggatcctcaaaaagcgaaatcatttcgttaatggcatttcagaaatgagtcataggcgcctgtacaatgacagaatagagagtcctttttttccagaatgaatcattctattcaaatctcacaagttctctttacgcgtcttctaggggcattgttgaacgcaatctgcaggaacaagaaatgattctttcttattttgaaacagaattcaaaataaaggaggatttaattcggttgctttatgaaggccgacgccgtgccgatagatacgttatacacgaaacgaaaatagccagtacggtggacgcgttcctttccaaaaagggattatcaggagctcccagtgccgagggggtagttcaactcaagaaggagcggtactttctggaaaatcccgggaggaatggagctcctttgtatagggaactcgaagaactcttctaagggggccccaagccg

SEQ ID NO: 9099 - DNA, 1807 bp, Oryza sativa
  ref <308>: DATABASE ACCESSION NUMBER: AK106447
  ref <309>: DATABASE ENTRY DATE: 2002-08-28
aagaacgaaggaactaccacgctcgatcttccgctgcgcgcgccgatttgagctttacgccggcctacccaattacccaatccagcaagaacagcatatactcgtcccgcccatggcaggatcgactctgttccgatggctcttcttactgctggccatcgtgtcgcttgccgcggcggatagcggcagcggcgaagcagagaccaccgtccccggacaaattcgcctgagctgcggcgcgtctgcctccgccaccgacggggacggccgggcgtgggacggtgacgccgtgtccacgttcgcgccgtcggtgaccggcgtcgcggccgacgcgtcgtaccaggacccctcgctgccttcccccgtgccgtacatgacggcgcgcgtgttcagctccagctacacctactccttccccgtcaagcccggccgcgtgttcctccgtctctacttctacccgtccgcctacggcaacctcggcgccgccgccgccgccgcggacgcgctgttcggcgtcaccgcgggcggcatcacgctcctccgcgacttcaacgcgtcgcagaccgcgctcgcggtcggctacgcgtacatcgtccgcgagttctcgctgaacgtcagctccggcgccacgagcctcaacgtcaccttcgccccctcgccgcgtggcgcccccggccacgggtcccaccactacgcgttcgtcaacggcatcgaggtcgtgcccacgccggacatgttcacgacgccggtgcccgccttcgccaacggcgggcgcccgaacccgatgcccctccgcgccgacacggcgttccagacgatgtaccgcctcaacgtcggcggcgaggccatcaccccacgggacgacgccggcggtttctaccgcacgtgggacaacgacgcgccctacatcttcggcgcggccttcggtgtgaccttcgcgaaggacagcaacgtcagcgtccggtacaacccgccgtcggtgccgaagtacgccgcaccggaggacgtgtacgcgacggcgaggtcgatgggcccgaacgcgcagatcaacctcaactacaacctcacctggatcctccccgtcgacgccggcttctactacctcctcaggttccacttctgcgagatccagtacccgataacgaaggtgaaccagagatcattcttcatctacatcaacaaccagacggcgcagtctcagatggacgtgatagtgtggagcggagggatcgggagggcggtgtacacggattacctcgtcgtcacggcgggctccggccagatggatctgctggtggcgctgcacccggacctcagctccaggccggagtacttcgacgccatactcaacggcctcgaggtgttcaagctccacaagtacggaacccacagccttgccgggccaaacccgccgatcccgctgaagcaggtattcagcacggtggacggaagcagatcggagtccaggaagaagagcgtcgtctgcgccgccgtcggcggtgtggccgccggttgcttccttgcggtgttggttgccttcgccgtcgcgtgggctgttcgcaggaggcagaggaaggccgcggcggagaaaccggctgatgggcttcttggcccaacaaaaggctccgccctttatgacccggtccaaaaataaacaggccaattttttaagccttttgttttgataatattatagggtatgtatagctataattgggttaacatgaaagaattataaatgggcccaaaaacatcacatgctttggcaatttttcaaggagagaactatatattacctcccttaact

SEQ ID NO: 9100 - DNA, 1326 bp, Oryza sativa
  ref <308>: DATABASE ACCESSION NUMBER: AK106448
  ref <309>: DATABASE ENTRY DATE: 2002-08-28
aatacccctcgtctccatcgcttccgccaccaccgcagcggcggcggcggcgattccggcgagcccctctcctcccgcctccggccagtacgctcccaccgcggcggccacggggaacggcacgagctcccgcggcagggcgatggccgccgcccgcttcgccggtgtccctcgccgcgcggcgcagtcgtcgtcgtcgtcgtcccaggcgcccctcgacgagccgcctccgccggcgctgacgcccgagcaggtcggtctatgcagggaggcgctcgagtacttcgaggggatgtgtggccggccggaagccatgtccgacgagttcaggagactccaggacacgagacacgagctgatgagaagttctaatgaagctcgtaatgctgcaaatagggagaaaaaccgctatattgatgtcgtaccatttgatactaccagggtaaggctaaaacgatcaaccaccagtcagacttcaagcaatgattatatcaatgcaagctttataaaggtcactgaggacaacagagttgcaaaatttatttccactcaaggtccactagccaagacatttgatgatttctgggaaatggtctatgaatatcaatgtcctgttattgttatgctcacacaattcgacagtcttaagtgtgatgaatatcttccattacgcaagcaacgtgaagcgtatggaaagtacaatgttaagattacaaatgccaaaagagatagccatcagttatggttgcgtgatgtgatggtgcaatgcaacgagtcaagcagggttcattctgtacgccatatagaatatcctgattggcctgatcatggagttccaactaatactgatgctgtaagacaaattcgaaaatggttacaaaatactccgatggagcatcctatagttgtacactgcagtgcgggcattggaagaaccggtgcttacataactatccatagtacaattgagagacttctccttggtgataaaagctcatatcatcttgatgaaactgtcaaaactttgagaacccaacgagttggaatggtccaaactgagaaacaatacatgttctgctatcgtgcaattgctgatgagctgaaagatcttttggagtctaaccgctgaggtatccctaaggcaggtaggttgcatgatgtgagacaaagggagtatataacatcactgcacaaacatatatggccttatggctaaactataattctcatagtcttactttataattttaccttgtaggaattatggacatgtctgtttatctcacccttaaattcctataatctgaatgaatgcctgattggagc

SEQ ID NO: 9101 - DNA, 3083 bp, Oryza sativa
  ref <308>: DATABASE ACCESSION NUMBER: AK106449
  ref <309>: DATABASE ENTRY DATE: 2002-08-28
gagtgagagtgagagagtgagagcagagaccaccaccaccggagaggttagtgagagaggagtggtaatggtgaggcaacaagagtaggttccatttcatatcatcactaggatagcgtagtttgtaggctgcatctccatctccatcgccattgattcgcattgcatccatcattttaggatgttctactagggttcttgatttttcttttggtttgttgttttgacgaatggaggtattgttgggattcgccgcctgctgctcgtcgtcgtcgtcgccgatgaggaggccgtgcgggctctgccccggcatgtccgatcgttcgtgatttgttttttctacatgttttagggcccatttgttcttgatcctattctttgattcttttgtactaagcattctaaggcgaagccacccattctttcctgcatatatacttacaaacacatagcccccatctgatctcacaaacattatttctctctctttttttctcagttttttctttgttgatttactgaccaaattctttggaagaacaacaagatcatctggtttttatctgctcattcttttgtacaccgaatcatatacatttccattccaccaaagccttagccagataccacagagagagtgtgagagaaatcagagtgagaaacagaggaggaagaagaagaagaagacgaggaggaggaggaggaggagcaggaggaggaggaggtctcttcttggcacgtcgcgttccggcgagtgacgtgtctccgggatgttggcgggttgctcgttctcgtcgtcgaggcatcagatgagcaccgcgcagcgtttcgacatcctcccctgcggcttctccaagcgcggcagccgcggcgacggcgccgccccgcgggtcgccggcgacgccaggagcggcgccaccacctgctccttccggacgcaccccgcgccgccggtcacccagtccgtgtcctggggcgccaagccggagcccggcggcaatggcaatggcgcccaccgcgccgttaagcgggcgcatgacgaggacgcggtcgaggagtatggccccattgttcgcgccaagcggacgcggatgggcggcgacggcgatgaggtatggttccatcaatccattgcagggacgatgcaagcgacggcggcgggagaaggagaggaggcggaggaggagaaggtcttcttggtgccgagcgcggcggcgttcccgcacggcatggccgccgcggggccatcgctggccgcggccaagaaggaggagtacagcaagtcgccgtccgactcgtcgtcctcgtcgggcacggacggcggctcgtcggcgatgatgccgccgccgcagccgcccgagttcgacgcgaggaacggcgtgccggcgccggggcaggcggagcgggaggcgctggagctggtgcgcgcgctcaccgcgtgcgccgactccctctccgccggcaaccacgaggccgccaactactacctggcccggctcggcgagatggcctcgccggcggggcccacgccgatgcaccgcgtggccgcctacttcaccgaggcgctcgcgctccgcgtcgtgcgcatgtggccgcacatgttcgacatcggcccgccgcgggagctcaccgacgacgccttcggcggcggcgacgacgacgccatggcgctgcggatactcaacgccatcacgcccatcccgaggttcctgcacttcacgctcaacgagcgcctcctccgcgagttcgaggggcacgagcgcgtccacgtcatcgacttcgacatcaagcaggggctccaatggccgggcttgctccagagcctggccgcgcgggcggtgcctccggcgcacgtgcggatcaccggagtcggcgagtcgaggcaggagctgcaggagacgggagcgcggctggcgcgcgtcgccgccgcgctcggcctggcgttcgagttccacgccgtggtcgaccggctcgaggacgtccgcctgtggatgctccacgtcaagcgcggcgagtgcgtggccgtgaactgcgtcctcgccatgcaccgcctgctccgcgacgatgccgcgctgaccgacttcctggggctagcgcgcagcacgggcgccaccatcctcctcctcggcgagcacgagggcggcggcctcaactcggggaggtgggaggcgcggttcgcgcgcgcgctgcggtactacgccgcggcgttcgacgcggtggacgcggcggggctgccggaggcgagccccgcgagggccaaggcggaggagatgttcgcgcgggagatccgcaacgcggtggcgttcgagggccccgagcggttcgagcgccacgagagcttcgccgggtggcggcggcgcatggaggacggcggcgggttcaagaacgccggcatcggcgagcgcgaggcgatgaggggcgcatgatcgcgaggatgttcgggccggacaagtacaccgtgcaggcgcacggcggcggcggcagcggcggcggcgaggcgctcacgctccggtggctggaccagccgctgtacaccgtgacggcgtggacgccggcgggcgacggcgcgggaggcagcaccgtgtcggcgtccacaacagcatcacattctcagcaaagctaagctgacgatgaatggtgattaggtgaagagaaagaaagaacaaagcctttttttacagtgcttcttttgttaatgatgattagttcatacagtatgacaattcttttatacattcagagaaaagaaagaagaaagaaaggtgtagttttttgttttatagattgataggtggaaagattcaattaaatcaaattcaattcaatttttagattgtaattctttataaatattcttttggctgttgagagagagtcccctgcaaaatgtagctgcatgtagaagaaagaaagcaaagaagcagtagatagattagcaggggcagcatctctcacagtcactattagtgtctccggctgttattatacaacattattattacaatcaaattctttcatcattcattctacatgtaatctctgttcagaatcagaatgaaatgaaacatgtgttatatttctcc

SEQ ID NO: 9102 - DNA, 1451 bp, Oryza sativa
  ref <308>: DATABASE ACCESSION NUMBER: AK106450
  ref <309>: DATABASE ENTRY DATE: 2002-08-28
ctctcctcaaacctccgctcctcggaccccgcgcccccatccacacgcccccagtaaccaccaccgttttccttcctcggagtccgcggtgacaggagcccaccgtcgccatgggtgaggagaagaaggataaggcgagcggcaaggacgccggcgagaagaaggacgccgccggcggcggcgagaaggcggcggcggcggcgccggggcctatcgtgctcaaggtcgagttgcattgcgccggctgcgccagcaaggtcaagaaggccatcaagcgcgcccccggtgtggagacggttgtgacggacacggcggggaacaaggtggtggtcaccggcgcggcggacgcggcggagctgaaggagcgcatcgaggcgcggaccaagaaggccgtgcagatcgtctccgccggcgccggcccgccgcccaagaaggataaggaggagaagaaggacaaggacaagaagggcggcggcgacgacaagaaggccgccgccgccttcgttggccaggctccaccaacgcctctccctctcgctcctccggggacgctccccccccgcggcggccgacgccttcctccgccgcgggctcgcctcgtccgcctcctcctcctcttccgccgccgccgccgcggcggtggcggcggcggcggcaggccgggagaagagctcgaggaggacgctagcgtacctgctaggcgtggccgcggcgatggtcggcgcctcctacgccgccgtcccgctctaccgccgcttctgccaggccaccggctatggcggcaccgtccagcgccgcgagagtgtggaggagaagatctcacgacatgctcgagacggaacaacaacttcaagagagataattgtccaatttaatgctgacgttgctgatggaatgccgtggaaattcattccaacacagagagaagtgaaggttaaacctggtgaaagtgctcttgcattttatactgctgaaaatcgtagttcagctccaataactggtgtatccacacataacgtagctcctatgaaggctgcaatatatttcaataagatacaatgtttttgctttgaggagcaaacacttcttccaggggagcagattgacatgccggtgttcttctacatcgatcctgagtttgagacagaccccaaaatggaaggggtgaacaatattgtcctttcttacacattctttaaggtgaacgacagttaattgtatcggtaccgtaaagtaagtggtaacattagttctatttaaacaccttgccaacgagtaacacaaaaattcctttcatgtaacacaagttagggttttgtttagtgtgtattaattgacatgtgtttcttggaaattttgcaaataaatatgtaagaattgttcacagaacaatcgaaatggtgcatcttgatttgatttgaagtaccatgaggataagaaatggtcaccac

SEQ ID NO: 9103 - DNA, 1540 bp, Oryza sativa
  ref <308>: DATABASE ACCESSION NUMBER: AK106451
  ref <309>: DATABASE ENTRY DATE: 2002-08-28
acacccacactctctacccccaaacttgccctccaatctatctccgccgccgccgccgcctccgccgcgagagggcgtcgccgagctgcgcgggaggctcgcctcccgcagcatctggccggattcgtcgtagtcgaggcagctgtaagcgagagagagggagatggccgcggccgccgggaaggcggcgatggagcggcaccagtcgatcgacgcgcagctgcggctgctcgcgccggggaaggtatccgaggacgacaagctcgtcgagtacgacgccctcctcgtcgaccgcttcctcgacatcctccaggacctgcacggccctcacctccgcgaattcgtgcaggagtgctacgagctgtcggcggagtacgagaacgacagggacgaggcgcggctcgacgagctggggaggaagctcaccagcctgtcgccgggggactccatcgtcgtctccagctccttctcgcacatgctcaacctcgccaacctcgccgaggaggtgcagatcgcgcaccgccgccggatcaagctcaagcgcggggacttcgccgacgaggcctccgcgcccaccgagtccgacatcgaggagacgctcaagcgcctcgtcacccagctcggcaagtcgagggaggaggtgttcgatgcgctcaagaaccagaccgttgacctcgtgttcaccgcgcatccaacgcagtccgtcaggaggtccctgctccagaagcacgggaggatccggaattgcctgaggcagttatatgcgaaagacatcactgctgatgacaagcaggagcttgatgaggccctgcagagggagattcaagcagctttcagaactgatgaaatccgcaggactcctcccactcctcaggatgaaatgcgcgccgggatgagttattttcatgaaactatatggaagggtgtaccaaagttcttgcgccgcattgatactgctctgaaaaatattgggattaatgagcgtcttccttacaatgctcctctcatccagttctcatcctggatgggtggtgaccgtgatggaaacccaagagttacaccagaggttacaagagatgtatgcttgttggcaagaatgatggctgctaacctgtacttctctcagatagaagatctgatgtttgagctctctatgtggcgctgcagtgatgaacttcgaattctgcagatgatttgcattgctcctccagaaaagctgcaaagcactatatagaattctggaagcaaattcctccaaatgagccttatcgtgtcatacttggtggtgtcagggataaattgtactatacgcgtgaacgtactcgccatctattgacaactggagtttctgaaattccagaggaggcaacgtttactaatgttgaagagtttctggagccgcttgagctgtgctacagatcattatgtgcttgtggtgacaaacctatagctgatggaagccttcttgatgtaaatgtcaaggggggacttatttggcttttgcagcccgatccaaaataaaatatggaccaatcattct

SEQ ID NO: 9104 - DNA, 1652 bp, Oryza sativa
  ref <308>: DATABASE ACCESSION NUMBER: AK106452
  ref <309>: DATABASE ENTRY DATE: 2002-08-28
gaaagcgagagccgcgagctcacctcacctcactcctcgcctcctcgcttccattccccgatcgattccggccgccgggagcatgatctgaccccggattccggcgattcgatccgcggagagcaagatcggtggtcctttcgccggaatcggcgatgtcgtcgtcgccgttggtgcttactgtcctcttgtttgcgtcgctgacctggctggtggttcttgccccgcgctcctcgtcgccgccggcgacggcgacgccgtcgccgcctgtggtgggtgatggggtgggtggaggtggggaggatggtgatctcgcgctgttccggcgagccacgctggacggcggcgagggggcggcggcgatggcggtggcggagcctaaggtggcgttcttgttcctcaccaactcggagctcacgttcgcgccgctgtgggagaggttcttcgaggggcatggcgagaggctgaacgtgtacgtgcacgccgacccggcggcgcggctgatgatgccgccgacgaggtcgttcaaggggcggttcgtggcggcggggccgacgaagcgcgccgacgcgacgctgatcgccgcggcgcgccgcctgctcgccgccgcgctggtggacgacgccgcgaacgcctacttcgcgctgctgtcgcagcactgcatccccgtccactccttccgccacctccacgcgacgctgttcccgccccccgccgcggcggccgcggcggcgcgccgccaacgccgcctcccgagctacatcgaggtgctcgacggcgagccgcagatggcgtcgcggtacgcggcgcgcggcgagggcgccatgcttcccgaggtcccgttcgaccggttccgcgtgggctcccagttcttcacactcgcgcggcgccacgccgcgctcgttgtcggcgagcgccgcctctgggacaagttccggcagccgtgcctggaccagaacgcgtgctacccggaggagcactacttcccgacgctgctcgacatggccgaccccgccggcgtcgcgcggtacacgctgacgcacgtcaactgggccggcagcgtgcacggccacccgcacacgtacacggcggcggaggtgtcggcggagctcgtcgccgacctccgccgccccaagaagaacaccacccacgactacatgttcgcgcgcaagttctcgccggattgcctcgccccgctcatggacatcgccgacgccatcctcttcaacgattgatctccattgctgctgctctgctcatcagaggagttgattttgcagaagaagtggcctctgttatttctcccggtgtctgaaacctgagaagttcagagtttcagagtttcagtcccttcctcttctgttcttgccatgatacttggtgtaatcgtctgtagattagaaaaaagaaagcaagtgagcaacaacctaatgcgaagcagcaggtgttgcctggatcatctcatcagataacatgatgatctcatgatccatctatataatcatccaatgcatttgcctagagctagcagcctaaggctgcctgtgcctgaatgcattagctgatgaagtgtcaaatgtcaattagtgttcagtaatcagtactagtatactgcaattaataaacctcttgcaaagctactactacttgtc

SEQ ID NO: 9105 - DNA, 1646 bp, Oryza sativa
  ref <308>: DATABASE ACCESSION NUMBER: AK106453
  ref <309>: DATABASE ENTRY DATE: 2002-08-28
aaacttacaagcacgtcgtcctatacatacaagcaagcgtctatctaccgaaatgaacagccaggtgtccaaagctgacgcctcccaatctcgaattcgagcttccacgcacgcgcactacctgttcgacgaaacgcctctgcgacgtgctcggcttccagcccgcgccatggaggcgccgcctgtcaagagtgggtggcgggtcatggccccggcgcacgccggcggcagggaggaccggctcagcgacctccccgagggtgtcctccaccgcgtcatgtcgttcctggactcgcgccaggccgtgcggacgtgcgtgctgtcgcggcggtggcgcgacgtctggcgcaccgttccccgcgtccacgccgatttctgcgacttcactctgaactggaccagcgacgacgacgaggtggacgaagcggccgtagcggaggacgaggtggtgttcaacaggttcgtcaaccggctgctggagctccgtgatcccaatgcctcgattcgatcgttcttcctcagattctgcagatcggatggaggcgatgatggctcagcagaagggaacagatggatcagctacgctctgcagaagaatgtccggattctggaggtttccgtgctgtcctacgcattggagctcgatcactcggtgttttcatcgcgctacctgaggacaatggacttcagcaatgtcgtgatgaaccaaggtttcttcaagcaactcgggatggggtgtccagaattggaagagctcttcttggatgaatgtttcattgtggatgatgagatctcctcccagacactgaaggttttgaccctcgatgccactcatttctgctgtggcttcaagacttccatttcaagtccgagtattacttctctggccttgcactatcctatgagtggcaaacctgtactgaatgacatggaagcactagtgagcacgtcgatgctgctttgtcatgtgaaagacgacgattttgctgctaatgatctccgcgactatctctggagcctttataatgttgaaattttggatttcagttatcacgggaagaagctgacaatggaaaataatttgcaattgtgtccgaaattcatcaatcttgtcagtctgactctcggtccatggtgtctggatgccaacttctatggactaatcgtcttccttcagaactcaccaatattggagaagctaaccctagaactcgcaatgtatcgtacaggaaaattacaaagaatcattggccagattgaagaaagatcatttacatgtgagcaccttacgagtgttgaagtcatatgcttggaggatgatcccctggtcaacgacgtggtcaacttctttgtgaatagtggaatgtcctctgttcagattcatatcaaacaatggagccagagcgagtacgagtaacatccacttttccagtctgaggacatatgaaacgtcaaaggatcatacattcggtggtcattccatccaaaaaatcactctctttcagctacattccttgattctagtagggtttgaaagcacatagacttcttggtcggtgctatgacgtgagaacaaacaatcatagtcctatacttgtatatatgttgcttctgtttaaatactccatttggcctatgttctgctg

SEQ ID NO: 9106 - DNA, 2687 bp, Oryza sativa
  ref <308>: DATABASE ACCESSION NUMBER: AK106454
  ref <309>: DATABASE ENTRY DATE: 2002-08-28
gattaagcagtgatgccattgttgcttttgtgaaagctctttgcaaggtctcaatgactgagttgcagtctccaacggatcctcgtatcttctgccttacaaaaatagtagaaatcgcgcattacaacgtgaaccgcatacgtttggtgtggtctcgaatttggaaagttctgtcagaattttttgtatctgttggactgctagaaaatctttctgttgcaatatttgtgatggattctctgaggcagctggcaatgaagtttctggaaagagaggaactggcaaactataacttccagaatgagttccttagacctttcgtgattgttatgcaaaagagtaatgctccagaagtacgagagctgattgtccggtgtgtctcacaaatggttctaagtcgtgtcaacaacataaaatctggctggaagggtgtttttatggtatttacttctgctgcagctgatgatacaaaaagtattgtcctattggcatttgaaactatggaaaaaattgttcgagattactttccatacataactgagacggagaacaccacattcactgattgtgttaactgtcttattgcgtttacaagcagccaatttaatagtgatgctaatctcaatgctattgcgtttctccgattctgtgctgttaaacttgccgatgaaggatttggttgtcaggaaaagtgtactgatgaacccaggaatttaggcatgtcagatggaaatgccactgtggacaaggatgattctatttccttatggattcctctccttgcaggtttagctaaattgactagtgattcaagatcaaccatcaagagaagtgctgtgggagtactttttgacattttgaaggatcatggacaactcttctcagagtccttttggaccaacatccttgaatctgttatttatcctctatttagcagtgaaaggtcttcatcaaatgatccgacctcaacaccgagtatccctgaggatgacttttcaaatcttgaaacccaaacgttggcagtgaaatgtttagtgggtttgtttattaatttctttgatgtgatgcgtccagaacttgctagggttgcatctatagtcacatattttatccgaagtccctacaaacattctgctagcataggtgtatctgctttgatgcgcttaattgagggagttggtggtgaactttccaaggaggaatggaaagacatattgctgcgcttcaaggaatcggtggcacatacttttcttgtattctccaaaattgtgagaatgatgcaagatattgaaattcctgatagatttgaatcttattcagaaaatgatcagtactcagatcatgaaaattatggtaatgaagaagaggaagctaatatggagacaacttcttatgctattgtcaaactgaagaatcatatggctctgctcctcttagttgttcagggaataattaaattatatgaagaacacagaaaatatctgtcttccgatcatattaatattcttttggagatgatatcagctattgcgacacatgcaagtgaagtgagctctgaatcttccttgctgctgaagtttcataaagcatgttcccttatggaagtatctgagccagcaattgtccatttcgaaaatgagtcataccagacctacctcaagcttctgcaagcgctgtttcgtgactatccatccatgtcggaagaaatggacattgaatcacaaatacttcgtgtttgtgagaaaatacttcggatatatctacagtgtgcacagcgagaaccatccaatgaagctttgcacagaaacgcatctatacattgcatagtgccactgggtgctgctaaaaaagaggaattggctgctaggacttcattggtcctcctcgtgatgcagttactgggaaacctggaggaggattcatttaggagagtactgccctggtttttcccgttgctagttgatctgatccgttgtgagcatagctctggagaagttcaacatgcactgtacaaaatcttccaatcatcaataggccccatgctaacagtataatagcacatatttgttctgctaggtctacgattttgttactctattttgttcacgttattccagttaactaagggggcccaggactatctttcgacatccttgatttatcttatctgtttcgaaatcctggagttcaagtttaatatgatcaatccagatacgtgagggaatagaatcgattttgccagcattcatttcaggcaatacgagactatcagtaaatgaacattgtagactgacatagaatttgccccttatggctggactctcttgagaccgatgatgtgttgaggtaatatttcgcaaccctataatgcggacataagatttacccgatgtgtggaggtaatatgctattgtcaaactgaaggacagcatgctcattgctcgcaaagccacaatccatcatgtatattactagttccatagtactttcaaccatgtgccgtggaaacacctgagctactagatgaattcgctctatgaaattctgtttttgtttttctttttgtaatagcttttgttgtgaaactaaagtagagctagactagccttgtacctaaaatgagcaatgttttgtatcgtattcctttgtttaatgcataatatagcgaaaagaatgttgttttggct

SEQ ID NO: 9107 - DNA, 2411 bp, Oryza sativa
  ref <308>: DATABASE ACCESSION NUMBER: AK106455
  ref <309>: DATABASE ENTRY DATE: 2002-08-28
cccctcaaatttcctcccccttccacccgcgctccccctacgccgccgccaaggtcgccgccgcggaaggtggccctggtgacgggcatcacggggcaggacgggagctacctgacggagctgctcctcggcaagggctacgaggtgcacggcctcatccgccgctcctccaacttcaacacccagcgcctcgaccatatctaccacgacccgcactcccagccgtcgacgccgcgccccccgatgcgcctccactacgctgacctctccgactcctcctccctccgccgcgcgctcgaccacatcctccccgacgaggtctacaacctcgccgcccagtcccacgtcgccgtctccttcgaggtccccgactacaccgccgacgtcaccgccaccggcgcgctccgcctcctcgaggccgtgcgcctcgccagcaagcgcatccgctactaccaggcggggtcctccgagatgttcggctccacgccgccgccgcagagcgagtcctcccccttccacccgcgctccccctacggcctcttcgcctgcaacggcgtgctcttcaaccacgaatccccacgccgcggcgagaacttcgtcacccgcaagatcacccgcgccgtcggccgaatcaagatcgggctccagaccaaggtcttcctcggcaacctctccgccgccagggactggggattcgccggggactacgtcgaggcaatgtggcgcatgctgcagcaggacaagcccggcgactacgtcgtcgccaccgaggagtcccacaccgtcgaggagttcctccaggccgccttcggctatgcagggctcaactggaaggatcatgtagtcattgacaagaagtacttccgccccgccgaggtggacagcctccagggggatgcaaccaaggccaggaaggagcttgggtggaagcccaaggtcgggttccagcagctcgtcgagatgatggttgataacgacattgagcttgccaagaaggagaaggtcctcgtcgatgccgggtaccgtgatcccaagcagcagccatagaattggctaccatatggtttggttcttgggagattggggttgcattattacctagaaactgatacattgtggctgtcacagaagaggtgggctcaagttaaccatcggtgtttccttgaggtaagtgacttggtgggtctaaactatgtgttcctgaagtttacggatggcatatctgataaaaagtcagcaccagtttcgtatcttgcatgtaaggcgggaggacatatgtgacaaaatggccttcaggacaagcattgtgagtattgtattgccttccctttgtatcttgtctatggtggtaatttgaccttcagcagccaaaatacttaacggttgtttggcggggttttggttttctttggtgtccctgtcatggattgtgagtttgagatgaggattgagcttcttaggaactgaaaaggacatgatgattgtctgtactattattgttaatcagcatagtttccattggatgtaagttagcatcaatcttattgttcagacagctcttctctgagcctattgtcgaacaatgcaagatctcagttttgataactgtacgctacactatgagctattgctcactcatctgcaacatctgattgatttgggattttatgggttttctgttgtcatattgcaactaaagtttcttttcaaggtgattttacctgttcacatttttgtgcatcttctgtaatgtgattatgtgaaccaaatattctagttcgccctaccatgtaaatgaagtaatgccatgcatttcaagtctccaagtcctgcccatgatcttcaatattgtgagggtaagacttcttcacatttcacaactacaaattcatggtcatgtgtaagttactttcaaacatgaatatttccataccgattgtgaatcaaatcacaaacatactgtacgtattgctgcatttactatatctgactttgaaaatgttcaagtggcatttggttctgtgatcaatgtactttgtcctcaatgaattttcctttgtcatgagcacctgacttgtctttctgttgaataccggcacagcgcgtattgacaattcaccgattcaggctgtgttatgaagacggagcaccggattatacaagtagtcaggcactgttattctgtgaagctgactttcactgatccatccaccgacgcatcatcagaattgataaggaggagcatctgttctgttctgtagtttaacaggcccacccagatctgattcatttgattacctttcgttttcagatgaaaccatctggcacctgcgatccaaagaggccttgaaagctggtccatgtttatcttcagaaaccagaataacaagtccatggcttattgacatatc

SEQ ID NO: 9108 - DNA, 1593 bp, Oryza sativa
  ref <308>: DATABASE ACCESSION NUMBER: AK106456
  ref <309>: DATABASE ENTRY DATE: 2002-08-28
aaatgttgataggctgcagcaaccgaatcctgtgaatctgtgatcccagttagtttatgcaatcaatgttttctggttggaatttgttcttctagtctagttgcagcatgatcaccagagtacaaaacggatcactgcgaggcgagatgatcgatcttgatcttgttcttgtttgatctcatctcatggcggattaattcttgctatctgaggcgggagtcgtccttgtggcgggtgacgagcttggcggtgttgcgccaccagcaaacctcgcgctccttctcctgcagcctcttcctggcgcgctccagcgccgtctccagctccgcgatccgctcctcgtgccgccactggagcagctcgtgcagcctcctctccagctccctcgccgacacgccgccctgcgccgccgccccgctctcctcctcctcctcctcctcgtcgtcagcaccgtccgtgtcatcgtcggcgtcggcgaaggtggccgcgtgggtgtccgtggactcctcctcgtcgtcgccgatctgcgaagatggattggaggaaataaatgttagaaaatggcggcgaaattgatccgaatcggtgggcttctagctgttcgacctcgagttgacgatcccgacgaggagtcgcgcattgcaggagcgtcagctccgcctcgagctccgcttccatctggtccattggaacggcggcgtggtgccctgcgtttcccggggcggcggccgtgcgtgagcagcgggataatgcgccgccggagaaggcggtgggctcctccttggtgatgtcggcgtgatcgtcggacgcgttggggtggttgctgctccgcgcctcctcctcccccttggtgtcgagcaccagccgctccatctgggcgcggagctccgccatcctgttcagctccgccgcgctcttggagagcagcagcatgaggctcgcgcccagccccaggctcgccggcgacacctcctccgccgccttcttccctgcacacgacggacaaccaaatcaatcgaaccagaccacgccatccgatcactcgctctcgccatggacacgtaccgagcgagctccgaggcgactcgcgatcaaccgcttggcggcccaccaccttcggcgccgcagcctccgcctcaacctcaacctccacgtactcggcggcggcgtcctccttggcggccgcgccgctggagcagtatcgggggaggcgaaggcgacacccgaagccgccgccgccgccactcctatggaggatgcgcgacagcagcgaccgcggcgaggggatctcgcgtgcgggagcggcagccaccgaggccttcgagaggagcgcaccgacggtggagggcgacgccgccgccgacgacgaggccgagacgcgcggcgccgcgtttctctccatcgccatgggcgtcgcgagctcgatcgcgagggggaattacgatttacgaggaatattgcaaaggttttggaggtttttgcgcctgaattcgatgggggcgtatcgtgtcggcgtgcgtaatttataaggcgggggtttcgagccggactggtcgcctctggaattcaaaatttggagaaattttgtggccc

SEQ ID NO: 9109 - DNA, 1464 bp, Oryza sativa
  ref <308>: DATABASE ACCESSION NUMBER: AK106457
  ref <309>: DATABASE ENTRY DATE: 2002-08-28
gtcccactcaacgacggattctccgaggccgcggggcgcgaggcgagagcggagagcgtcacgacgcgggctctgcaaggccagctcggcagagggggcccccttcgatacaaacgaagccgccgctccgcatcagcagcggcccaagctttcttcctcaaccaataatgttggaaactggccaggagttcactttcacaattaagagaggagttgggactgagacatgtgttagcgttaactatgatgactttgttaatgatgtagaagtgggtgacatgctcctcgtagatggtggaatgatgtcgttgttggtcaagtccaaaactgaagattcggtaaaatgtgaagttattgatggaggtgaactgaaatccaggcgtcacctgaatgttcgtggaaagagcgcaaccttgccatcaataactgacaaggattgggatgatattaagtttggtgtggagaatcaagttgactactatgccgtttcttttgtcaaagatgctcaagttgtgcatgaattgaaggattatctcagaagctccaatgccgatatacatgtaattgtaaagattgaaagtgcagattccattccaaacctacactcaatcatcacagcatcggatggggctatggttgccagaggtgacttgggagctgaactccctattgaggaggtaccgcttctgcaggaagaaattattagaatgtgcaggagcatgggaaaagctgttattgttgccactaatatgctagaaagtatgattgttcatccaactccaacccgagcagaagtttcagacattgctatagctgttcgagacaggatttatggctatcctacttagtcattaccgcccttctggcaccatttttgcctttacggaccaggagagagttagacaacgattggctttgtaccaaggtgtatgtccagtccagatggaattttctgatgatgctgagaagacatttggtgacgctttgtcatacttgctgaaacatgatatggtgaaggaaggcgaggaggttgcacttgttcaaagtggcaggcaacctatctggcggtcgcagtccacccataatattcaggtcaggaaggtttgatgtgaagactgcgggcacagatattaacccatgaatgaattgacggtcttccagcaaaaccttaggcctgatgataataccacgctggcattactggcatcatttaactgtgagcttagtgagttgtgtgcaagacatgagagagccattgttgtgattctatattcgttgctaaatatgttaccttgcaggtaaaatggtgtgagcgatcgttcccaatccgtagcatgagtatcgcagggttctttgatttgtattactgcctatatgtttccttgtcagagattgtatgaatagaaacaattttattatatgaattactgtaaggcttgatagataaaaaaaaaaaaaaaaaac

SEQ ID NO: 9110 - DNA, 1815 bp, Oryza sativa
  ref <308>: DATABASE ACCESSION NUMBER: AK106458
  ref <309>: DATABASE ENTRY DATE: 2002-08-28
ttaagagaaacaaaatcaggagcagcagtgagggctgtgaggactgaggcgccgcccaccccgacgccgccggcgaagcagcgacgccgccggccagatccgcggccgagctactgcactgcacccgcatccctctccccacgtgcggcggcgcgagcgtctgcgcggctacttgattgtaccagcacctggtcagtggtcagtcggctcttcgcttctcgcgcgcacagtgtccccttcgcccgccacctgttcgacggaatgcctcctaagcggaaggggttgacaagcaagaaaatggctgaggccagggaggagggtggaatcgacgtcctcccggacgctctcctccagcacatcctgtccttcttgtcggctgatgaggccgtgaagaccagcgcgtcctatcccgtcgctggcgccacgccacctctggaaatccacgcccaccctgcgtattgtcaaaacggaggacagatgggactgggagagcttcgaggatttcaacaggtttgtcaacatcctaccactcttcaaatttccaaggacactaaatctatgatagagacagaagaaaattacaacgtattagtgaaaccggttgtaacatcaaaacatctaaaggtagtgaaagtccactgtacagaagttgatgagggcgtttacaaaattgtgaagttcttgactacattgaacatagaagttattatgaaaaggatggatcgatctacaaaacgtaagctaactattgacacttttgttctttcaatatttctgaaatttgctactccgtattttttttatttgtgaatgagagaaagaaaaaactaaaattgccactacaaatttatcgaaaaaagggggccaaacagcatttggacaggatacagagaaagcatgatccaatgtattttattctgtcaagtatgatccatggaagtatacagagttttttccctgttgaactaagtaatataaatagagacataatatattgacttctaaaatttgagctgtttacttcttgaattagttttcattccctattattaacacaggtttgaatgagtaattctggacactaacacaatatgttgacttgtgaattagctcttaattgtgtcacaattgggagaaattggggacagaacagttgaattagattaggcccaaagggcaatataaattgtgtacaatagatgtgaagttacaatactacccctagacacttatacttactaataaattgtacatgttaagtgacatttatggctacttattccccttcatttttgaaaattgatgattcctccgtaattatctttggagtttggaaattcatttggtattggttaccttgttgattgatccacccatctgtgcattataaaacttattattgtactctagtacatattgttgcagtcttcagtttcgaggaagaagatatgggttcagatcttgaggaagaatcttctacgtgaagtacctctcttaattattcaggacagcaaggctttaattttgcagtgacaggaactctcgtcttttttctatgagatcctatgttagttccactagcaggaacaattcagacagaattgaccgtctagctgttggagcctgcagctggttattcattttatccttttaagacagtcttgacttcttagctttctgcacgtgtctgtgcatttcgctaatgttctaagaacattataatgcgtagtatatgccacttactacttggaatgtgtttgtagctataatctccatatataatgtgttctgatatggctgtaagtttatagtagt

SEQ ID NO: 9111 - DNA, 2357 bp, Oryza sativa
  ref <308>: DATABASE ACCESSION NUMBER: AK106459
  ref <309>: DATABASE ENTRY DATE: 2002-08-28
cggactgggagcacatctgggatgctttcccgagcaacagatgccacagccgcataataatcactacgcgcatcagaagcgtcgctcgctcctgctgctcgcacccatggcctaacggcctcgtgcacgaggtcaagcctctcggcgcgacagattccgagaggctgttctcggcagtggctcacggttggccgcggccagccaattctggacgagtctccaatgagattctgagggtatgcgacggcacaccgctgctcataattgccatggccggcctggtgtcgaagcagatgcaggaagaagactacgatgacgaagaaggagatcagagtggggtgacgatggatatctccagaccttgtgttgcagcatatttgccaagcggaatcagagaactgaagcaagtcgaggacacgctgtctcctagctacgacaatctcccctgcgagctgcggctactgtcgctgtacatgagcacgttcccgcagggttacgtgatcgacaagcacctcctcatcaggaaatggaaggccgaggggctgatcgcggtgcacacgttgcagagcgggttcgaggaaagagcagaggaatgcttctcgcagctcgtccagcggtgtatcatccgtccggcgaggacgaggaggagggcgtgcgattgtgaatgcaacccttgcagctaccaggtcaatcatttcatgttccagctcctcgcgtcgaaatccgcggacaagaatttcgtcaccaccagttgctgcgacaccggcacgctccgcggctcatccggcctgcagatacggcgggtgttcctccaccatggccagcagcagcagcagcctgcagatcaggaggtcccggcgcagatggaagagatgttctccttcactcgctcgctcacggtctctggagaagtggacggtatttctcttgaaatgttcccgcatctggttgtgctggatctgcaaggctgggagaagctgaaagacgatgacctgccacggatattcagcagcggcaaactgttcctgctcaggtatctcagcctgaggaacacgcgtatcagcgagctcccgccggagatcgggatgctgagctcgctcgagacgttggacgccagccacacccggatcgccaagctcccaccggaggtgtgcaccctgcgctcgctggaggagctcgacctgagaagcacccggatacagcggctgccggagcgaatcgacgacctagtggcgctgcggcatctgcgcgctggcgacggcgcggcgagcacgaggatccccaaggggatcgattgggggatgctccgggatacgttggagacactagcagctgtcgatctacgcgaatgctcagccgacgtcgtcaggaaactttcccttcttcgttgcctggaggtgctttccgtgtcgctatcccttcgccagtgcaccgacaaggagtaccaggacaacctgagcttcctcgtccagaggttgaagtgcctcaggtcgctgacgatccgctgcgagctcggctgctccatggagttcctcgatttctcgccggaagacgcgcctcagaacctgcgacacgtcgcgatgcacgcccggttcctcaccgtcccgcggtggatcgcagggctcaaccacctctcctcgcttcatatcagggtctgcaagctagccccagaaggcgtcaagattcttggacgtttgcacaggttggagtgcctcgagctggggctggatttcctcccaagagaagccattgtgatccaaggtcaggggttcatgtccagctctcaaaacagaagcaacagagctcccctgaactcaaaaatccatgaagaagaagaagacggcgacgacgagaagaatgggatcatcatctacccgttccgtgagctgctgagattgtccgtcgattgccgggtgccatggctggtgttcaaggaaggggccatgccgaagctaactgacctcgagctgaagctctccacgggcccggcgagccatgagagcccgccgtcgggcatcgccaacctcctgagcctcgagcaggtcgccgtgcagtacgacgcgtggtacatcaacagccggagcgtcagggcgacggtggacgccatccggaggcaggtcgccgagctccggtacacggtcaagctcgtcaacaatggcgtcgaggaggatgtggaggcagtaattaatcctcgccgagacagctgagcgcggtaagaacggagacgcgcgtgtatactgtcaacttgtcaattgtcatgtacgcttaccatgttgctccaccttccctccttcctgacattctgcaagctctggcccatgcaccagcaagtcaataaagtcgtctggtcttctgtt

SEQ ID NO: 9112 - DNA, 1515 bp, Oryza sativa
  ref <308>: DATABASE ACCESSION NUMBER: AK106460
  ref <309>: DATABASE ENTRY DATE: 2002-08-28
catagaacgctcccctagcttataaaatgtgtagtagcgtaatataatctctaaaattgtgaactaagattatattggttaataaaattagtcattttatacatctcaaacaatatgaaacatgtcctggacataaaactccgaaaccatgtacacatagaagctatatacctacaacacattataacttgtaaaacacataagaaattcataataactccaaaagttgtgaaaccaaatgttttagtcttagaaaacacatctctacatccctgatatgttaaacctaataagaatcagttcgcaaaaatatttcataacactactaagtgaataccaccctataccgagtaaacttctgaaattcataactcacaaataaaaagagataaaatagaaattctttcacctaaactcatcttataccagtacctacccactgtgcacaaatcatgcattttagagcattttggatttttacctatttccgtgcataaacggtgaagaagtgaattaggtgctaacatttcccaggaacaaggcaagttttctcctcccaatctttgatcacattgaatcccatgttttgaggaatgaaaatatttgtttgcaaagttgcatatgaatttagactataacggtatttgaaacttggttatggtagctatgacctaattgctgcatttacttccttgaataattgtgatcctcactgattgtaaccttagaaatggttagagtactttcaaagtgcttaaatgggtttatacatgcttacttaatagccatacgcttagccatgcctagtagttgctaaataacttcatgatcactttttaaatgagaatttggggaatattttcactgctggatagaggtgaatatctccgatatttgtgagctaaaatgtgtaaaaatgtgatgttagacctgggcggcaagtggtatgcatatggtgttagttgcataccgatagggggagtgctcgccctagtcaattaaggaccgaactttgtgtcaccatctaaagtataccgtgcaaccacatgtgctaggaatgggacggcattagcttattaaattgtttaatgtctaaccttgcattgggaggccgtagtagtatgaactagtcggaatgatggtttataggagctacctagtgcggttgtgcctaggcgtctaagcgtgtccaatataacggttaagtgcctcgtggaggaacggatgtgttcgctgccatggcgctagggatggcgagggccccccgacctagcggcacttgggttgctcctcgtgtggataaacacttgccgtgctcgtgcaaggttaggcattaggcaatgtaaaggcttcgttatgacctctagaccacattcaacgtgaagaatgtggtagagtcttgcaaactcaaaataaactagagtgtttatatcatgtgggtaaagctgtacaaactctgcagagttctttaaaactaatcgattagccgtgctcacggtcatgagcgctttggtg

SEQ ID NO: 9113 - DNA, 1344 bp, Oryza sativa
  ref <308>: DATABASE ACCESSION NUMBER: AK106461
  ref <309>: DATABASE ENTRY DATE: 2002-08-28
aaaaaagagacaccgcgaagcctttaatccgggagggttctagaaacatctaggctcttctcaggccccggccccggccgcgaacgatcaccgttcaccaccaccgcctccgccgccgcgccgcgtgccgagacgacaggtgaatcccatttccgtgcggccgggcggccacttccgccgcctcaaccgcgtacctcgacgaccggcggcgctgctcacggtcggcggcgtccccgaaggctcgctcaacctcgccgcagcgcgcgggagctttcccgaaggttctacctaacacctctctctcggggcacgacccttgcctcccccaaggctcaacctcccggcggcgcgcagccggccttctcaagtgctcgccctcgccgtgcgcgccctaatggtacttcaggaaattccatattgatcttaatgaacgcctcccaccatgcaatctaatttggtgatactgaatataggtttttctacatcttctgaaaatggcagaagtgattacagatgcacctctttcagtaaaaaccaaagctgttgacatgctggagtgttatttgattgatgcggatgtgaaaagaatggatgatgatttaaagtactgtcaaggttctattcgatatggatttgacatctcatcttcaataaagacaactttccttttgtttgaggataatagaagtgcacaagacacagttgataagttgaatttaatgaaccacccgtccattatgagaagcttaggtgatgtgatttgtttcgaccaacaccttccaaatcatgttctgccttttccttatttcgacacgacctatgctgactatctagacaagaagagcaataaaacttttgagttcaagagatttacaccggaatttattcaattgactagccaggtagtccatggaatgtcagctctgcaagaaaaaggattttgctgtccaaacctggagggcaaagatatcttcaaggagaataattgtatcagtgcgaagatatggcatttctgcatttgcacaggttgcacaggagataagcatactgattggaggaggcttggacaattacttaaaaagactgctgttgaccacaaatgccttactatagaaattgaagatctgtgcactaagataaacaaaggcatacttgaagggtatgctcttatcctttctcttttcgaatgttgagctatgtttttatagaaaattggagaactgatattagcgctacaaaatatgtaatttttttcttggctgagaaagaaattatgttttgataattcatactgtagctattgagatacactgcgaataaaactttgcatgaagtgtctctgtg

SEQ ID NO: 9114 - DNA, 1555 bp, Oryza sativa
  ref <308>: DATABASE ACCESSION NUMBER: AK106462
  ref <309>: DATABASE ENTRY DATE: 2002-08-28
acataggccactctcaagcaaggaccaatctgtgtgcagcaactgccagctaacatttggctttacgaggaagaagcacaactgttacaactgtggttccatgttctgcaattcctgcagcaataacaaggtttccagagcagctcttgcaccagataggagcaaaaggtaccgtgtttgtgatgcatgtttcagtcaaatgcagaaagttgaggagcatagaaaattagatccacaacagaagatccaaaaggatgaggtatgtccaatagaaataagatcatatacgccaaaattggcgcgcatattcaaggaagcaaatgcaattatggagaaaatggcatcagcacaaagcccccatcagagaagtcagaatttggctgtgccagatcatgtgaggacattaagatggggcctagtagagtgccccagtcaattcagatgtgtgagagagagcattccttattgttcaacattgaataaacagacagtctctggttctattgtacgggtaatgaatgagacaatggcacctaaacctgccagctctttgctcaaatctgctaatgattcaaaagcggaattagacttgatggaaaatatattattggaagaagtgaaacagcttcaagagcaggtaactactcttgcaaaacagtgccgccaaaggagcctgaaagttcagctgtacaaacgaaaagtcgaggagacttggttaattgccaaggatgaggctgcgaagtgcaaagctgctaaagacgtaattaaggttttgatcgatcagcttgattttttatcaaagaaccttttggctggtgagaaattagacaactccagaatcatgcctagccacatcgccagtgcaaaatcactaaaagcagaattaccagacccacctgacaaaaatgtattcaccagcgaatttcaacagtcgaagagcaacagagatcaccacaacagcaggcaggtggatagggaatgcacacaaccttcaattgcttccatggcgaattactcggttacgcatcagaattgcagaagaacttccaacggcagcaccagatgcaccgagggaacagatgccaccactgctcctaccgattccaacggtgcgatcgagcagatcgagcgcggggtttacgcgacagtggttacatcccccggtgggaagaagtgcatcaagcgcatccggttcagtcggaagcactttggagaggatcaggcgcagaaatggtgggaagccaatgagagcatgatttttggaaaatacagcagcatggaacaaacggtggggtaatctcttctccaactccaagcaacccaaatgaagaacataaaggaatagtcagctctgccgccaaattgttaataggacacagtagaagtagatagaaatatgctactgctcgatgaactggcgtggataggatggggatcatggagaaaaatcagaaaaaggggttgagactttgagagaccagctctgaacagtaaactgcatctggattgtgcggctgtggcttgcggaatttggagtaggatctaggtttgacct

SEQ ID NO: 9115 - DNA, 1572 bp, Oryza sativa
  ref <308>: DATABASE ACCESSION NUMBER: AK106463
  ref <309>: DATABASE ENTRY DATE: 2002-08-28
atctccaagttcaccagctccccctcctcgcctgctcgcctagggtttcgattcggatctcgccgccgtcgccatggatgacccctacatcgacgaggacggcgagccgctcatggacccctacgacacgcgcgacccctcccccgagccccagcagcagccctacgacgacctcgaggacgacctcggcgacgactggaaccgcggccgctccccgacccccgtgcacggcgacgacggggccggctcctcctccaagcctcggaagcgcctcctgaagaagggcggcgggggaggtggaggcggcggcggccatgggatgcccagcgacgggctggatgactggggcgaggaggcggcggggttggcggatgacgatgtggaccccgaggcggatgccgcgaagaagaggaaggggtcgtcggcgctcagggacctcgcgaggggcggcgggaaggagaagaaggagaagaagaggaggaaggaggatgggagggagagggagggcggcaggggaatggggatggcaagggagaagagaggcggctctggtgggaagggctttggcggcggtggtggcggcgggcatggggaccaggatgaaggggagagggagatccaggagctatgggataccatcgccgggggtgactccgaggtaataattgatcatgttcttctaaatcttattatgcttgctttgttccaatgtatttcagatgtttgttacggagtactcactattagctgcgtgtttgctgctcgtaatcttagcttgcaattgtgttagtatgttagataattgggattctgctgactgttgtaatgactaattaggattccgtctgttagacctaaatttacttcattctgctgattgatgtagcttttctgcttgatggggctgttaaatatttgctgggtaatcttttatgttgcaactgttggttcattcacatgctacttgttattttcctaagggctgctaaatatttgctgggttatcttttatgttgcatttgctggttcattcacatgctacttgttattttcctaaggattccagattattcttgaggtattttgttagtggtctttgttgcagcctgtgctttgcaattaggatgtctagcggatatcacttaccgaacttatgtactcgtggttacatttgctctctagtatcagtttacggatttgttaaatatgttttgttgcttaatattgagtcactaggctccttgtgacttaacatctagatgcccttggattaatttttcaaggcagattttgcctcttgagaaccatgataacttttagattttcctgccagaatttcaaattgttgatgttatgcaatatttaatctatcgttgcgattccttatttccgagtgtaatacttaggaataattgaataattattatcttggaaacatcattaggatgatactttgctaatcttcatgatatttgagtttgcctgcctacctctctgtttcagagatttatctttggatgatgtgtgggaatatcaattcaagtttgacaatatattctactagccttggac

SEQ ID NO: 9116 - DNA, 860 bp, Oryza sativa
  ref <308>: DATABASE ACCESSION NUMBER: AK106464
  ref <309>: DATABASE ENTRY DATE: 2002-08-28
aaaacaacccccaaaccccaaaaccctcgcctcgcctcgcctcctcctcgaagcgcgaatttgaagcggcggctcctcccctcccatggcggcggcggctagggttttccgcgggtgcaggttcctcatggcggcggcggggggcaagaggcccgcgtcggcttccgcgtcggcgtcggcggcgggggcgaaggtgaccaagacggaggcggcgcaggcgaaggagaagcgagggatcatgcagcccgtgccggtctccgacgccctcagcaggttcgccggcggcgcccccgagatgtcccgtgctggcgccgtcaagctcatctggaaccacatcaaggccaacggcctccagaacccagcaaacaaaagggagattaactgtgacgataagcttaaaagcttattcgccgggaaggacaaggtcgggatgatggagattgccaagctgctgtcccctcatttcattaaagctaactaaaccagtcatatggagcaagtattagtgcttactgctcggacttgtgttgggatgcttcttttgtgatccatgttaggccccaaggttccactaggttttaggtcatgtggctgtgttaagacttaaaagacttcgttgaacatctaggccggggttcccagtgatgcatgtaaaaaaaaaaggcactcccaatattttattgcgtcctactactgtgatcccaggcgttttatgtggttcaatttttaatctgccattggcatcttgtaccaggcatatactacatatatgtatgtatgcatgctggtttggttgaggcgctcttgtgttcattgatcaggcatgttaattgtcacattcgtggtattgctttcttcag

SEQ ID NO: 9117 - DNA, 1808 bp, Oryza sativa
  ref <308>: DATABASE ACCESSION NUMBER: AK106465
  ref <309>: DATABASE ENTRY DATE: 2002-08-28
acgggcactaagtgatctatttaagcttgccgaacaaaggaaaggagcattcatttatgatattgctgtgcaaatgatagagatttataatgagcaagtcagggacctccttgtcaatgatggtctgaacaaaagattagagattcgaaataattctcagaatggacttaatgtgccggatgcaagccttgtctgtgtcgcatcaacaatggacgtgatggaattgatgaatgttgggcagaagaaccgtgcagtcggcgccactgcactaaatgaccggagcagtcgttcccacagttgcttaaccgtacatgttcaaggaagagatttgacatcagggaccattcttcgtggctgcatgcacttagttgatctcgcaggcagtgagcgggttgataagtcagaggtcactggagaaaggttaaaagaagcacaacatataaacaaatcattgtcggctttaggggatgtgattgcttcacttgcccaaaagaatgcgcatgtaccttacaggaatagtaaattaacacaactcctgcaagattctcttggaggtcaggccaaaaccttgatgtttgttcatataagcccagaaagtgatgctttaggagaaagcataagcacattgaagtttgccgagcgtgtatccactgttgaacttggcgctgctcggttgaacaaagagtctggagaagttaaagaacttaaggagcagattgctcgactcaaatcatcattagcaatgaaagattcaggatcagagcaaaacattaaccgtgaccctgaggcatttaacatgaagatgccttcacctggcttttcaaataggcgacagggtagttgtgagttggtgtctagccaaactaacttcagacaaccaatggaggacgttggaaacatagaggttagagccaatccaacattaagacagaagaaaccaagctttgatctccaggacttattagcgtcaaatgattccccatcatggccagatagcatttcaagggcaaattttcaaatgggagaagaaagagtgactattggtggggaatggatcgataaggttgtagtgaacaacaataactcagtaggtgattgggaaggcgacagtgcagctttacctgacttcttttaccaaaggtaccattcaggtacaagagataagcaatacctgagaaataactcaagaaaaaaggacggaaatgagtttgagcagcaaagaccaagattttattccacaaatactgatgattctgatgacattgacattgcaacaagtgattcctcagaatcagatgcactatggcagttcaatgtccaaagcatcaatagttcaattagcgagaatggttcaaagatcaagaaaccacaaacgaagctaagagagagctcagataccaggacaccactccattctcaaataccatctgcttcgagaaaaacctccaatggaaatagatctggacggcaacctttaagtggtagcgatagcagaaggctctcatcaaatggtagacatgctggtacaaagtagggactactacaatgatcatgtgcatttttttttcttggctttctttcagtgtttgtcatgagagattgcgaggtttttctcgagtacagcaatgagtgacaataaacccaattgattgtctcagtgtggtgagttgtgatcccaacaactggtgtgtgaggccattaacctttttttttatttggcctatcaggctatgttgagttcttgctaattctttgtgtattgttcataatatatataatgaagagaaaagaaagagaattggttgatc

SEQ ID NO: 9118 - DNA, 1388 bp, Oryza sativa
  ref <308>: DATABASE ACCESSION NUMBER: AK106466
  ref <309>: DATABASE ENTRY DATE: 2002-08-28
aaaaatgggagacacctcatcagggtggtcgaagtcgtcatccagaggcggcggcggctgcgccccctctatgacgggacccacaggcggtgaggcttgccatggcgccatcgccgcgcctctcccctcccctctcccccttcccctcctgtcgcgaggcgctcaaggcggcggagcttggcggccacctgtctgtcacactcggattttcccttcccttaggtttcaaatcactaataaatggcttcaagaatttgctttagttaaccagaagaaaaccccagttagcaatgcatttaataatcggaattgttaggaagaatttttttcgaattctctttgctctgaaaatcactaacagaacttaaaggataaacatcttcctcatttgcctttggtcgtgaattatgcccaattcactctcttctcagtccgcggtttcgttttgcatgacgaaccgtatctgttcgcgggaccgttttctttccttttctaaaacggcaccgcattgtttttccttgttgggaaagtctcccctctctgccaacattgttgaagaaaagcgaagagaagaagaaaagagaagagaagataggagagaagaaggaagagacttacatgtgggtcccacaattttttatttttttattttgctgagtaggatgccacgtcagcaaaccagatatccatactgccatgggaccgaaattgcatggttttgtaaagtttaagggtgaacatttctggttttggggtttagggatgtcatacaaactcaacgtaaagttaagggaaggatggtgaacttattccaatttgttgagacggctgagcagctacgcttatggcccagcttcaggccgaaactctaccccaggccagcccaacaggaaggattcgtgtagccattagctagcccatcaccgactggaggttttttttttttttaacacattatagatttggtttcgactatttgatatctggttcattttatcataggcattgtcatgaagtgctaacacaatcaaaatgacaacgaatgtatggctcattttatcataggcattggtgtaaaactggatgtcccatttcgaatttgatttctcagcttcattgtagttagacattattaggcatgtaaaaaaaattgtgactgaaatctagcctttgccaaatgttctgttttgtcttttgatgttcaacatggccatatgtaatagagaagtgaagccataaaatatgtttgtttaggaggcaaggcataaaagattgtattaatcagatgacctatattgccctcgaaaactgcatgccaacccaggaaaactgtagcctatattctgatgattcttgttctgaattgtgcatatacaaatttgtggatc

SEQ ID NO: 9119 - DNA, 1696 bp, Oryza sativa
  ref <308>: DATABASE ACCESSION NUMBER: AK106467
  ref <309>: DATABASE ENTRY DATE: 2002-08-28
aaaaaccctcgtcgctgctctccccgactccccgtcctccttccctgcgacgacggcggcggcggcggcggtggcgtggcggctctttgtcaaggtaatttatcctattcgcaaaactggtacatcaggagaaataaccaagtgaacgtgatagtagtataccactggtagtgcaccacggcaaagcgaggtgtcctgattcctgaacagcaggatgcggtttgcggtgacaaaagtatgtggtggtggggcaaaggcacgggcaggcatgctccagattgctggcagtaacattgaaacaccagcgctacttctgtccacacgcaaggggcttccagcatttgtgtcccgtgatctccttgcatccctctctctccctgactctctccttctccatgtgtgccctacccattttatggaaggccctccatcaaaaacaatatcaaatattagtggtttgcatcatatgttgggtcttcctgatcatatcctcatagccgcagctggtgattctattgagagtttaccaacaagtgaagcaagcaataaatttggtgcttcctttgagacaccagctggccgaagactggttaaaccatcagattatatggaattgatttcctgcatgaagcctaatttgtgggcaagtttggcagatgaggttccagcttgggttactgagaaacgaaataaagtctctgttgagcgcacattacgctggcttgatgcatgtattgctttggatgaggattctggtgcaaatactttaggtgtagttgtgggtggatctagtatagaactacggaagctatgtgccactgaagtgtcaaagaggaatgtgtcaggtttttggataggagggttgggctttggagacagtcctgaagaacgttgcagtatactcgatgctgcagtgggttgcttgcctccggagaaacctcgagttgtctctaggcttggtcttccagaggaggttttggagggtgtagctgctggtatcgacctctttgactctacgtacatttaccagcttactatgggtggtttcgcactgatcttccccattgacatggttggagaaaagatgcagaatggttcactcaacagtagtgatggagattttacaaagattaatctgcgtgcaacgacatatcggaaagacacgtcaaggatagttgatagctgtagctgtttcacatgccagaaccacactcgtgcttaccttaatcatttgctcaatgtccatgagatgctggctcagattctactggagatacacaatacacatcattacctttgctttttccggttgatacgagacacgatcaaaaccggacagtttgatcgctttcggcagcagtttgttcaggacaggcgtgcttatcttgcagctgctgtgatctaacaaggattaacttctccctagatgtacactgttagacctcttgaggcttgcatcaaactaaattgagaaagctgcaagttagattcattcaaatccacaatccctctcttcgaaaatccaagtgactgaacaactttttgcaaatccctggaaagaaagaagaaaggaacaaatagatagtgctagatggctgaattattaacttgcctttggatgaattttcagaaattttcgggttcattagtcagtttgtgtgctaactgttcatgttattatagctgttttggtagg

SEQ ID NO: 9120 - DNA, 1252 bp, Oryza sativa
  ref <308>: DATABASE ACCESSION NUMBER: AK106468
  ref <309>: DATABASE ENTRY DATE: 2002-08-28
tggtcaagactgtcaaacatgaggggttgacagcattgtggaagggattcttacctacatgggccaggcttggtccatggcagtttgtgttctgggtttcctatgaaaaattgcgccaagcatcagatggacaggcggagggacaatggaatgcaactcagtccaccaattgaacaccatccttgaggtcctcgcagtgccggacgtgccggaccgtcttgccgttgtcacctttggtcctcgcctggcagtcgtagtgcggcggtgtgtggaagcacggctcgacggtggcggctagccggcacggcgggttgggcgccttcttgcggacggggaccatgagcacccacggcctcagcccggccagcccgtggctgacgtacccgaacgtcgaggcggccgacgtgagcgccacgtcggagaagctgagcagcatcatctcggcgagcgccttctggttgtgcatccgctcctccgaccgctgcccgcccagcgacaccacgagcaccgccttgcgcctcgccggccgctgctgctgctgccgcccggagccagggatggcggtggcgttgtcggagccggagctggactcgcgcacgcggggcaggatgttctcgccttgcgcgcacgagacgatctggccgtagagctcgtcggtggagatgggcgcccaggagaaggtgcgcacctggacgccgacgcgctcctccgccttggccaggaacaggagattagccaaatatttgtggctgtcaaagagctcaagatgaacggaaatgcatacttaccggcgttgatgacgacgcgggctccggcggagacccagctggtgtccccgccgccggagagcgtccaccggccggcgccgccgaagacgacggcgacgagcagcacggcaatcacggtcaccgcgatcaccagcagcgtcgggcgcacggccgacgacgagcgccggctcttggtcttgccgtgcgctgggctgcttggcagccaccgcgccaccgacattctgacccgaggactcatcgcgctagcttcattgtggcaaccccgaaacgacgagataactcgcctcgcattctacgtatatatacaagtcaataaactgatgaagattcgtttctccatgtggaattgcagcaatgtaccggcgcagtgcaagggtgagagatacgtatatgtactgaacttgaacgcaagaatttgtcccgactcccgactaaccaaagaaaagatgggaaattcagatcgc

SEQ ID NO: 9121 - DNA, 568 bp, Oryza sativa
  ref <308>: DATABASE ACCESSION NUMBER: AK106469
  ref <309>: DATABASE ENTRY DATE: 2002-08-28
atatacctccttcttgttcctttcttcagacaaaggctttgcctttccttcctcttccaccatcctgccacaagaagcaagaacctctcttaatttgagcaagaaaccattcgtcacatcaacggaggaagcagctatagtttgattgattggttgatcgatcgatgctgggcggcggcaagatgaagggtggggagacgatgggcggcggcggcggcagcggcagcagcagcattagcccgctggtgtcgttcgtgctgggcgccgccatggccaccgtctgcatcctcttcgtcatgtccgccagcccgggacgccgcctcgctgacatctccgcctggagcaacgccgacgacgcgccgccgctgccgctcccgttgcaggacgccgccgtcgactccaacgactcgctggccgccgccgccgccgccaacgtcaccgtcgttgctgctccggctcccgcccccgtccaggtatgcacatatttgccattttttttattgcttcaatatgctatgaacaaaacgaattgattggcaccaatatcatttctgaagatttcaaaatg

SEQ ID NO: 9122 - DNA, 1630 bp, Oryza sativa
  ref <308>: DATABASE ACCESSION NUMBER: AK106470
  ref <309>: DATABASE ENTRY DATE: 2002-08-28
ccaaagaaaagaaactttcctttctttataaacggctgaagcagcgggaggccgagggggctcgcccacacgcgcggccggagaccccggaatcccaatcggatcgcgaggaaagccactgagagagtgtggatggctccctccttgctcgcctcggcggcgagccaaatcctcgccgctccccgccggggaggccgcggccggcggcgtctggtcatcgcctgctccgccggtgccggtgctcctcccaagctggtgactttcctcgggaagggcggctccgggaagaccaccgcggccgccgtcgccgctcagtattatgcaagtgaaggcttgaagacatgcttggtcatacagtcccaagatcccaccgcagagcaattgatgggttgtaagatcggtaactcgctgaccgagtgcgctgccaatctttccaccatgaagctggagactagtaaaatgctgcttgaaccccttgaccggctaaagaaagtggactcgcagatcaatcttactcaaggagtccttgaggcggttgtaggggaggagcttggagtcttacccggaatggactcggtctgttcagtgttagctcttcagaagctgcttaacttcttttcaactcaaaggaatagttcacaagaggaatttgatgtggtagtgtatgattgcaacaatacagaggaaattctacggctaattggtgctactgagagagcaagacaggtcttacttgaggtatgtgaaggatctagcagaaaagactgacataggaagactggcttctccttccgcgatgagactaatatacgattctgcaaggccaaatggtaaaactagtgaaggaagactgagttcagagttatggaatgatattgaacaacttattcagagaatatcggtttggtttgccgatccctcaaaatttgcatgcttcctcatcatggaccctagaagatcaatctctgtatcttctgcattgcgatactggggatgtacaactcaagctggtggaaatatatgtggagcatttggttataccgaacagcgtttcgaaattcaccaaggagttgcagagaagtttttgccgatgactttctcgtttctgccatttctgccaactgattcttcagcagattggagcagagtgctgaattctttgagccaaaatgcaaaagatttactgaggaatacaagcaacaaagtatacccttcagttagttttgattctgttcagaaatcggtgacccttttcatgccgggctttgataagtctgaaatcaaactatatcaatatagaggtggatcagaactactgatagaagccggcgaccagaggcgcgtcgtaaagctgccgccggcgatgcagggcaaagttggtggcgccaagttcgtcgacaggaacctcattgttaccatccggtagcagtgcggaccagcagttgtgtaaaatctgtcagaagagacccaaactgttataataaatcggtaagttaagtcttatttagacgtactgggtctgatcgtatggcaatattcgttatttctttgttgcaaaatgtgtaaaaagagcaagatttttgcagtgtcatttacagaaaacggaataaatcagcaccaataatctgtc

SEQ ID NO: 9123 - DNA, 2208 bp, Oryza sativa
  ref <308>: DATABASE ACCESSION NUMBER: AK106471
  ref <309>: DATABASE ENTRY DATE: 2002-08-28
agaaaccaaccgcgtcaccactactcccctctcctcttcacaagcgatggcggcggcgactccggcgagcggcggcggcggcggcgggtactcgtgcgagacggcggagcagacccgcgagtggatggaggccatctccgcctttctccacctccaccgcccgctcctcgaggcgcacgtcgtcaacttcttcaaggatcggctgtgggagatggtggatgcggagtggatggagtgcctccgcagggagcccgtggagagcttgctcatgttgccctccgggtgtgttcaggagcactggcccagttcattgcgagattttgtactcactgcaaagtcacttgttcttccacgggagcagaagtcaccgcgatcactcctacccgacttgcatgtagcatcaattaatactgttctcgctcaaggaatgaactccaagaagaagcatgaaattgaaactctagctgggttggttcatgcaattaccaagagctgtggagcaaagacagtgattgatgtaggttctggccagggttatcttgcccaagccttatcttttgagtaccaactccctgttgtagcaatagatgcttcatcacatcatgcatcagttacaaatactcgtgcagaaagaataaagaagtactacactgctaaatgtgtagggaagcaacagctcagagtacctagaactgttacttgccatgtactttctagtgacacattagcagctgtgacattggaagcatgtcaggatgatcatgctgaacatataccagaaagtaaaaacttcaacgagagcagtccacaaattgagaaaccaaatgacagcattcctccattagtccttgctggtcttcatgcttgtggtgatctttcagttaacatgctaaggctttttgtgtcgtgcgaacaagtaaaagcattgataagcattggctgttgctacaacttactctctgaggaatgccacgaagacacaaatacctgtcctggttttcctatgagcaaggctgctaaactatctaatttggtgcttaggaaaagcacccgtgaccttggttgccagagtgcagagagatggagaagtctcactaaggacatagccctacaaaattttgatatacatgccttccgtgctgcatttcaaatgtttcttgagaaacatttcccagaggtgtcaagatcgagtccatcaattgggaggcaaggaaaagcactacgccgtcaaaggcttaggaaagttatggaatcccctatggctatggcagaaactgacgctttatcatattccactcaaaaggaacaaatcatgaccaaagacgatccactgcccacaggccctaataattttaaagaggttcatgtagactttcttcccgagctttcaacagggtttgttgattcagctgtatctggagctgccgttgtaccagatgacatctatcttgataaatcacaaaagttcaccctgtttaaagatttcacagtgtcaggattaggtcgccttggctgtgattttgtggaaaatgttagtttacttgaaatatggaaggacgtgcaacccttcacggaatttataggtcccttctggtgccttcgggttgctttagggccactggtggaaacatatattttacttgaccggttactatttcttcaagagcaaggcagtgttattgaagcatctttgtttccgcttttcaatcccactatgtctccaaggaacatggcaattattgcttggaagttgtctgcaaatccttcaaaagtgtgacatggtaggatggagttctcagtttccaacactgcagaagtccttgcaaatccatatacgggagagtggaagattttgccctcgaacagtgtgcctttatccaataaatgctaagtcaacatctagaacggttccaaggccatccggtgcatggctgcttgtctctctgaagtgatatcatacaagttgccaccaaacttcacattccctgcaggctgcgatatgtttatgcaagatcgacaagctatcactaatcaaggaaaaagttgacgagtcaccttttgtctacagatatacaactcgctgttattatttatacttctttgaagtagattaatctttatattatcctaactggctggaaaatatgttcagcaaagcaacacggatgaattgtttcatgagatcttatttcttgcctatccttattc

SEQ ID NO: 9124 - DNA, 1825 bp, Oryza sativa
  ref <308>: DATABASE ACCESSION NUMBER: AK106472
  ref <309>: DATABASE ENTRY DATE: 2002-08-28
aaaaaaaaagatccatttttttcttttcttttcaccctaattctgagttcttgacatccggaatcatcacgctcttcccaatcgaggttagtctccatcttgctgttcttcttcccccaaatccattccgtgtttcgtaatctagttctataccccgtgaaattcgggggctttttttttctgggtggtgttcatcccggatttggctggggtttgtctaaaattcgagcttggtttgcttccggtttccgattaggttattactgtttaggtctgcttcagagatggggttagggttagatttgttccaactattcggtgagctcctggatcagcagcttgggggatgcgtgtgttcttgtgctggattgtggagttcttgatccctgctaaagattgattgcttgctttcttttcttttcttttttttgatctggttttcgcaggttgccgcttcgaatctcgccgcgcgccgcggcggctagggttttggtcgccggtgagctgctgcatttggtctccaagatgcagccgccggtggcgaagaaggtggctgctcgcgtggacacgatggagatcaagtcgcagattgcgaagaagctgggcgccgagcgctccgagcactacttccatagcctgaagaagttcctgggtgggcagcttgggaaggaggagttcgacaagatctgcgtggctacaatggggagggataacatcaagtatcacaattttctcatcaggtcgatcctcagcaatgcctacttggcgaccgcgccgcccccgcctccgccgccgagcaggcaggcaaccaccgggaactcgcagacgagcaccgtgtccgtgtccaacggggccgtggccaaccatggcgtgatggcgggtgtgatgagagggccggcgttggctacccgggaggcgaggttcgagaggccgagcccgctcgggaagtcgccgcttggtcatcagggcaccggggagtttgtgtcggctgggagcaaggcgccgttggaggttgtgtctgtggaggatggcgaggaggttaaccaggccgggggcagtccagtgtatgcgcagagcagaagcccgattagggctcctttgggtgtttcgtttggagatccgaaggctcagaattctcggccttcgattcctcatccttcgttgatatgctacaaaaatggtgaattgccagaagctcagcgcttgttgaagctacttgagaataagctgcaagctgaaggtcttagcttgactcaggagtgtgctgatgtgctcaactctgggctgaatgcatacttaagtcggctgctgaagtcttgtatgggcgtggcgaaatcaaggggaaagagagtgatgatgaactatccaaatgtgactactgttgctgttataaatggcgtgcagtatcaacgctctacaggttcagctgactattcctaccaagcttcattgctagatcttgagacagctgtagtgtgtaatccccagttactgggaggtaactcctctcgggtacgtgacaagatttctgctcatctgttaaacggatgaatgagggtggctagttatctcggattcttttagcgaatcttatgttgaccagtgtaggcaacctgtcgcagtgttgcattgccattcattctgctgtagaaagctacagtttagttaggttcaggcggagggagagttagtgtcatagggctgggtggtacacccatggcttttggtggtcaggatgatacatcttagggtacatgatagtgaacttccattacttgtgattaatcacaacaataatggaaaattctggcaatgcctttgatcc

SEQ ID NO: 9125 - DNA, 658 bp, Oryza sativa
  ref <308>: DATABASE ACCESSION NUMBER: AK106473
  ref <309>: DATABASE ENTRY DATE: 2002-08-28
tctttcttttcctcttctcctaatcctcctccatccaccgcaccctctctcggctctctcgcgcgcactccccaatccccaccgtgcggtggcagcggcctggcgacaccctcccctccgccagatctggcaggaggggaggccgcagggacgcgacaacgggagggagcttgtggcgaaggagaagacggagcagaagccccggcggtggatccactctcttcgtaagcagtggtgacactctccggtggcggcggcgactcctctcttccagcggtggcttcctcgttgattttgttcatggatttttgtggatattcgttttattcatgattgtgtgattgtgttctcgggtgattgggagctcaatgcatcgagccgttttttttattattattcttgggactgttcctgtgtagtccttcttagcagtttgtactttcaagtgattgtctcagctctggatgagcatggtttggacctgcgttgatctgggatcttgcagtagtttcaaatatttctggaatgttttctaggctgatagttctagctgtagtttcttcctatatccggcaaacggcaatggaggtgggattcgcctgcttgcttgctggggccttgggaaatgaaaaaaaataaaaataaaagactcacatat

SEQ ID NO: 9126 - DNA, 1825 bp, Oryza sativa
  ref <308>: DATABASE ACCESSION NUMBER: AK106474
  ref <309>: DATABASE ENTRY DATE: 2002-08-28
cgctcgccggcagggacctgatggcgtgcgcgcagacggggtccgggaagacggccgcgttctgcctccccgtcgtgagcggcctcgtcgcggcgggagggagcggaatcggccaccgggagaggtcgtcgttcaaccgcgccgccgcgaagccccgcgcgctcgtgctagcgcccacgagggagctcgccgcgcagattaatgaggaggccaagaagttctctttccaaactggacttagagttgtggtggcctatggaggaactccaatgtataaccagctccgtgatctagagaggggcgctgatattcttgttgctacacccggtcgccttgtggacatggttgaaagatcaaaagtctcccttgaggcaatcaagtacctggtaatggatgaagccgacaggatgctggatatgggctttgagcctcagataaggaagattgttgaaagaatgaacatgccaaggaagtctgtgagacaaactatgcttttcagtgcaaccttcccaccagagattcagagactggcttcggactttttgtcgaactacatatttatcactgttgggagggtgggttcaagtactgacctaattatgcagaaggttgaactcctctctgacggggagaaacgaggctacctgcttgatcttttacagaggcaatctgtcggtgtggctaacagtaagctgcagcaacctctgacattggtgtttgtggagacaaaacgagaggccgactctctgaggtactggctatacagcaaaggtttccctgcaacagcgatccatggtgacagaacacagcaggaaagggagagcgcactgagatcctttaagactggcctcactcctataatggttgccactgatgtagcctcacggggcctggatgtcccaaatgttgctcatgtgatcaactacgatcttcccaagagcatagaggactacgtccacaggattggaagaactggcagagctgggaaggctgggtcagccacggccttcttcactgagtctgaccactcgctggcgaagggcttactggagctgatgaccgaggcgaaacaggatgttcctgactggctcgtacagtatgcagagaggccgtactatggaggttcaagctacggtggaagaaaccggaggtctggtggcgggggcaacaggtttgccggcagagatttccgccagggcagtggcggcggctactcaggtggtggtggtggcggcggctactcaggtggtggtggtggcggcggctactcaggtggtggtggtggctactcaggtggtggccgtggtggtggctactcacgcggtggccgtggtggctactcaggcggaggcggtggcggtggtggagacccctaccgagcaagtgctccacccccgcggtactacccttcgtacccgatgggcacggccgacatcaacgcctctggctgggactaagctggagctctcggcgtcgtcctcacttctcagtgcacataccgtatatactaccatgcctaaaattacttagtaggggaaccaaaatggcggtgggcacgcctggtctctgctgctcttttaccttgttgatcgccttgtctcgtctgatatacctatacaacggtggtgcacagaggtatgtggctctgttgggaagttggggttttggccagaatggtggtggtgacattgtggtgatcaggcttcacttgttgcttaaaacttgttactatgttattgtaagtggcagctgatcgacactgctatatttaccagtgtttaaggaagaactttatattccttattgatgctggatgtttttcttc

SEQ ID NO: 9127 - DNA, 1313 bp, Oryza sativa
  ref <308>: DATABASE ACCESSION NUMBER: AK106475
  ref <309>: DATABASE ENTRY DATE: 2002-08-28
gatcatgcaggcgtttcagaaattcagagtcctatagctctgcgatgagttcagccatggcgtcttccatggccaagaactcctcgcctttcaaggtcgtgctcggatcgtcgtcgccggcgcgccgcgagatactggcggacatgggatacgagttcaccgtcatgtgcgctgacatcgatgagagggccatcaggagggagaagccagaggagcttgtcaaggccctcgctgaagctaaggcagaggccatcaaactgaagttgcatggggaagactctgctcaagagagagatcagcctactattctgatcacctctgaccaggtcatggtgagcaaagggatgataagggagaggccaaaaggccaggaagaagccagggagttcatcaagggtatatctatctcaaatctctgcttaggaattgtaccagtaaatttgttgtatttagctaaaaagttttggctgtgtgtttcgctgctattggtagggtattcgggtgataaagcattcgcagtgaactatgttcttgtgactaacctaagcaatggagcttccaaaggaggatgggatatacctgagatctattttcaccacataccagaggatttcatccaaagtgtggtgaaggaaggacacatgacctgcgtggctggaggccttaagctgacacatccttcggtgctgccattcatcaagcagttagtgagcaattctttcgaaacaaccaccattgctagtattactactcttagaacggccaatctgtactggacagtgtcactgcaacgtctgaacaacaataatatcgaatccattgctctgattttgagatttcttcctatgttgcatagatcggcacaatggatagcgttcgaggactcccgagggagctcactgagaggcttattcaagaagttcttggagccaaatgatttgcatctagagtgtcacttgcaacttgcaagaagggcattgctaaatggaccgtacgacgcgctggtattgtgaatcagtgaatgcttgttttctatcgatcccagtaacacgagggcgattagctcaatgggaatttatcaattagagaattttacgagtgaaaacgtgcgtctcacttcttttgtagtgttatagggttctttgatttgattttaactacaaaacaatctcaaataacctgtctccactgttatccatgtaaatacactttgaaaaaaagtccgaataacccctctccgtggaaaacgttgttgatctttatcttgccatacatgtacaaaaaatattgatgcttacacgaaaatttaggtg

SEQ ID NO: 9128 - DNA, 1510 bp, Oryza sativa
  ref <308>: DATABASE ACCESSION NUMBER: AK106476
  ref <309>: DATABASE ENTRY DATE: 2002-08-28
aaaaaaccacatcaagaactctgctccaaggtcggcggcggcgctctccctagctagccgctccttctcctctgtcgccggcggcgcctccgaccaccgcagggctccgtcccgccgcctcccagtcatggcgagattgatgtcgtccgccctcatcaggggtctcgtgagatcgagctgctcgccgaccgtagctgctgtggcccaaccaactatccatcagtttaggaactactcatcaggacttggtggcgattctactgcaactggggactcaagttcaacacgagttgctgctgatcctgatacacatcaagatttccagcctacaaccaaaagttccaacatgtcttttgatgacattgtttctcaggatatcaaggagaacccagtcctgatctacatgaagggttatcctgatgctcctaggtgtgggttcagtgcgttggcagttagagtcctcaagcaatatgatgtccctatcagtgctagggatattttgggagacctcaagctcaaagagagtgtcaaagcccacaccaactggcctacatttccacaaatatttatcaaaggagagtttgttgggggatctgatatcatattagatatgcatcagaagggtcagcttaaggatgtgcttggtgatattgcacaaaagcgtgaacaaaacgaatcatcatgaagaagatataaaccaagtatggatttgcgttctcctgtttgatcttttcatctgaaaaccacacttaaagtttgactgcaatggttaatgtgacaggacaaaacgttatcgagataaaagcgatatgtcattttcagtttttcacagaaaagaaatgcaatatggcttgttgcattacagcggattctgtgtctattggattatcaatctatgaagccaaattagtttgtttctgggcaataatgtgtgagctccacagtacatcacttatgaaacaaagctttacataacaaattagtgtttgtttttttttagctttgatctccccagtggctgggatagttattttattccgtcgtgtagcttcttttaaatgcgatatgccatattcacaaaggaatcatatgccatctcatgtgtcttgtgtcgcagttgcttgataaaatgggttaaaaattaaagatcgtgttatgccgcaacaagcaaacaaatggagaaaaactcgggaacctactgtcagcaggctcacttgataacaagcttgcaacatgtgcagctgaggcatccagcccctcagcgttcatcaggattcaggagcatcttctgaaagatcagtaacatcaaaccctacaaatacagatgtcaaagttatggatgaaataatagtgcatgcataccagacgagagatttgattttttttaaaaaaatattttttgacacactgtaaattagagttcgattatttgacatcctgacataccatcatagactgagatggtctcacgtatcattgtcataagttttaatacaatcaaagtgacaat

SEQ ID NO: 9129 - DNA, 1446 bp, Oryza sativa
  ref <308>: DATABASE ACCESSION NUMBER: AK106477
  ref <309>: DATABASE ENTRY DATE: 2002-08-28
ttgtccgcggcggtgtttgcgctccgctcctactcctccacggcccagtcctcgtcgccgcgtcggttcccgacgcctaaggagatccgcaggggcctggacgagttcgtcgtcggccaggacaaggccaagaaggtgctctgtgttgccgtgcacaatcactacaagaggatatacagtgaatcttcaaattgttctatgaagagctcggcatgtggcgatgttagtatgagtggtgatgatgacattgagcttgaaaaaagtaacatccttctgattgggccgacagggtcaggtaaaacactgttagcaaaaactttagctcgatttgccgatgttccatttgtgattgctgatgcaactgcaattacacaggctgggtattcaggtgaagatgtggaatctataatctgcaatcttctggcggctgctaagttcaatgtggaagccacagagcgcgggattgtttacatcgacgaagttgataaactcataaagaaggttgaatgcaatgaggacaggagggatgtctctggagagggtgtccagcatgctttgttaaaaatatttgaaggaacagtcatcaatgtaccaagaaaaagaaatcaagatagtatatccgatggttatgtcgaggttaataccaagaatatactcttcatctgtggaggttccttctctggcttggaaaagatagtatcagaaagacaccgaaactgtcatatggggtttggacttccaacatctggtgatctgcgaaactgtggttggacaaatgctatcggggaatcatgctgtgttgaagctattgaaagtgatgacctgattgcatacggcctcataccagaatttattgggaggttgccaataacagttggcttgaatgatctcagtgaagctcaattggttcaggttctcatggagccaaaaaatgcaataggaaaacaatacaagaagttgtttaaaatgaatgatgtcaagctgcattttactgaaaatgctttgcggttaatagcaaagaaagcagcttcacgagaaacaggggctcgagaactgagatctataatggaagatattttgacagaagcaatgtttgagattcctgatgcaagagggggaaaagagaagataattgctgttcttgttgatgaagagtctgtagggtcagtgcattctcgaggatgtggagccaagattttccgggatgatggagccttagaactatatgtttaccagaataatattagactgccagggttaatccctgggaaccctaaacgtactcgcattgtcagcttctgccttttggtcgctttgtcagcaactaagctgtgggtttaccatacatttcactgcttctcctcgatatacgaatgggttgtgtcgatactatgtaaagccaacatttttacacaataaagcatagcattaagctttattttcgtc

SEQ ID NO: 9130 - DNA, 1263 bp, Oryza sativa
  ref <308>: DATABASE ACCESSION NUMBER: AK106478
  ref <309>: DATABASE ENTRY DATE: 2002-08-28
aaaaaaaacccttcggctcctcccttctcacgatgttccgccgcgccgccgcgtctaccttctttcgccatgccctctccacctcaccatactcctcctccgccgccgccgccgccgcggccgcctcctcctccgccgtgaactccatcatcctccgctccctcaaggagcacttcctcgaggtctccaagatgacgcccccgcccaagatcagcccgcccaagccctacacgatcgtcaagggcgccctggaccaggcatccggccccgtgctccgccgcgggtacggggatgccggcgaggagatctcaatctccgtcgccaggctcgccaacatcatgccccccggcgccgactacgactcggacgacgacgacggcggcgggggtggggtgagcgagtcgattagccagcttttcctccacgtcgacatctccaggccagggagcagcaagtcgctgcagttcctgtgcgggctgtaccccgacgccgtggggatccattccgtctgcctccggccgaagactgccgagtctgggacggcgggtttggctgggaagggcggtgacgggtaccagggccgtatcttccaagaattggatgagaatgtgcgtgatgcattccatcattacatcgaggcccgtggtataaatgagaaactcttccctttcctacaagcttggctgtatgtgaaggatcaccgcaatctcatacgctggttcaagagtgtgggtacactgatcagtgagccaaagtctgagtaagatgttaataacatcttgctgaagatcacatcggggaggcgatactaggaatgtttcttgcctgtttgagaaaacccagaagatttggagctatgctacaataaagcaaatgcggcacacgatattgcattagtgggggtttcttcgttctgtttagtttaactaagcccctggggagtagatcgtcactggagggcttgatgtgtaggattactagcgtgagttttcagtattcctgtgattggatgctctaccattagttgtgcattacgatataaccatgcacttgaacaatttatgcatccttcctataatcatggctatagggttacaaaattagcctgaaggagccggaaactattggtaatttttgtaagagagcacatccccaacttttatagaaaggccatcattagatgattacaacacaatcacttggggagttgggggtatagagaactgtacaagattacagatgaatatgactcctttcggttcc

SEQ ID NO: 9131 - DNA, 1292 bp, Oryza sativa
  ref <308>: DATABASE ACCESSION NUMBER: AK106479
  ref <309>: DATABASE ENTRY DATE: 2002-08-28
ctctctctctttttccgtccaaagtccgaaccgtccttccactcgccgcctccttccttctctctcaccgccgctcccaccgccgcctgcttccctctctctcgccgtcgcctgcttccctctctctcgtcgccgcctgctgcttccgctcgcctccctctctctcccgccatcgccaccgtctcccgccgccgcccccgaatcgagcgcacggggcggaggcggcagtcgtcgtcgtctggtggccggagcggcagatccggggcggaggcgacagttgtactcgtcgtcgtcgtcgtccggtggccggtcaccgctctctccctctctctctctctctcccgtggaaggtggcggcgaagaccccggaggcggcagatccggcgccaccgtggccggatctggccctccggcggatggagcagcgtcggccccgccgcatgaagacggtggcggcgccggcggtagctgcatcgacgatggcgccgcgctggccgccgccacctccctcctcgccctcccttcttctctccggcggcgagcggcgcctccgccttgcccttgacgcatgggtcggtgacagaggggagaggggtggaagaggaaatcaaagatcgggtgcgtcgcctcaagaacctctacctacgcagtgggctgcttcgcccagtccccctgccaaaagtgagcgagggacgcgttccccagctgagggacgcgttccatcgcgagggggcggtgcggatggaaaagctaacggacggagctaggggcacgggtcaaaggtacgcattggtgatggcctaatctcgttgttggattcaagcacatcgcaaccgatgtcgcctcctctcgctggttctcgcgctcctcgttgcctccgatgcaggcgttgctggcccccaacgcgctgtcgtccaacaccgcacctccacaccgtgcgacgtccccggcaccgaccacacctccctcggcaccaaccacccctcctactcctcgtcttctctaccgtcgcgcaacagcctccgacgcaggcgccgtcggtgcccatcacgccgccgtccaacgccccgccgccagcgcccccggcaccgaccacgcctcccttggcaccaccggtgccgaccacctgagcacagtggtggagacacagtctgagagaatgagcatcacgagctggacttagcttgtgaggttttcgatcctaccctccaagaatgaacggcgggatttagattggtataatatgctggaccggaacaatgctctaatcctaatcctaatcaatcccttat

SEQ ID NO: 9132 - DNA, 3316 bp, Oryza sativa
  ref <308>: DATABASE ACCESSION NUMBER: AK106480
  ref <309>: DATABASE ENTRY DATE: 2002-08-28
atcaatcgtgcactattttgaccggaacggctgcaccattcatggccgccttccatggccgccggccgccatttccgccgccgttccccgctcctcccttgctcggctcgcttccctccgctataaaatggaacccactctttgcgttctatcgttttagcctcctcccgagcctccccgtggctgcaccgcctctccccgcctcatccctctctctcatgtgccgccggccgcctccagccatctccccctcctctcccgtgcgccagcaggccgtgccgtcactatcctcggcgtcacagccgcctcctctcccccggtcagccctccgtttcacggggaaaccactggaggtgcgcccccaccggcaaccagtggcatcgccgccactgcaccgcctcccgccggctgttcgccgtgcctaaagcgttggccgacgctgctgtcccctccctcggcacggtgacgtcgccatcaacctcggccactccccggtttcgcctggaagccgccgcacgtcgctgccgcgccggcttccccatcctcgtcgtcgacgtctccttcggccgcccgttccaccccgcttgtgcaccggccaacgttgccaccaccacctccgacatcacagcggcgagccggcgatgtcgtccttggcttcgcctccctttcagctgaacctgccggcgttcgtcgtcgcctcctcaccggttcccatcgtcgtcctcccgtcgttcccggtagtcgtggtgttcgtccctccgtcaagccgtgctgttcgtcgcccgcctttcgtcaaggttgctgcagccccatcgtcgtcttcgtcctcggctccgcgtcgtcaagcgttgcgccggccgtgtctcgccttcgtccaaggatcgccgccgaagtcgttccctcgccgttcgcttccatcgtccccaagccgtctccgccgcgcccgttcgtcgtcgtcgttcccatgcctcgttgtgtggtggcttgtagctttgcttgtgtgcttcgcgtagcttctgtcgttctggaggtttctgaagcgtggttcgcggtcgtcgccgaaggttcggaaggccgttctctctgagcaaggcaagtcgcatcacccttgagcatattgaatcccagtttataaaattattttgatttaaattattgcattaccgctttacttaaattcccgcgttatcactgttttatttagccatgcctatttacctttgttatgaccttattattattgctattgttattattaccttgttcaccctaggataaacaaaaccaaaactagtgggtactctattaacggttccactagtatgaatttaggtaaatgcttcgctgattaattaggcaacactaggtggttttataactttaaactttgggagttctcatatgatttggacactgtggaatggttggcttgtgatggaattgaacacacacctcccccctctattcaaaactcccaaaatggttttaggttgggctcgaggtgcatggttctgctagtagcacctcggccactataaggaccggtcttcgggcctctattgcaaagagctaccgtactaaccacatgtctaatgggtaaggcttaactcggtgctcagtctagtcctagcaagagtacacggatggagatggacgaagtcggggctcaatggacatctctagggcaaatgaaggctacacgggctgcggctcggtagtcgagatgtcatggcacagggctggtgtcctactgctaggggctcaatcttacctacctgtctcgggattccggccgtaggcgaggttgtgtcggtgcttttatcacggctaggatgggtaaaggggttatgtcacttcctttactacgggttccacggccgtggaatgcggagtaaagatgtgtcttgtgggtaaagatgtacacctctgatcagagtataatctattcgaatagccgcgccctcggttatgggcaagcctagcaatgtacccaagttagtggtttaattcttaaaacttgcttaacaactaaaatgtggaatggttggcctggattggcttgggacgagctgggatctgggtctggttgccagttcggtctgaatcatcgtaggccttaggttaaggcaggttcgtgtgggttcatggccttgattaataatattgtgtagccctaggattgtgcttgtaaaatagctttgagcaactaagtgtcttttaaatgctgttactgcaaaacctaacccctattattatccccttgtacccccttgcattaatcatgcatctgccggtgtggcttgctgagtacggtggttgtactcattcttgctctatctttccccccttcagtaagagaagctttagagaagaagtcctacgtggagtcctggcttataccccagttgaagatggagccgtaggcccgctagtccgctgctgtttatttttgtttgtcaggcctggagtgcctttgtaataatgtaaatattatcgatataataaagatgtgccttttgtatcatgtttgtgtggtgtacaccggcttttcctgggacggggattaatacactagcattctggaaaaggtatttttctgggcgcgacactagtgctataaatattactaagaatcctgttcaacactcacgcacaaagcacattgatattcgctttactttttgagggatcatgttgagaagggagatgttgaattgtagtttttggacacaaagttgcaacttgctgatattttcactaaacctttggattctaatcgctttgcttttttttatggtgaattgggaataattcatcctttttggcatggtttgagggggagttttgcacctcatggttttatcaagcaaaaatatgacaatgagaaaaattgatataagagagctttgtgttatatatatggtattttcttgtgcatgctagcaatactatgaaggtttatttgtctccagcatagcttgtatgtgttctatttttttatgaggcttagattttgcttttaagggagttgatgcatgacacttaaattctatacttgaattaagcaaatatgcaatgttgatgctagcatatggtttgatctataaatgatctatatatatggtttattgatttgttattcctcaaatagcttgtagttgcttattgtgcaaagagaataaaaatatgaaaaaaatgaatatcgaatccatggaaacagtcttgacgacaaggacgtattcgatgtgagcaaaataatgggtgccgaatccctggaaacagtctcgacgacagggacgtacccggaataaaagag

SEQ ID NO: 9133 - DNA, 1378 bp, Oryza sativa
  ref <308>: DATABASE ACCESSION NUMBER: AK106481
  ref <309>: DATABASE ENTRY DATE: 2002-08-28
catatcgcttccgcctctctcccatcttcctctcgaccactgcctcgatcccctccgtatcaaccgccgccgccgccgatccgtcgtcctagcgtcgccttcatcctccttcctccccatccccaagcgcccgcatccctctccccctgccgacggctgctccacatcggcgcccaaaccctaacctcgccaccagccgatctgccacatacgccgccacaaatcgccactgccaccgattcctccagatcaggcaccgccgctatcatcgccctaccgccgtcgtcgccgtcccgctggccgctgctcgcgcccctccgctcatcctttcccctccccccaccaccggcgtaaccctagaaccacgccagtcaggacggaatcgaatccgatccccatctcgcgagtcgtgagcagagcaggggaggtgaggggcatcgtcgttccatcgcgtcgcatcgccccattcgacgccgccgagatcgccgtcacccgaatcctgcgacgccgccgagatcgccgtcacccgaatcctgcgacgccgccggacccttctcacgtcatcgtccccttccgccgccgccgcgcactgaaccagaggcgaggtcttccccagccaccgccggagcttccccatccgccgcggccggagtcgacgtcgtccccatccgccgccgctggaggcgaggtcttccccatccgtccccagtctcggccggagccgatgtcgtccccatccgctgccgccgaagacgaggtcttccccatccgcagccgccgccacagtccaccgctacccacgaggtcgtccccttccgccgccgtcgcgcactgaaccggaggtgaggtcttccccatttgctgccgcctccgccgcactcatcgcctgtcttcatcgtgcgcatccctgccgtgcgccatgtttagttgtcttcaccctcgacgccccggagccggacgcccactgcccacctccacgccaccggacaacctccatccctgccgtcctcctctccatcgtgtgcaacttcttcgttatctacacgcccgaggagagatgactcctaccgcggaggttgatgcacacccgccttctttctgttgtgccagtattctcatcgatgaatgattttaccacacaacagcaaagctgttgccatctgccggcattatctcaggtttgcttttccgcatccttctctccttatcaatttctttatgtgccccttgtcagattgcatttactttctccttctcctttctgctatcaaataggatcaatgaattgttccgtgaatgctgatcatattatgagaattttcccctagctaaaaataaattaatggaatctgtagcaatatgctatatgttaatcttg

SEQ ID NO: 9134 - DNA, 2154 bp, Oryza sativa
  ref <308>: DATABASE ACCESSION NUMBER: AK106482
  ref <309>: DATABASE ENTRY DATE: 2002-08-28
agtagagcgtatgatgtcgatggcccgaggtagagcactcaatgggctagggtggcccccatttcgctttaccaaccccagggaaactccgaatacaggccgtcatccttagtacagacagactgattgggtgctaagatccaaagtcgagagggaaacagcccagatcgtacgctaaggtccctaagcaatcacttagtggaaaaggaagtgatcgagcgatgacaaccaggaggtgggcttggaagcagccatcctttgaagaaagcgtaatagctcactggtctagctccatggcaccgaaaatgtctcagggctcaagtgattcaccgaagcgacgagaccttgaaagctgctttttcaagtgtcagtagcgggacgttctgtcaatcggggaaggtttttggtgacaagacctggagatatcagaagtgagaatgctgacatgagtaacgagaaatcctgtgaaaaacacgatcgcctgccagtggaaggctttctgcgttcagtcaatctacgcagagtgaatcggtccctaaggaacccccgaaagggctgccgtccgatgggtacacgaaagtgacgaagttgctttgactactgaaccatgcctggatcgtcggagcgaattggatgatcgggccgagggctgccccctcttcccctcgctctcctttccttaatattcaccgtcgagtcatcaaagccgtcaactaattcagaggagctcggctggcccggtcgccctacgctactggcgcttccaaaggcgaagctctcgtctttggcgaccagcaaactctgggctaaaacctgtagttttgaagcaagggatgagcgcgaaagccgttgcgcttccgtacacgcgcatacgttttcttgctccgtcgcgcgttagtacaataacgcgcagccgttttcttgctggggcggacacggatttctctctaaaggcgaagactcagaagtgggcgaacactcggcccagcgggcgaacatgccggctccggctccgcgcacctgctgacacctttcgaagcactttcacgtgtgaaccgaagtcgtcttgccgaactccttcctttctcatttcagtcctcgcctttttcatcttccgtaggggcctttagtcttttgattagagtagaggtcgcgagagagcagagcgtaccgccctgccatagtcgcgaggatcttaatagtcggtcgcgactgttgtcatagtcaacgacggttgaaacttccaggaaaaaacttcgaattgggagggcgatcctcccggtgagctgaccgtaccccaaaccgacacaggtgaacaagtagagtatactagggcgcgtcgagagaaccatgtcgaaggaactcggcaaaatgaccccgtaacttcgggagaaggggtgctctcctatcttttgattaggaaagcggcacataccagggggtagcgactgtttattaaaaacacaggactctgctaagtggtaacacgatgtatagagtctgacacctgcccggtgctggaaggtcggaaggagaagtgtgataagctttgaatggaagccccggtaaacggcggcagtaactctaactgtcctaaggtagcgaaattccttgtcgcataagtagcgacctgcacgaatggtgtaacgactgccccgctgtctccgacatggacccggtgaaattgaattctccgtgaagatgcggagtaccaacggctagacggtaagaccccgtgcaccttgactatagcttcgcagtgacaaccttgatcgaatgtgtaggataggtgggaggtggtgacacacaacgaccaatcctgaaagaccactctttcgtctaaggatgcctaaccgccgcaccgatcattcggggggggcgggacactgcgaggtgggtagtttatctggggcggatgcctcctaaagagtaacggaggtgtgcgaaggtaggctcaagcgttgattctgctcgtgagcgtaatggtataagcctgcctgactgtgagaccgactggtcgaacagagacgaaagtcggccatagtgatccgggagtcccgtgtggaagggctctcgctcaacggatcaaaggtacgccggggataacaggctgatgactcccaagagctcttatcgacggagtcgtttggcacc

SEQ ID NO: 9135 - DNA, 1493 bp, Oryza sativa
  ref <308>: DATABASE ACCESSION NUMBER: AK106483
  ref <309>: DATABASE ENTRY DATE: 2002-08-28
atgcatttcatcgaacaccttgcgatcaccctctcaccaccgctagagatcaccattgtgaggctccccggccggagcaggaggttagagggagtggaggaagagccgtgctgccgccgtcgccatgggggaagccgggtagccgctggacatcaagaaacgccgtcgagcaccttacgtcgctgccgtttgcccctgtcctgcaccgcgtcgagctccacttcgctgcgtttcgccatctcgccatctcgcgaaattgtgtatcgattagtggtgaggcaacgtatgcagcttccaggaggtgaaggttgatcaagattataccaagaataagaactatcctgagcagatggccgatcacccacccaaccatcgcggagaaggcatggatgactttgtggcagagttggctcgcatgacactggtggtgggctaccccaatgcgccagagtattcgactgttccaccgctcagtggcgagttccctcaccgtgttcgcctggaggttcatggctatgtgcatacctgcctcgctaacatggtggttgaggcatccggaggcacagcagatcacgcctgtcaggaggcagcatacctgatgatggccagattacgggagcgccacaactacatcttctgcaacacggcgtaccggtttcaccctcgtcaagcaagtggcgacgacgtcagcaccttccgttcgacagccggcgagaacgacaccacctttggtcatatgtgtgccgtgatgaggggaatggacaggatgcactcggatctgcgcaaggcatccagggccttgaatgacgggaagctcgtgaggatcatagctctgaaggatgagatcgcacgcctgaagaaggatgagatcgcacgcctaaagaaggagaatgctcagttgaagaatccgcaacacgccccgcaagtcgacgacggcacccgtgcgcattcagcttgcgcccaggaacccacctccgcccgcagttcccgcagctcctgcagctccagctccagtcccagctcctgtcccagtgacagctcccgcgtccgctctctccttcgctccagcattagccgccaggggtccagccagtggcaacgggggttggttgcctgctactcccagtggcagccgcgaccacagcagcagcagttccagtggctcggagccgggcagcggcgagatgtatctgccaaactccaggagccgctcagagggacgtggtgacgagcaggaggacgccctcgactccaccgaccgcaggagccgttccgagtattaggctcgctttcccttagtttatcgactgcttagtttttgtctgctagtttgtgtgtttaggtctgttcgcttgggggtcagtcgatggtcaatatcatgtgcctatgatatggctgtcataataaggatttgcctgctgttttaagtattttaattcagatcagaacaattgcagtttaaattcctatataataaagcttagttcctgagc

SEQ ID NO: 9136 - DNA, 1700 bp, Oryza sativa
  ref <308>: DATABASE ACCESSION NUMBER: AK106484
  ref <309>: DATABASE ENTRY DATE: 2002-08-28
tggaatctggacaggtgagtgaatcccaaaatataatgaagatgataactcatacattgcaatgtatggcaaggggtggagttcatgatcacgttggaggtggctttcatagatattgcttctcattgtaatgcacatgattgattaatttgtcattcactttgttctcttgtaatcttttccatgatttgctgtggcagttttccttggtcaaacagtctcttggatgtgcatgcccatacatgatctgtttaataataaatggaaatgttgcctatgatgttgttccttgggtgacgatgaaagtagcataatgttgtatttgaacattcttttctgcacatgtggcgctctttgttgcttcatatggcttcatatccagatcttagctacctcattaagtgcgataaatcttttccttacctggtctgcatcatcatatttatccattgcccatcgctctgaaattatttcttgagttttcaccacttatgtatgtggatattttgcagccagaggaatatcttggagttgcagaaaaggcagcacgttttataaaggaagaactatatgatagcagctcaaacaggctgaatcatagttaccgaaatgggccagcaaaagcaccaggttttttggatgattatgctttcctaataaacgggttgctggatctctatgagtatggtggtaagatagagtggcttatgtgggctgctcaccttcaagtcattcaggatgaattgttcttggacaaacaaggtggtggctatttcaatactcctggagaagacccttctgttcttctgcgtgttaaagaagattatgatggtgcggagccttctggtaactcagtagctgctatcaacttgatcagattgtccagtatatttgatgcagcaaaatccgatggttacaaatgcaatgttgagcatctcctggctgtcttccagacgaggctgagggaacttggtatagcactgccgttgatgtgttgtgcggcagacatgctatctgtcccgtccaggaagcaggtggttctggtggggaacaaagaatcgactgaattccgtgacatggttgctgccgcattttcgacatatgatccaaatagaactgtgatccaaatagaccccaggaacaccgaggaaatgggattctgggagagcaacaacgccatcatcgcgcagatggcacgtagcagcccaccggagaagccagcggtggcgcacgtctgccaggacttcaagtgcagccctccggtgacctctgcagacgctctccgcgtgctgctcaacaagacagtggcagctgctacttcgtctgctgctgcctgaagcgtctttccctcctacggctatggagctcctctggaaagtacataagtaacaaatcggcagagtttttagcctgcagaaggtttagctttcgggttcccaaagctctttgagccgcctcggttgtgtgtagatatttttctcttaataaaagcactgttttcatcttgcttccccttgagttgcaggctgtttggaatgtatgaatctcacatttcacacgagataaaaaaaaccagtttgcgttacaaagatcccggcccaagggatctcaggaaaagtggagttccaaatgaaaaaggaaatcatactgatgttatctagtatctggtttatttgcagagaaattccacgaggcactgt

SEQ ID NO: 9137 - DNA, 1361 bp, Oryza sativa
  ref <308>: DATABASE ACCESSION NUMBER: AK106485
  ref <309>: DATABASE ENTRY DATE: 2002-08-28
aaaaatagcagcacacgccgattttttttttaatttcttcattcgcaagtaagctgatcggtgacgtcgtcccgcttcctccgaccccgacatggcgatggcggcggcgacgggcggcgtcgatgtgctcggcgacgacctcctccgcgagatcctcctccgcctcccttcccccgccgcgctcgcgggcaggtccttcctccgtgcggcccgcgacgccggcttcctccgccgcttccgcgctcgccaccacccgtcgcccccgcgcctcctcggcttcctcttcgtcgtcccgggcaccacgccgccggtcctcctctccgtcgcctccgcctccggcaatcccccggcgggggacttctccctctcgttcctccccggcggcggctggggctccgccgagtgggagctcctggactgccgcgacggcctcctcctcctgctccacaaccacggcgccgacatgaagctcgccgtcgccgacccgtcgagacgcgcctgctaccccttcgacttgcccaccgccgacatccccgtcttgtacggcctcgccgccgccaaatcggcgtcgttccgggtggtctgcatcgcgcggagcctcgactccaccacgctgcgcgcgctggtgctctcctccgacgagccctaccactgggaggaggtcaacgccatcccgtgcgaggaggaggccagcatcgtctacgccgcgcggccgatgaaggcgaagacgtcgctgtactggaagctcgacgacgggacgcgcatggcggcgttcgacgcggcgccggggaagatgaagctctcgatcctcgacctcccgccattccccgcgacgctcgccttcgacgtcatcgacacggaggacgacgacgacgggctccgcgtgctcgccatgagcgacgacttctgcctcgagacctggaagctctcctccgccgccaccgctgccgccatcgacgacgacgaggaggaggagactccatggacgctcgaggacacctcggtgaggttctacagggcgctggaaagcatgctcggcgagcgaaagctgagcgaccgccaccgccgccgccgccgccgcggctacgagttcgagatcgtcggagtggtcgacggcttcttcttcttccgccaatccggcgtcctgctctccattgatctcaagaccatggagctcacaaggctatcggagcaggattgctcgccggcgacgatctacccgtacaccatggcgtggccgccgtcgttcctgaatcctaccgactaggtgcccgatgatcaaatcgttccaaatgaatactgaatcctgatttgtcatttcaaacattcgaatgaaatttgtggcggtttttgctttcaac

SEQ ID NO: 9138 - DNA, 2597 bp, Oryza sativa
  ref <308>: DATABASE ACCESSION NUMBER: AK106486
  ref <309>: DATABASE ENTRY DATE: 2002-08-28
tagcgtcgtggtgattaattaatggcgaaggcaacgactggcatctgcctcgttgacgtcatcctcttctcgttcttcctcgttgctcccagagccttcgccgccgccgcggccgttaccgacacgctccgcggcggccggaacatcaccgacggcgagacgctcgtgtcggccgacggcacgttcactctggggttcttctcccccggggtgtcagccaagagatacctcggtatatggttcacggtctcccctgatgccgtttgctgggtggccaaccgagacagccctctcaacgtcacctccggcgtgctggcgatcagcggcgccgggatcctcgtcctgctcgacggctccggcggcggccatgtcgcgtggtcgtcgaactcgccctacgccgcctcggtggaggcgcggctgtctaactccggcaacctggtcgtccgtgacgcaagcggcagcaccaccacgttgtggcagtcgttcgatcacccgtcgaacaccttgttgccgggcatgaagatgggcaagaacctgtggaccggggccgagtgggacctcacgtcgtggcgctcgccggacgacccgtcgccgggggcctaccgccgcgtgctggacaccagcggcataccggacgttgtcctgtggcaagacggcgtcgagaggtacaggtcggggccatggaacggccggtggttcagcggcaacccggaggcggcgacgtacacgacgaacctgatcacgttccaggtgaccgtcagcccgggggagataagctacggctacgtctccaagcctggggcgccattgacgcgctccgtcgtgctcgacaccggcgtggtgaagcggctggtgtgggaggcgacgagccggacatggcagacgtacttccaggggccgagggacgtgtgcgacgcctacgccaagtgcggggcgttcggcctgtgcgacgccaacgcgccgtcgacgtcgttctgcggctgcctcagggggttcagcccgacgtctccggcggcgtgggcgatgaaggacgcctccggcggatgccggcgaaacgtgccgctgcgctgcggcaacacgacgacgacggatgggttcgcgttggtgcagggagtgaagctccccgacacgcacaacgcgtcggtggacacgggcatcacggtggaggagtgcagggcgaggtgcgtggccaattgctcgtgcttggcctacgccgcggcggatatccgaggaggcggcggtggtagcggctgcgtcatttggaccggcggcatcgttgatcctcggtatgtcgaccaagggcagggtctgttcctgaggttggcagagtctgaattagatgagggtaggagccggaagtttatgctctggaaaactgttattgctgcaccaatatctgccacgattattatgctcgtactgctacttgctatttggtgcagaaggaaacacaaaatctcagaaggtatacctcataatcctgctacaacagttccttcagttgatctgcagaaagtgaaggcggccactggaaatttctcacagagccatgtgattggccaaggaggatttggcatagtttacaagggccagttacctgatgggagaatggttgctgtaaaacggctacaccaatcaaccctcaccaagaaaggcaagaaggatttcacaagagaagtggaggtgatggctaggctcagacacggcaaccttcttcgtctccttgcctactgcagcgaaggcagcgagcgtgtgctgatatacgactacatgtcaaacaggagtttggatctctacatatttggcgattctggcctccgactcatgctcaactggagaaaaagattgggcatcattcatgggatcgccaatggtattgcgtacctgcacgagggatcaggcgagtgcgtcatccacagggatctgaagcctccgaacgtactgttggacgacagtttcagacccaagattgcagattttggcaccgccaagctattcacagcagaccagccagagccttccaatctcaccgttgtggtttcaccgggatacgcatcaccggagtacgcatggcgaggggagatgacactaaagtgcgatgtctacagctttggagtcgttcttctcgaaacccttagcggacagaggaatggtcccatgtacagtctccttccacatgcatgggagctgtgggagcagggcagggtgatgtccctccttgacgcgatgatcggtctccctctctcagtctcagggcctgatcacaccgagatggaagatgaactggcgaggtgcgtgcggatcgggctcctgtgcgtgcaggatgcgccggaggaaaggccggccatgtcggcggtcgtcgcgatgctgaccagcaagagctcacgggtggatcgtcccaagaggccaggggttcacggcggcagaagcaggccaccgttgcgcgagtcggagctgctgggcgccaccgacattgacgacgatctcacgtagtacaactgtacagggttatatatatagtccctccgtctctacgccatttactttactaaacatgttttaccgttcatcttatttaaaagatttaagtaattgtt

SEQ ID NO: 9139 - DNA, 1471 bp, Oryza sativa
  ref <308>: DATABASE ACCESSION NUMBER: AK106487
  ref <309>: DATABASE ENTRY DATE: 2002-08-28
gaaaccgcgccgacgcctccgcttcacgaaaccccaaccggcgacgcggcgcgctcgctccgacgaccatgtccttccccgacgaggaggaggacgaggccttcctcctcgccgtagcggccacggaggaagcggcgctggcctcctccgactcctccaagcgccgccgcctctccatgacctcgtcgacctcctcgtcaccgacttcggccactcctccccccgccgccgtccccgaggggccctacctggccgcgctcaagggaagccacagctccgcctggaagcagcagcaggagacgctgagccaggcgcgcaagcgtcccggtgggtcccaaaccctagccaccccaggtagcggcagcggcagcggcggcgcgcaggtcgcgaggggcggcgcgtgcttcaagtgcggggactcttgccactgggcaagagaatgcccgcaatccgtgccagctactggcggcggaggaggaggcggggcctttggtggaagcggaggagggggtggtgggtatggggacgcgggtggggcggtggaggagaaggcttgcccctgcggcgccgggagttgcctagtgctcacatccaacacgcccaggaatccgggccgcaagttctacaggtgccccatgcgggacaatggaggttgcaactactttgagtggtgtgataacccatctccaggtcctgcaaatgtcagtggcaatactgtttttcagtcagatacatcagttgcgcatatgctttgcccctgtggtgctggagcttgcttaattctcaccacaaagacaggaaagaatgttggaaggcagttttatcgttgcccagctaatcagggaggtagctcttgtggctatttcaagtggtgtgatgaacaacagcttaggacagctgctccactgcaagcttcaacacaatatcatactgatgttgcttcaagtggccaaattcccagcaagaggagctcctccgcctgcttcaaatgcgggcaagagaaccattgggcaaaggactgcccaaatcaatcttcagatccttatcctgacaaaggtgggagaacatttacttctgcaagctctcccgatgcgtgtttcaagtgtggtaagagcgggcactggtcccgtgattgccccaccgcaaattgtggttctagtaccgtctccagccatgtcaagtcctcttctactttgggctcatggaacagccacagatactgatagccggtacctgtgaactcaattgaactgacatggacatgctgtacgaaacttggacaaatgcacatgacacgtgttgcttaggtacgcattcttgccaaattccttttgctacttttaagtttggtaatgagtttttactgaggacatttccgtcttcatgctggttgctctgggaatcttttgtcatctgctctagacatttccactgatgtagatataagaaaaatcagcactatgttcaattc

SEQ ID NO: 9140 - DNA, 1392 bp, Oryza sativa
  ref <308>: DATABASE ACCESSION NUMBER: AK106488
  ref <309>: DATABASE ENTRY DATE: 2002-08-28
atcccgcatttcctccattgcataccaacaccaaccactgaactagcactactagtatagcaagaagggtgatgacgacgacgacggcggagggcggtggcggggtggcgccgttcgtggcgaagacgtaccggatggtggacgacccggccaccgacggcgtcatcgcctggggcagggacagcaacagcttcgtcgtcgccgaccccttcgccttctcccagaccctcctccccgcccacttcaagcactccaacttctccagcttcgtccgccagctcaacacctacgggtttcgcaaggttgatccggacaggtgggagttcgcgcacgtgtcgttcctgcgcggccagacgcacctgctgcgccggatcgtgcgacggagcagcggcggagggggagcgaagaggaaggaggaggccggcggttgcggcggcggaggggaggcggccgccggggacgtcgacgaggagagcgccgtggtggccttggaggtggcgcggctgaggcgggagcagcgggagatcgagggccgcgtcgccgcgatgtggcgccgcgtgcaggagacggagcgccgccccaagcagatgctcgccttcctcgtcaaggtcgtcggcgacccgcaggtgctgcgccgcctcgtcgacagggacaacaccaacgccgccgcctccaacgccgacgactccgccgtgcatcatcaggtcaagaggccgcgcctcctcctcgactcatcctccaccaccaccacccacggcgaccgccacctcgtcaccgccgccgcagacgggttctacgccggcggctgcggcccggaggccgcagctgccgccgcgttcgtgccggacgacgcggtcgacttcaccggcctctacaccggcggcgacgggttcggcaacgccgtcgtcgacgccggcgtcgactacccgccggcgtacgcgttcccggtggtggacagcggctactaaagctgtaaccgctttgagattcgtgctcttgttgccgatccaacgatttgtgtacgcagtagtattttccgtttcagtttgccctccccaaagtgtttggacgaagtggctgtgaacggcgaaagaaggaagctaggtagctctcctagtagccatgttgggttttttcccccttgttgggggtttttggtctcggtgtgtgcctgacttgtgggccagccgggtgtatatgcgcaagcaaaaaaaaataatagtactggtagtatctaagttcaacaaaatttgctccgtttgaacaaaagatttcaaaaactacagaaacaggaaaagcacagtattaggaatcgaatgttggaatcgaatgttgagtgtgccttgtttggatggttatgaaaggaaaaatattttttaaatgtttggtacc

SEQ ID NO: 9141 - DNA, 1562 bp, Oryza sativa
  ref <308>: DATABASE ACCESSION NUMBER: AK106489
  ref <309>: DATABASE ENTRY DATE: 2002-08-28
gtgtcagtggagctcgatcgatcggcgacctcccactacttacacggcgacatggcgacgccaccggcgaggcctcgtcggtaaccgtcatgaagcgcctctccatccgcggcctcctcgccggggctcgccggacccgccacgccgttgccgccaaggccaccgcgtccgtcccggctctcgtcgcgctcctcttcttcttcgccgccgccaccttctcggtcttctccctcggctccttccgttggcctggcgccgccgatgatggcggtgcggctgcctgcgacgccgcgctggcgcgggggcggggcgagtggatgcgcgacgccggcgcggcgccgtactacaccaacgcgacgtgcgggttcatccagaactaccagaactgcatgaagcacgggaggcccagcatggagttcttgcggtggcggtggcgtcccggtgacggcggcgaggggtgcgagccgctcgggccgttcgacgcggcgcggttcttccggctcgtgcgcgggaggtcgatgctgttcgtcggcgactcgctggcgagcagccacgtgacgtccctcgtgtgcgcgctgtcgcaggtggaggcgccggcgaggtcgcgcgacgcggcggcggggttcgagcactggcgcttcccggcgcacggcttcgccgtcgcctacttctggacgccgttccaggtccggtggcgcctgacgcgcggcccgccggaggcggtcggtccggaacggcagggcgaggtgttcgccggcccgagcgacctccacctcgacgagcccgacgagcggtggacgtccgccgccaagagccacgactacgtcgtcctctccgcgtcgcactggttcgcgcgccccgccgtgtactaccagcacggccgcgtcgtcggctgccacgactgcggcgacagcaacgccaccgccacggccattgtcaagcagccagagcacgcgcagcgggcggcgttccgcgccgtgctcggggcgctggcgcggctggacgggttcaacggcacggcgatcctgcgcacggtggcgccgacgcactacgagaacggcgggtggttcgacggcggggagtgcaccgcgacgcggccggccagcgagagcgaggacggggcggcgccggagatggcggcgacggaggcggagttctaccgggcgcaggtcgaggagttcgccgcggcggcggcggcggcggcggcgaggaacggcggcaagcgggcgcggctgaggctgatggacgtgacgcggatgatgctgctccggccggacgggcacccggaccggcacgggcatggcggcggcgagcacgacggattcgagatcgactgcctgcactggtgcttgcccggagcgatcgacgtgtggaacgacctgctgcttcagataatcgcatcctcatgacaacgctacctgacgtgacactcagcaaagcacagacaaatatggagcaatgtagatgaaaatttcccttggatttgcttttttttttttttttttttttggctttgcctcgttgagttgcggaatcagatgcttagatatattgatctgagt

SEQ ID NO: 9142 - DNA, 1064 bp, Oryza sativa
  ref <308>: DATABASE ACCESSION NUMBER: AK106490
  ref <309>: DATABASE ENTRY DATE: 2002-08-28
acttttttcccctctctctctctccttcttctcgggcagcggacggcgcgggtgggcggtggcgggcgtggtcggcggccacccaacggcccctgccggcgacctcctcggtgtgttcgggccttcggggacctccttggcaacgggatcttcaacttcgacggggagacgtgggtggcgcagcataagactacggccgggcgtgcgccgccgattctctcccaccggccgccgcgcgccgctccctaccaccggtccccgcgcgccgccgctcctctcccgccctcccgccggtcgccgaccctcacgcaccgccgctcctctccctccttcctgccggccggcgcacgccgccgctcctctcccgtcggccggtccgacgagctcacctccttcctcgcagagctcccgtcggccgccgtctccgccggcgcgacgcttgcgtcggtcgctctgtccgccggtacaagcaaacgaagaaaaggaatgcaaaagaaaacaaaaggatagatagaggagagggcgtccagcacgtcgaccggcatcaaggcgcgcaagctcgagctcgcagccggaagcggcaagagcgacgcgtcgtcgccggcggcggtgtccatgccgttgtgctgctccgctgctagcagctagtagctagccgcgcgtccctatgtcctccctcctgtgtagttccgtcgtcatcgacacaggctgccgcctcgccgcgagctatgcccccgttttgagttcgcaacatgcgacaagcaccaagaaagccggtggagccgagcaggcggcggcgcgcgaagacgataggaggagcagagcgggcggcggcgcgcggagcctataggaggaggttgagcagcggccggcccgcggagcaagatgggcagcggccgaagcgggctacaagctcgccgtgatgaggaagaaggggcagagccgagtggggagagggggatgacatgtggggcccacgtgggccccaccttattttttaagcatatatgtgggccccaccatttttagattaattattttttatgcggctgacatgtgggctc

SEQ ID NO: 9143 - DNA, 2201 bp, Oryza sativa
  ref <308>: DATABASE ACCESSION NUMBER: AK106491
  ref <309>: DATABASE ENTRY DATE: 2002-08-28
agaaaagggtttggatcagaccaacatgtggggaactcgttgatcgatatgtacacgaagtgcgtggagatggatgaggctgtcaaggttttcgagtcgttgcccagtgtcactattgtgtcttggaacatccttataactggatttggtcaagagggtagctgtgcaaaggcagtggaggtacttagcctgatgcaagaggctggctttgagcccaatgaggtcacttacagtaacttgcttgcttcctgtattaaggcaagggatgttcattctgctcgtgcaatgttcgacaagatatcaaggccaagtgtgacgacatggaacacacttttgtcaggatactgccaggaggaacagcatcaagatacaattgagttgtttagaaggatgcagcatcaaaatgtgcagcctgaccggactactttggccgtgatcctcagctcatgctctaaattaggaattttggattttggcaggcaggtgcattctgcttcagtaagattcctgcttcacaacgacatgtttgttgctagtggtctggtcgatatgtattcgaaatgtggtcagattggtattgctaggagcattttcaataagatgaccgagagagatgtggtttgctggaattccatcatttcaggcttgactatccattccttgaataaagaggccttcgatttcttcaagcagatgagggaaaatgggatcatgccaacagaatcttcatatgctagtatgataaactcgtgttctagattgtcttctatacctcacggcaggcagatacatgctcaggttatgaaagatggttatgatcagaatgtctatgtgggcagtgcgcttatcgatatgtatgctaaatgtggtaacatggatgatgcgcgtcttttctttgacaccatgatgatgaaaaacatagttgcttggaatgagatgatacatggatatgctcagaatggtcttggagacaaagcagttgaattatttgagtatatgctaactacagagcagaagccagacgctgtcactttcatcgccgtcttaacaggatgtagtcactccgggctcgtagacaaagcaatggcattctttaattccatggagaacagttatgggattataccattggctgagcactacacttgtctcatagatgcactgggaagagctggccgctttgtagaagtggaggccctgatacataaaatgccatgcaaagatgatcctataatctgggaagttctacttgctgcatgtgttgtacatcacaatgctgaattggggaaatgtgctgcggagcacctgttccgaattgatcctaaaaacccatctccttatgtacttctgtcaaatatatatgcgtctttgggccgacatggggatgcatcggctgttagggcattgatgagtaatcgtggagttgtcaaaggtcgcggatatagctggatagatcagaaggatggtgttcgtgcctttatggttgctgatgatcttggagcagatggtggagaactcaccatgtttagcaacgaagatagcattcctcaggtacaccaagatgagaattgtgtcggctgattcaacatgtggattttctgctgtcaaatactcaaaatgcactgataaatctaagcaaatggttgctgaatccagttgtgccactttggtgccatttgcttgagagccttcgaggattcattcttgtaatgtggtcaggggggcgtctgaatgatctgtggaagaatctggaaggcaaaatgatatatgttgcagattaggcgcaaagggacattacatgatctgttcatgtttgtcatatggctgctaagtgttgaatcctgatgggtggagagcctctggattttggaaatgcaaagagattccagccccaatatatgacagtaaagctaaatttatctggatgggccattggatgaaatgaaatagcttgtcagttcaaaacttcaattgaagaataaataaaagggtctagaattgagccatttttctttgcatccatgagcatgggctgactaataattagccaaaaacttgctgagtagagagtatttgtcttatagcaaaggacgataactttgtactgccactcaacttgtactggggagcagagatttttatcttctgtacctagtacaaatatcatttgctcagttgagcaattattaatcattttattt

SEQ ID NO: 9144 - DNA, 1298 bp, Oryza sativa
  ref <308>: DATABASE ACCESSION NUMBER: AK106492
  ref <309>: DATABASE ENTRY DATE: 2002-08-28
gtagagcaagcagcagcaagtactagatcatcagctaattctgctgctgcagctatgcatcacggctacgcttccttctcggattacctctacaactccccactcacacacttatcctcctcacctgctgcttactcctctcctgtcccttaccacgcaccaccacctcctcccatggcggccgccgcgcaggcacagctcggccatggtgatctgctgcccctccctgcacagccgctagggctaaaccttagcttccatggcttcaccagcgtcgtcgccgacgtctgcgacggcgacggcggcaagcagggtagtagcaccggctgtttggaaccttatcatccgctgctccaccagccgtcgccggcgtcctcctactccgtctactcctccccgtcggtgacgacgacggccgccgccggcggcggccaggacatgtcgccgtcggccctgatcaccaccgcggagaacaccagctcgcagtcgcagctggcggcggccgagatagccgacccgtcgctgcaccgggtgctggacgacgaggagatggcggccatctactccatcggggagcagcacgacatcgagtggagcgacaccgtcaacctggtcacctccgcgtggtggagcaagctcctcgacaccgtcgaaggcggcgccggcgcggcagcgtcggcggtggcggccggaggcgccgtgaacgcgtcggcggcggcggcggcggcggaggaggaggaggagctgacggcggcgcgcatggcgccggattggttcggcggcgacggcggccacctggttgagcatcaccagagcagcaaagagagcgggtctgacgtgctggggatgcatttcggcgagtactaccaccatggccatggaattgggagctacggcgaagacgtctccttgccgagaatggatctaggagaaattgaaggatggaatgccgagtggttctcatgatcgtcgtcgataatagggagagcaactcatcaaagttttgagcaggaattgctcccctttgctgacatgcatttcactgtcttaaataatgaaaacccttgcgtgactaagtactaatactgagagtcagaagatcaatgtcaaagattttgattatatggatcagccgtgcctttacttaacatgcatgtattagtgttgttgatgtatatgtgttctctgtctggcctaagttagcactacatcttggtaactgtagtttgtgatctgaacttctcaagcttataaaccaatataatgtgtaagatatatatatatatatagagttgcct

SEQ ID NO: 9145 - DNA, 646 bp, Oryza sativa
  ref <308>: DATABASE ACCESSION NUMBER: AK106493
  ref <309>: DATABASE ENTRY DATE: 2002-08-28
agtcgtctcgctcgccgttcgtccgcaacaaaccaaaccaacaacaccgaaaaccacctgcgattctgccgccgcacggccccgaggatccgaagcgagagaaagcgatggccccgaccgcatcgatgctgttcctgagctaccaccagctgcacaggcccgcctctgcggcggaggcggcgccggccagccggaggaaggaggcggaggaggaggggagtaatggcggcgcggccggcggtcgcgtccgggtcagcctgagcagcgcgctgtccctcctggcacggcggagggaggcggcgccgacgccgacgccgcaggccgccgcggcgaaggaggtgaccaggcgtggcggtggtggtggagatggcgtcgccggcgagggtgagccggaggaggcggcgtcgctggagcgtaggttcgaggaggcggtccggctcagctgctggtcttcttgaacatctaaattagctctttgcgataattgcatattatcccacatgtacataggtagtgctactgctgctagtgccaagcacatgcacctttttttttcttttttcttttgtttgctatgatattgccgctctgttcctgcatctgcatgttagcttgtacatggatgtataatcgatttccttttctt

SEQ ID NO: 9146 - DNA, 3723 bp, Oryza sativa
  ref <308>: DATABASE ACCESSION NUMBER: AK106494
  ref <309>: DATABASE ENTRY DATE: 2002-08-28
taatggtgccgaagcagaagttttgttacgaacaggaaaggatatatcacaatttcaaggattgccggtttttggtgtccttttcgcatcagctttaggtcaaatataccgcaagagacagcaatgggacaccgcagagggcgagcttaaatatgccagggatcttcttgcacaaaatgctacattcatttcgtgcaagctctgcaagttaactctggatatatcacttgatgtgcaagctggagatctattttggagtctatatgagaaagactttcagaaacagtcagcaggcaatttgtctaatgctctaggcatgtatcagtctgccctggataaactgaacggcaccaaattggaatctcctgttgactcatatgataagcttaaaactacttgcattatctgcagcaaatatgggaaagaaccattagctgcaaatgatggagtgttaccttcatgtactgtatgtgcaaattttagtcaggcttccggtgatcactcgaatgagtttacggcattaaaatttctgaaacataaggattctgaatgttgtccaccattggatgttaaagttaaaaggacaaccagaaattcatcacgtttagctaaagaacagaatgtggaagctcatgtaaaaactaggacgcgctctagtaagcgaactgctcatatgaaaggtgaaaaggcttcaactgagctacactgtaagaatggcctatcttgcagcgataatctgtccacagatactttggtccgtggaaaagcaaactgtatccttgatggcgttgaccagagcatagattacacatgcagtatatttggatgttggaattgcctttttgtgaatacactcaactctgggtccatccagaatattttgcaattcagatgggattgtgtttggcatcacaaccatgtgtctatcctgttaaaaatagcaaaagccttgggtgctcatggaggattgcatggagctcataaaattcataatatctattggcagtgcatatcattgttgtactttagatcccttcctcaggattgttatagaacttatgagcataatttatttggactaatcatggatcagagcactggtgattttcttatttcagagagggcagaaatattatatagtatgagtttgtttttgctcaagggcttcctttcagaacagtcaagggacatatgctgccgcttctgcagtgtacaaatgtctgatgttgttccttggttgctgaaagcttttgtgctgtccagagagaatccctcactttttcaggaggtttgcaggctacttgcatgtatattcttacttgcaacgattgattccacggctcaattacctttatactccagtggatctctctctttgaatcattgggctgcatactttcatcagaattctgttggaacctatctcgattgccagtacttcgctggcttaaaatcattactcagaaaaaatgactcgaaggccgctcttgaagatttttcaaatgcgtcagatgagagtctctcaaagtttttcaggttttcatcagcagacataggacatcttgagatacatataaaagaattcttccataagcttcctgatgtaccaattgtgtgcattagcatgcttgaaggtgattttgtgaatgttcttggggaaattcttcttctcccttcttattttcctgcttggatgatgctttcgaggtttgattcaacaaacaaacctattacaatgcttttgccagtggatgctatttctaaagaaacccaatatgaagattcctgtaccaaagaactggacaatctaatgagagccacagataagaattggcagtgcccttggggctacactataatagactacgtggctcctacttttagaaagatacttgaggagaactttatttccctctctagtgcaaccctcactctgaatgatggacaagcaaaccatgtaaagtggtggtcacatagaatgaagctcaacaaccaccttgataagatgctgaaagacatggaggaatcatggctggggccatggaaatgccttctcttggggtatgatttaactgaccaacacattgaggaagctctgacaaacctgattgctggtctggaatcagaattcaaatttgaagtaaatccagtgctcatcaaggtcatccttggtggtgctatgtcagtggatgaagtgcaggactgtgtttcccaacttatatcgtataaaggatattttggccgaggagggtgttgtgggaaagacagacttagagccttatcttcttgctgtattgagtctgaagctctggagacagtcgaatgcttaataaaaagtacagtgaatgagctgattgaaccagttgatagagatccagtcatttttgttctggacactaatgtgcagatgcttccttgggaaaacttgcctgcactaaggaatcaagaaatttatcgcatgccatcaattggaagtgtctttctagctttgactagaagtaataattattggaaagatgcccgtgttatagctcctccttttcctgtcatcgaccctttcaacgcattttatctgttgaatcctagtggagacctgagcagtacacaagaagaatttgatcagatgtttaagaactacgaatggaagggaaaggctgggtatgctccaacagctgaagagctggtgttggccttgaggaatcatgatcttttcctttattttggtcatggaagtggaactcagtatgtctctggaaaggaaattgagaaattagataattgcgcagctgctcttcttatgggttgcagtagtggaacattgcgttgcaaagggtgttatgctcctcaaggagcccctttatcatatttatctgctggttctccagctgttatcgcaaatctctgggatgtgtcagataaggatattgatcgattcagcaaagcattgctcggttcatggttgcaagagaattttgtagcggccaaaaattgctcgaagtgttgccagctaacacgagaatttgaatccatgaccattgctgtggagggtaatggcaggccgaggcgaagaggcacacgagggaagaagtccgaacgaatgaataactgtagtaagcgttgcacttgtggcaacaggcgagtagcttcatatttaagtgaagctaggcgtgcttgcaggcttcctcttatgatcggtggatctcccgtttgctacggtgtgcctaccatcattaggaaaaagtaactgccctgtgctcaagtgggagattttgggtgtccaatgcgcctcctggttctgggcattgagcaatcgatgacatgatggtgtatggcgtttgacagaagtgagcattcttggcaccgcattgcacgagctcgcatgtgcttgtgatgtttgtgatattcattcgccatctgggaatgtagatcaggcaagatggtgtgaattggcagatgccttcgatcgacggtttactagaagatctgctgtggaaatgctcatcgaccgtcgtgaagagatacaaatctttcttcttgcaagtatatacaagtaaatgattatattaatatatgctctgtagaattagttatgaacaaaattgtaatgttatgttacgggaaatcatttagagcatgtatgttgatgtcataaagtgtagggcacttcaacgatgaagtgtcgaactcaatgataatgtattctacagtttctatgtttggttg

SEQ ID NO: 9147 - DNA, 2033 bp, Oryza sativa
  ref <308>: DATABASE ACCESSION NUMBER: AK106495
  ref <309>: DATABASE ENTRY DATE: 2002-08-28
cagcaatgattagttggcatgaacagctaattttgtaacatctggaatgactcccactcatttttgtgtcaagcccacgtcataattactccaagcactccaaatgatggcttccataaataccatggaaagctccaaaccttacaaaatgtcatttgctttccacgacaatcagatttaccatttaagggcgatacctttatgtagaaaaaatttccgttctgttgaagttgacatggctgtaccagttgaaggtgcatgtgaaagtcagctgtatcggttgcagagaataatcgctactcggttgtctccatcaagttgagcatgcaaggtctggatcccacatgcaatcttagtgctagtcaaaattcacactttctacatagaattgtggaataagataataaccaaattgtgtcgatggatattccagttccaataaattaggctacaaactacctgtacctggttatacattttttgtgttgcatactgttacatattaagaatatgcagtccgggtttatcactggactaactttggtcaaggagcatcaaggtgtgatgcatcacccagttgctcactcaacaactgtctcaagtcccactgtccctttgaaactcttgtttccgaccatgcaattagatgccttggcccattgcttctcaaggcctcaaccacatactaagtgctatacaacttggtccctaccatgttaacccagccaggacgtctgaaataattgtcctaactggcgcggggaaaacctcacctatatcaggcacatgtatgtcccactttcccatgcctatttaccagcgggtgcacaaatacaatgtagattgatgaggtacctatgatgtgtatgattaaaatcatgtgtatgtgtgaagtgtagaactgtaaattaggcaactaatttccacagccagttcacgtgtccatgacactccatctgtcttgttccctgtcttcaatgaacaaactgcttattgtggtcctccttgctgtagtaccttccatcacctcacttgtgtgcctgaagggtgagtttctggcgcaggaggccaagcattctgccagacgcccgaggagccattccatctacttcactctgattttgtctaaacttttttattgtgctgtaaattaattactatcgcttgctaccgtaagtgaaaaaaaattctggttatgatcttttgagcgtctaactcatatatatgttctgattatttactgacaatgaattcgcagatagagagacttgccagaactgattctgactttgctccatttctacatcatgctgggatcccctgtatggatttatactatggaaaagaatttcctggatatcatacggctcttgactcgtatcattggatggaaaagcatggtgatccactgtttcttcgtcacgtggctattgtggagatttggggactactggcccttcgattagcagatgaccctgtgctgccttttgattatcaaacatacgcttcccagttgcaggagcatgcaaatgcattctctagtatgatggaaaatagcaaatgggttcatttgctgaatagatccattgaagatctttctgatgcaggcttagaatttctgaaagaggcaaagaaattacaggaccaaaatatatccgatgggtactctctgatgaggcggcgattgttgaacgaccgtcttctacttgctgaaagaagctttctgcaagctgatggacttcagggaagaggatggttcaagcatctgatgtactcgcctccggaggactacgaaagcaagctctcgtttttccctggggtggcggacgccatctcccggtcgagcaatcgaagcgcgaaagaacagcaggcggcggtgcggcatgaggtgcggaaaatctctagggcaatccaaagagcagctgatgttcttagaggcgaattcagtaataggaacgaatctttatactctagcctttctgtggctccataaaaactgtgtataaataaaatcgattggggtttgagaaatg

SEQ ID NO: 9148 - DNA, 2624 bp, Oryza sativa
  ref <308>: DATABASE ACCESSION NUMBER: AK106496
  ref <309>: DATABASE ENTRY DATE: 2002-08-28
aaaaaaattcgcccaaatggcgggggtcgtcgtcgtcgtcttcgtctccgatccccctctcctcatccgcctccacccctcacatcgccattgccactgtgatcactagggtttcgcgctgctcctccaggtaaggattcgctcgccttcgccgatgcggtggtggaagcgctcggtctccccttccccgtccccgtcctcttcgtccgcgtccgcgtccacgcccgcgtccccggcgcgggcctcgacctcccgcgttggcggcggtgtccccagccgccgccgggatgtggtggggtttggttggggtggggggagtgatccgcagccgcggttgaccaggcagaggcggctgcggcacgtcgacgacatcgaggtcggggtctcggcgctcgggctggattcctccccctcgcccgccgcgccctcgtcgtgcccctccagtagggattcggtggggttcggcctcctgaccgcgagctccacgccgatctcgaggaccgcgagtaacatggaggtggcgccgccgaggtcgtcgtcgtctcccgtgctgctgccgcacccgctgcccctgcccgatgagggggactcgccctgccgcggctccgggagatccctcccgtcgcccaagctattcgaaggagactgcaacgggtcggccgtggagtcgaacttgctcggggtttccgagatcgggagcgacagagcatcgttgtttccgagagtgatggctaagacggtgcaaaaaaaccctgagcatggtgacttgcgatcaaatggcacaaatgggattaactgtggacaacggaggaaggcatttaaagagaaattacaggataagagctcagctgaaacattgacattcagattgaacatacccgctaaaagtgctccaagcagtggattttcaagccctgtacagagtcctcgaagactgagtagtgtagactttttgtccactgcaacatccacccaaggtgccaatttatcgtcagcgcagtcagtctggtctcctgatctatatggatcttcacctcgttgtgcgtcacctgaaaaaattatgggtagtcaggagcgatctcctcgctccagtccattgagaagccctgttctaagatcaaaaaacccaagtgcacctccttcaccaatgcatccaaagttgttcccggagaaccatgtttctcgtcctgagggcaatgggagtgtaaatttccatccattacccctcccacccgcctctgtaagcccaaagcagacgaattttagtcaccagccagttccaaaagttgatgcaccctcaatggctggtcagtggcaaaaaggaaagctcattggcagtggaacatttggatgtgtatatgaggccgccaataggtatgcaaatgcattttatatagcattatgtttgctggatcatcttaaagtttgaacatttcatctggcatctaacgtacagacacactggagctctgtgtgccatgaaagaggtcaacataattcccgatgatgctaaatcagctgagtctctcaagcaattggagcaggtttggccttgtgttattagtatcagtttgtaagaacatagatgatggatgatgtttattctgcagtgatggtattatcaaatactattctctgatgtgtctgtttcccacaacagaataccttttctcttactttgaggattaaatattattattactatcctcaagtacatattagtttctagcatgcatatcacttttttgaacttggtcgtataatgttattgtaactctgcttgagtactctcctcttctataattatatctaaagattatgtaagttctgcccttgctctttttgactggatctcactttgtttcaggaaataaaatttcttagtcaattcaagcatgaaaacatagtgcagtactacggcagtgaatatgtaagttctcatgtgccaaattgaggtgatattatgcgctagttattaatgtatccaatgatcatctggatactttgcagattgaagatcgattctacatatacctggaatatgttcaccctggttcaattaataaatatgttaatcaacattgtggagcaatgacagaatcagtaatccgcagcttcacccgccatatacttaaaggccttgcctttttacatagtcagaagattatgcataggtaaccttttctcttttttctgtttcatttgtttaactaataatggccatctcactatgtgaaagttttcttgaacttaccttttgttcagctcttttagatggtctccttttattttttacatgtagagatttcttcatcctatttctgtgccattttggtttctattgtttgtttatgtttttgtgttttctcaagcttattttgtatttgtacccacattcatcttatagctgattcagatcccacaaatttaaaaaattggactccattttggattccagtagatttttgaattggctagaatatgattccaattcaaatatttatgtttggatgagtggaattataacaatgaatcaactcagaaaaaagtgtttggatgttgagattgggatcatagccagaatcctacctaggcattgcatcggatgcaaaatcaaagtaatc

SEQ ID NO: 9149 - DNA, 1682 bp, Oryza sativa
  ref <308>: DATABASE ACCESSION NUMBER: AK106497
  ref <309>: DATABASE ENTRY DATE: 2002-08-28
agcagagacgcgcggcgaaaggaaaaaaaaagaaaacaaaaaagaaaaacacgcgaaatggcggagcagtctcacgccggcgacggcggcggcggcggcgcgggctccggggagccgacgaactggaggaaggaggcggacgataggctgcggcggctccactccctccagttcggcgcggacgtcgcgctgaagggcaaggaccccgcgggggcgcaggtgctcgcgctccgcctcctcggcttcctcgactcgcaggccctccccggcgacggcggcgcggcgggccacgaggccagcttcgtcgcgcccatccgcgccgcggcgtcatccagcgtcgccgccgccatccgcgcccgcgccgggaggtcagacagtgctgtgtttaagcttgcagaaaaggaagttggttgtgtttttgcaaagacaggagaagttaatattgaaaagatcaagtgttcaaagtattttcaagcacttcttcagaaatccaaaggacatgctgctgaacaaatgaagaccactgattgccaagagtccaccattgaagaaggtccgcatgtagaggaaaactcaactgatatggaaaatgagaagcttagcatcagggcttcaaaattagtaatgcaaagaaaactaacatcactgcgtagccataagcccctgaaggcaaatgttgtacaagatgggaatatgttcaaatcagtgagtaacatatctaatgagagtgttgctgtcgaaaatggagtcagaacaaatcatactgataacaagtatactgcttatatggatcttgaagatgatgacagaccccgtggactgttgcagaatgcaaagcgaaagcatgcaggattcagaagcccaatctgcgaacatgcaaattctccattaagtaatgatgaagccgatgcccctgccaatgagtttgtgactgccaggacaaagttggagatggattctgtgcaaaagtatgggcataatggtactcaaggtgcttctgtatccccacaatgtgataacaacccaaataaccggaattatggtgtaaggccaacctggaattctcgtcgtggattacgtggtaattttgttcctcctatcagaaataatggaggatccacttccaatatgacctcacgggtcattggaaaaaatgatgattcaatgggagattcaacaagaaaatggtctgtatttccatcttgatcatatgataccatttgaatttacttttatcttcatgttattgtaacaatttacatgacatttacatagctatttatctcgttgcttttcttatgtttagcatgactacatcttttccttttttttctaagactcagatttattggtactagaagcaaagtacatgagatacatttctttgacttcattgccataatgtgttttttgttttgcaattgagatgactaagattatcactatcatattcagtatgattgcctttcttacatctgtttggtgatttggacactggtttgcattttttgctgggtatccttgttgtagacgttgctttaaagtcaatgtagtgtgttaaagaactaggtaaatttctggatggcaatattacctgttacttaacaatttcagaacaagagtatgaattgatcaagtggatatagcagcattagtatgataatagatatttgctaaatgtg

SEQ ID NO: 9150 - DNA, 1341 bp, Oryza sativa
  ref <308>: DATABASE ACCESSION NUMBER: AK106498
  ref <309>: DATABASE ENTRY DATE: 2002-08-28
ggtgcgaaactgttagtctgtcatgaatgatccgttcctcgggagacgtggtgcagtggacgaagcgcatctcggcgctggcgaggagcgggcgcgcggcggaggcggtggcggcgttcgccaggatggacgcggcgccgaacgcgctcacgctcgcgagcgtcctcccggcgtgcgcaaggctgggggacctcgccctgggccgggcgatccacgggctctggctcaggcgcgggggcggccacggcgccaacccgatcgtggacaacgccgtgctggacgtgtacgccaagtgcggcgccctcgccagtgcgcgcaggctgttcgacgaaatgccggagagggacgtgttcgcctggaccacgatggtgtggggcctcgcgaggaacggcagccctcaggacgccgtcgcgatgttccgggggatgctctccgacggcgacgccgcgccgaacgacgccaccgtggtcagcgctctgcacgccgtggccacctccggctctctggtcagctgcaagctgttgcactcgtacgccgtgaagcaaggtctcggaggcgagctggtcgtaggcaacgcgctgatcgacgcctacgccaagtgcggggacgcctggctggcgttcaaggtgttcgtcgagctcccggagacggacatggtttcctggggcaccatcacgcgggccatggccgtgcacggccggtgcagggaggcgctgcagctcttctccctgatgctccggcgcggggtccggccggacggcgccgtgttcttggcgctgctcaccgcctgctgccacgccgggcgggtggaccaggcgctgctgttcttgggcgccatggcgagggtgtacgggatctcgccgcggcgagagcactacacgtgcgtgctcgacgcctgcggccgagccgggcagcttgacagagctggagagatcttcaggcagatgccagcggaatacgacgccgagaaggcgctgggagtttactgctcctatgccgtatcgaacggcgttgccggtgtcgccggcgagcggctgccggagttgttcctcgacggagaagtggacgccggaggaggcacatacgctgtcgtgtccaagtcgctcgccgatgcagggaggtgggaggatgcgtgtgctgtccgggagaggatggccgaaagaaggattgaaaaggaagccgcttgtacctggattgaagtatagcaacaccctgcatcaccaccaaacattcagatccttgttaacttataatatgagtcgttgatatagctagaccgaaattacactcgtgtaaaagaaaaacatttgcaggtaaacaattcaagaggagattttagtt

SEQ ID NO: 9151 - DNA, 759 bp, Oryza sativa
  ref <308>: DATABASE ACCESSION NUMBER: AK106499
  ref <309>: DATABASE ENTRY DATE: 2002-08-28
ttcatcgccataacgccatggcgagccctcctgcggccagggcgaggtggagccctagcaggaaacagatcggcatcgatctcgtattcgacgtagcctttctgctcgtactggctcttcaccatctccgcgtccgcgcggatctccttctcccacttggccagctgcgcgtcgatcttcgcgaagcgatcctcctcctccttggagacgcccgtcacgggctccagcgggggagggtcgaacgacatgaacaggtcgatctgcggctgcgacatcctcaccgtcgccgtcctattcacctcgtctccggcaccggcagccgcagccgccgtcgatgaggaatcagcggccaccggcgccgccgctgcagccttcttcccttttcccctgctgctgttgcccttcttattctccgctgacacggagcccgaggacggcggatccatggttggctctttacctttgtccggcgaactcgccatagttaatcctcaaatccgatgcctcctactcctcctcgcttaatactcctcagatgtgtcctactcaaatccccttctatccggcttggcttggttttagagttgtttttttgttcgagcggagcggcggtattggggattttttaggagaagcagatcaccaaccctagaaggctagaatagccagccgatcggcttcttttctgagtcgggttggcatgaaccagaatttagcccggcccaaaacagaaagtcctctttcgactcggcctcctcc

SEQ ID NO: 9152 - DNA, 1261 bp, Oryza sativa
  ref <308>: DATABASE ACCESSION NUMBER: AK106500
  ref <309>: DATABASE ENTRY DATE: 2002-08-28
gaatttctacatttcttattttgctctggagagcagtctgaactctgaactctctgtatcatgcaccaacatatctttttcgttccaacaatttacaagcgtattgattatgattcagaagcacaaatataagagagaatttgtatagtatgtcagattcttgcaagatgccgctgccgcttttccaccgcaacatctctttgctgccactcgcggcaaacttttccgtaataaaaagtggggtgcaacctcgctgcacgcactgcagctcagctcacccccacagtccacgaccacactgcctcactgcagcagcagcagctacgatgccattgctgagctcgtggctgttccacaagctgcggcggaggagaagcgcggcgagaggagaacccgacgtcgtcgaagcggcgagcaagaagcagcaacctcccatggcggcggcggcggcagcggcgccgtgctcgccgtcgccgaacagggcgtcgtactacttcgcgagcagagaacgctgtctccctccggctcgcgccgccacggacaaccacaagctccgggacacccggttcccgcggagcccgcagccgaacgacgacatcgtgttcgacgtcgtcgccgtctcggcgtcgccggcgcgcggccagttcgacgggatgaaggcgatgccggagctcaagctgcggcccatcctcaccaagcgcgccaccgccaagaacgacggcgacgaaggtgacgcgctggacagcggcacgagcgcggccgcgtcgccgacgtcaagggtgcggcggttcgtccaccacgcgaagccgagcagcgggaggcggaaggggcgggtggcggcgctgccggccgacgctaccagccggaggcggcggcggcggcggcggtgccggtggctgtacgagagcctggtggtggtgaaggagtcggccgacccggaggaggacttcctggagagcatggcggagatgatcgccgcgaacgacgtgcgctcgccgcgggacctcgaggagcttctcgcttgctacctcgccctcaacgccgccgagcaccaccgcgccatcgtcggcgcgttccgccgcgcgtggctgcacgccgccgccgccacggcggcgccgccatcacctagcccgatcaagtgatcgagattattactacgtacgtaccagcaaaacgcaagattaattgctacgtgccctgtacagagtgaccatgcatgtgatgatcgaattcggtatgattaagatgatagtcgttgcac

SEQ ID NO: 9153 - DNA, 1923 bp, Oryza sativa
  ref <308>: DATABASE ACCESSION NUMBER: AK106501
  ref <309>: DATABASE ENTRY DATE: 2002-08-28
gctcttctgattctgcatattctaaagagaaaaatcccagagctgaagacgaaggacataaggatttggacctacagaaaaacaacaccaccaagaaggacaaacctgctgctgaaccaatagtagtcccaattgtgttgaggatgtctgattttgatcacaaggcattgctagaggaatggacagccaccagggcttccagggataattgtcttcctcaggatcatcgaaagcttataaacaaccttaagcttattcaggactatctttgttcttttgagtcgcaggggttgaccgttgttgacatttcagcgaactcattccctcagacactagattggcttcacagctatcttcttcagtgcatcgaacgtggccttttggctgcatgttcagaaagtcccaagcaaggtgggagctaacggatacagatgagcgagagggaagcccgcattagtcttgcttaacatatactcactctgttccaaaataaaccaacattgtacggatgtgccacatcctaatacatcttggacacaagtactagtatgtgtcacatcgggtttattttgggacagagggagtatgtcacatatatgatgcttgtaaaattgtgcttttagtggattgataatcaggaacttgtgcgttgccgccatccaaaaaaaaaaaaaaaaagcccctgtctcgcgcggcgcagctgcgaagaggagagaggagcgcgcggttttggcggaaaaaacgaagcatcggcgacgacggcgagcagatcagggcggctgcgattcgcggcggcggaggcgcaaggaagccactccccatcccccagccccacacgcagcaggtggcagcgtcccgtcttccacttcttcttcattcatctcctgtgaatgtgaatgtgatcctgtcctgctgcttcttccatttccagttccaccccttctctcttgtgcatgcttttgttcgtgcaacacccaacacccaacaggtggtggtggaatcaatcaaaccaatcaatcgtgcaagaaaagggaagaagggaatcaaaatcgattcttttttttttttttttgctttttgaagggaggggaggggggcgatcgacatggtgcgagcaccggcaggggcagatccaccaccattcctccaaacacgcatggacatggccgcctcctcctcctcctcttccctctctcaatctcactctcagtctcagacgcaggcgcacaaggtggaggaggaggagcacgccgccgacccaccctccccatcccgtaacgcctcctccaagtacgacttcgtcaaggtcaaggtgtggcttggcgagaatgccgatcactactacgtcctctccaggttcctcctctgcaggatgctcaccgtcaccaagattcctaatcatgttgccattaagattgccctcgaactcaagaaattgcttgtcgacaacagcctgcttgatgtttctcagagtgacttagaagctaacctattcaagctgatggagaagcggggatacggcgaggattatattaatcggtataaaatgatgaccagattccatcatcaaagagtaccactagtagttttagtgtgtggaactgcttgtacgggaaaatcaacaattgctacgcaactagctggaaggttgaatctaccaaatgttttgcagacagacatggtgtatgagttgctacggacatcaacagatgcccctcttacttcggtgcccgtgtgggctcgggattttgattctcctgaagagcttatcacagagttctgcagagaatgcagagttgttcgcaaaggtttggctggtgatttgaagaaggccatgaaagatgggaagccaattatcatcgagggaattcatttggatccaagcatttattttatggacgaggaaaagagagatgataattc

SEQ ID NO: 9154 - DNA, 1507 bp, Oryza sativa
  ref <308>: DATABASE ACCESSION NUMBER: AK106502
  ref <309>: DATABASE ENTRY DATE: 2002-08-28
catggtttgtggatgcatggatggttgccaaacatgcaagtaattttggttggtatcttagttgggcttcccaaattaaaaatatggtgaagaatttgttgcgacaggcaaatagggccagcaattttgacacttctatacttgagatgaacacacatgttcagaaacattcagcttatactcaagtgcatagcagagctgaggtagttactgttaaacctgaaacaaaggagctattgaacgctgaactctagtcctttgctatgcttgtcagcaacaagattgaggacaatgattttgtattgctgcttctgaaacatctcacttccttaagattgacagctaagattgcattgatcatgccatgggatctagctgaaagcgaaggacaaatttataaagcttttgggacagtacaagtgtgcaatataaatcaagagtggagctttgcaagttcaaaagtttatttgatatcgacttgcggacaagtcgaatttcaaggagaggggattgttaggatccgtgggctgtacgtgggccaattcagctgctacgcttacaaaggcccaatcatgtctatgagattaatacaaaaaaggcagcagcaacaagcttccaagatcgatcaatcagttggcaagacggcgaacggcgacagcgtcctggttctgggcttggaaccttggcgatctccttccccacctctcctcctacctccaaatcctttgcttagcttctagagtcttttagccccttgtatccttccaccttctacctcaaaaccttccactattgtaatagaaatcagtggcttcttatattggattcgcactgctacttctgagtttgctattgttccaagcgagagaactgggatcctaacataatcttgaccatttagagtcctaggttagggtcataatgacaagagggtcagaaaagggggaggatagagggggggggggagtcgttggttctattgggatgactgtgggtgttggaggactgacggtgggatgcaccatcggcgccgtggggacggaggagaacgatgggtcagcgtcggtggtaagggctaaacaaagcagttggtttggagctaggtggtgacagattatgcggtggagtacttaatggagacgtgaattaggggagggggggaggggctcgccggtgttgtttgtgccttctggccaaccaatgatgcttggtggcggcatcagtgctcgaggaagtgtgcgggggcaagctcgcgtcacacttgtgctgcgtgcggctagggaagaaggagaatgggaggaaaatgataagatcatattgttacgtacgaatcttaaagcatatagttgtccaaaatacgaaagacatgagctacgattttatgtcataagatatactcatctctagctcattcagtagtatagattaatgccctccgtttcacaatgtaagactttttaacattgcccatatttatatatatgctaatgaatctagacattattat

SEQ ID NO: 9155 - DNA, 935 bp, Oryza sativa
  ref <308>: DATABASE ACCESSION NUMBER: AK106503
  ref <309>: DATABASE ENTRY DATE: 2002-08-28
cggcgatctcccccggaatccctaacgccgggcacggccaaccaccgcctcccctcgccgcgccaccgcagccgcaagaatgccgaggcctcctcctcctcctcctcctggtcgcggggctccgggggccaggcggccgatgcgggagttcttcgccgcctggctatccaccctccgctcgccgctcctccccctgctccgccgcgcgctctcctcctcctcctcctcctcgtccggaggctgggacgacccgctttcctccgccgccgccgccgtcgaggcccacttccaggcgcactggtccgctctcgacgccgccgcccgccaggaccccgcccaggccgtctccgctggagactggcgctcgcctctcgagctccccttcctgtgggtcggcgacctccacccgtccctcgtaacctccctcctccggtcgctttcgccctccccgcggctcctcgccgctaccgaccgcgtcgaccgccggatccgcgcggccgtcccctcaatctccgaccgcctccgccgtgtccaggaggccttcatctccgccgaggtgtccggcgcggctgacgtggaggcgttcttggaggagctcaaggacgtcgccctcgatgccaacaggctccgtcgaggcgttctttcggagctcgtcgccgccgccggggggtaccaggcggcgctcttcctcgaggcgctctcgcgcttcgtgctttccatgcacgacccggaggtgctccgccgcttcgaccagtgccgcgcctctcccggtagttagtctcttcttgcctagctgattattccttattgctactttttttcccctttctgttgtgtaaaatcttgggtttcttggataggaattgatagtagtgatggatatccatgtaaaatcttttagagataatgctacaagtgaatgaaacaatatcgtc

SEQ ID NO: 9156 - DNA, 1508 bp, Oryza sativa
  ref <308>: DATABASE ACCESSION NUMBER: AK106504
  ref <309>: DATABASE ENTRY DATE: 2002-08-28
gtatagcaaaaacacatttccaacattcggtcttcactactagctagtagtgtttttttcctacatatataaacaataattattcattgacaggcatcaagctagctagctagccaactgtctgcaagaagaagaagaagaagaaggtgcaggataaatcgatgaagaaggcgtcgtcgctgtctgagctggggttcgacgccgatggcccgtcattcttccggcacctgacgctgaccgatggcgacgacggcacgctgccccggcggcggctgatcaagatctcggtgatcggcgcgggcaacgtgggcatggccatcgcgcagacgatcctgacgcaggacctcgccgacgagatcgtgctgatcgacgcggtggcggacaaggtgcggggcgagatgctggacctgcagcacgcggcggcgttcctcccccgcgtgaacatcgtgtccggcacggaggtgtcgctgacgaggagctcggacctggtgatcgtgacggcgggggctcggcagatcccgggggagacgcggctgaacctgctgcagcggaacgtgtcgctgttccggaagatcgtgccggcggcggcggaggcgtcgccggagtcggtgctggtgatcgtgtcgaacccggtggacgtgctgacgtacgtggcgtggaagctgtcggggttcccggcgagcagggtgatcgggtcggggacgaacctggactcgtctcggttcaggttcctcctcgccgagcacctggaggtgagcgcgcaggacgtgcaggcgtacatggtgggggagcacggggacagctcggtggcgctgtggtcgagcatcagcgtgggggggatgccggtgctggcgcacctgcagaagaaccaccggtcggcggcgacggcgaagaagttcgacgaggcggcgctggaggggatccggcgggcggtggtggggagcgcgtacgaggtgatcaagctcaaggggtacacgtcgtgggccatcggctactccgtcgccagcatcgcctggtcgctgctccgtgaccagcgccgcatccacccggtctccgtcctcgccaagggccttgtccgtggcgtccccgccgaccgcgagctcttcctcagcctgcccgctcgcctcggccgcgccggcgtgcttggcgtcgccgccgagctggtgctcaccgacgaggaggagaggaggcttcgcatctccgccgaaaccctctggggatactgccacgccctcggcctctaaattcattaattactacgccaacccgtttatatatgcccatatatatatgattaataatcgtcgtgctaatgcctatcgatcgatattatgcatcatcgtatatgtcggtcgatcgaagcttaatttcatggccgcccgggttgtaataagctactattctcattgtgtgattaattagctctatttctctgattgagctaattatgtgtaactgtatacacattgtgttcaaacaataatggaatgaataaaattgattgagac

SEQ ID NO: 9157 - DNA, 1228 bp, Oryza sativa
  ref <308>: DATABASE ACCESSION NUMBER: AK106505
  ref <309>: DATABASE ENTRY DATE: 2002-08-28
tttccagtacgaatacgaaccgtgagagcgtggcctatcgatcctttagaccttcggagtttgaagctagaggtgtcagaaaagttaccacagggataactggcttgtggcagccaagcgttcatagcgacgttgctttttgatccttcgatgtcggctcttcctatcattgtgaagcagaattcaccaagtgttggattgttcacccaccaatagggaacgtgagctgggtttagaccgtcgtgagacaggttagttttaccctactgatgaccgtgccgcgatagtaattcaacctagtacgagaggaaccgttgattcacacaattggtcatcgcgcttggttgaaaagccagtggcgcgaaaaataatccactgacttgaagcagaacccaaataagccacaggttgacgtaggtaaatggctccgaagcagaaggaggcagcgaacaagaagaagaagaagaaggaggtggcagtgttggtgaagaccaagaccaaggtggtgcagctcaccaccaccaccgcggagctggagctggagcccactgtcactgtgcaggtggacgacaacaagatgggtgcagctgcagatgagacgccgccggtggtgccgctgcagagccaagagacgcaggaccccaacgagcccaaggcggcggcagcgaagaagaagaagcgcgcggggcatggaagaaaaaggagtaggaggaggagaggcggtgcattggagtatggcgggtacaagaggtacgtgtggcgcgtgctgaagcaggtgcaccctgacttgggcgcctccgcccaaaccatggacgtcctcgacatgatgatggccgacatgttcgagcgcctcgccgacgaggcctctcgcctctccaagctctccggccgcctcaccctcacctcccgtgaggttcagtccgccgtccgcctcgtcctccccgccgacctcgccaaccacgccatctccgagggcaccaaggccatctctaactacctttcctaagctagctagtctctgtttcccttcttttaattgcttcagtttgcttagctcaacagagtatgtacgtaggatcgattaagtgcaggggatttgaagctttagttgtagcctctgtacagagctactagtagatcagtctgtaatctcccttgctagctaatgtgattgtgatgtccagtcagtactagtacctgtttgctgcttaattaccgtcctaacaat

SEQ ID NO: 9158 - DNA, 2377 bp, Oryza sativa
  ref <308>: DATABASE ACCESSION NUMBER: AK106506
  ref <309>: DATABASE ENTRY DATE: 2002-08-28
tcctcgccagttctgttcagccgcagatctccatcccgccagcagcggcgccggcatcctgcttccaccgcgtcctcgcagtagtagatagatctatttgcctggctctcagggaagagggtaggagtgtggcatgtcagggatcctcgcgtgggcggccgacgtggtcggcggggccggcgccgccaacgacgacgaagctgatgacgctcgggcggtggcgtccgcggccatgaccccggagcagcgcctccgtgccgctgacctggatgccaaggcagcatcgctgcggcgctcgatccacgacctccgcctccgggtgcccccgcctcatgtggcgcagcgcctgccgcacctccatgctcattccctcgcgtcctcagccgccctcgcgctccagctcaatgcccactcctccaccaaggaacaggtaaaccgtcgtttctttttttttcttttgccttcttattaattcattcagtaattctctactatgtaatcttcaacatcagagttaatcttgtatatgaaatacaatcatatgtgaaattacgatattttgaactaatttatctcgaaatgcacttgacaaagtataaaattaactcatgttgaagaatgcatcgttcatccctcctagggacaacatgatctttttgcatgggctaacaaagagcaatggatggaacccttacagtgatggcatctctgaatgggacaaactgtctcgtacgatgccattccctggaagttacatccgttgatggcatttccttgaatagtgcgcttgtcaatgacatttgtttgattttctctttgaactatggggataacttcacccctccaacacacacatttccattactagaaaatgcacttaagcatttccatctaataacagactcctgaaagacacatagccttaagcacttccaaagggcaaagggggagcaacagtagatgacataaaacagtgactcttagacgctgccaacacaaaatgaaacttatgatataaaaagaaccacatttaattcagcaatcaagctcctgcaattattccagccgagccggttgctatctccacccatacctcaagctgaagacttcagcagccacttgctttggcagcctgccacccttccgcattgcagctgacttgcgtttccctgcaatatctgcaatgacgaccaatatgagaccaaatgatacattcaatacaatatctcacaaggtcagtttgtcatgggctttgggccgggagtcctaggcacaatgggaacggtatccccacccctcatgataagtgcgtagctcagtttgatagagtcacggtctgttaggattaggttaagtagtcctccatgtatataaggagggatcctatctcaggtcagttaggcattagatcaagatttatcttagtgcccatcggccctgccttctcggtgcaacggagagcgtcgcgtcatttaggtccagggccattcccagttctttcctctgttataaccaaatctatttctcttcaccctatttcatccctaataatcctagcacgtgacagttggcatgatatttttaaaacatgatgtgttccctgttttccataatgactaaagaacagctatccaagcggcaactaatttctgcatttttttattgaactgtgacaaccaagatccaaataaatcactcaaagtatcaggtccgttacattccatgtgaatcttgctaggggacacttcagaaatagacagtagtgcaaaattagcattagttatcatctcttttccatacaatgctctaatacccttggtcaggatactcttttctagaatttaaccacataaccactttaatttgtaaatgtaatttgaacttccaatgtttgtcggagagtaagttgtgttcgctatagttttagttctttgtaaaaaaaaagatagtaaagtggccatttttagttaataatcaaactaatttatctttctggttattcaatagaatggtctgacataacacttgcaagtttctgccataaaattggcccttcaccataaagagccctcctaaatgtaaagggtttccatcctgcattcataacctttgcaatggtaacaatcttattaaaagatatagcatatagtagagagaaagtttgcttcagcgatcttccgccaaaccatttgtcctccccaaaactgtcagtatatatttcatgtgttccttgttttaagggttgcatgtacctctcaagttccaaatcaattatttcatgatttatttgattattttacttcaccttatttcatttttggtgtgatcttgaacatcttaaggtttccaatttttaggacaacaattcctgctatgc

SEQ ID NO: 9159 - DNA, 2102 bp, Oryza sativa
  ref <308>: DATABASE ACCESSION NUMBER: AK106507
  ref <309>: DATABASE ENTRY DATE: 2002-08-28
tgtgagtcgaggccgcactttggcgcccgcggcagagcccgcgacatgccttgccgcaccgcgccgaggcgtccaaacacacgctccgcccagcccagagagcccactcccgccgccgcgcgtcccatccaaacctccctccgcctccgcgtcccgccggccgccgccaatggaggcgccgccaagcctcccctaccgccacctgccgcagcatctcgccggcctcctcaagacccggccgctccacgacctactctccgacgcgtccacctcccgcgccgcacgccacctgttcgacgctgtgccgcgcccgacccccgccctctgcggcacgctcatctccgctctctcaaggctctgctcgcaccaggagcttctcgacgccttctcatcgcttcaccgcaggggctccgacgtcccgcccggctgtgtgcccctcgttgtgaagtcgtgcgcgatcttggccgcgtcacgtcagggaaagcaggtgcactgtcacgccattgtccgtggtctccttggggatatctttgtgcagactgctctggtggatttctatgcaaagaacggggacatggattgtgctgtgaaggtgtttgacgagatgccggtgaaggacccgataccgatgaactgcttgatcactgggtattccaagtccggtgatgtggtgaaggcgaggaggctatttgatggcatggtaagaaggacatctgcatcctggaattcaatgatcgcccgttatgcgcatggtggggaataccaggaagctttgaggttgttccgtaggatgttgagtgagggtgcaaggccaaatgcgatcactattgcgacgatgttttccatttgtgccaagactggtgatcttgaaacaggaaagtgggcaaggtctttgatcgcagagcaggatttgcagaacatgatagtgcacactgccttgatggaaatgtatgtcaagtgtcgggctattgacgaggcacgccgtgagtttgatcggatgcagcagagagatgtcgtggcatggagcactatgatcgctggttatgcacagaatgggaggccacatgaatctctagagctgtttgagaggatgaaggcaaccagttgcaagccaaatgaggtgactcttgttggtgtactatctgcctgtgctcagctgggctctgatgaattaggaggacagattggtagtcatgtcgagagccagaacctagcactcaccagctacctcggatccgcactaattgacatgtacacaaagtgtgggcacgttggcagagctcgcagtgtcttcaaccggatggaacacaaggttgtcataacctggaactccatgatgagaggcctagcactgaatggctttgcgcaagatgcaatcaccttgtacaaagagatgacagaggaggacgtccagccaaacgagattactttcgttgcgctgttaacggcgggcacccatgctggattggtagaccaaggtatgtcctttttcaaagagatgaagacaattcaccatgtttcccctcaagtggagcactgcgcgtgcatagtggacctcctctgcaaatctggaaggctgcgggaagcgtacaagttcatctgcgacatggaggtcgaaccaaacgcggtgatctggagcacgctgctgagcgcctgcagggctcacgccgacgtcgagctggccaagctcgccgcgagcaagctcctggttcttgagccggacaactcctccatctatgtcctgctgtccaacatctacgcggatgccggcctctggggcgacgtgagggagatcagggacctgatgaggagcaagaacgtgcagaagctgtctgcttatagttggatagagctggacggtgaagtgcacaagttcctggtgcaggatacgtaccacccgaaatcagctgagattttcaacgtcgtcgacggcatggggttgcatctggacgacgttgattctgaccccgatttatttgttctagagcactattgaacatttgaacatgctaacaaacaattgcagcagggcatccttcgttcactgcagattgattgtactttgcataatttatatacatgcatgatccatcgattcgatt

SEQ ID NO: 9160 - DNA, 1409 bp, Oryza sativa
  ref <308>: DATABASE ACCESSION NUMBER: AK106508
  ref <309>: DATABASE ENTRY DATE: 2002-08-28
tcagaaacagtttctttcgtcttcagttaaaaaaagaagaaggagaagaggaaaaattcagacagagatcgacatggagacgaaggtgaccgtgggcgtcgtcctcctgctgctgtgcctgtgcggcggcgccgcgtgcgccgccggccgcagcggcggcgagttctccattgtcgggtactcggaggaggacctggcgtcgcacgaccggctgatcgagctgttcgagaagtgggtggcaaagtaccggaaggcgtacgcgagcttcgaggagaaggtgaggaggttcgaggtgttcaaggacagcctcaaccacatcgacgtcatcaacaagaaggtcaccagctactggctggggctcaacgagttcgccgacctcacccacgacgagttcaaggcgacctacctcggcctcacgccgccgccgacgaggtcgaacagcaagcactactcgtcggaggagttcaggtacgggaagatgagcaacggcgaggtgccgaaggagatggactggaggaagaagaacgcggtgacggaggtgaagaaccaggggcagtgcggcagctgctgggcgttctcgacggtggcggcggtggaggggatcaacgcgatcgtgacggggaacctgacgtcgctgtcggagcaggagctgatcgactgcagcacggacgggaacaacgggtgcaatggcggcctcatggactacgccttctcctacatcgcctccaccggcgggctgcgcacggaggaggcgtacccgtacgccatggaggagggcgactgcgacgaggggaagggcgcggcggtggtgaccatctccgggtacgaggacgtgccggccaacgacgagcaggcgctggtgaaggcgttggcgcatcagcctgtcagcgtcgccattgaagcatccggtcgccacttccagttctacagcgggggtgtgtttgatggtccatgcggtgagcaactggatcacggtgtgacggccgttggatatggtacaagcaagggccaagattacatcatcgtgaagaactcatggggcccacattggggcgagaaggggtacatccgcatgaagaggggcactggcaagggtgaaggtctatgtggcatcaacaagatggcctcttaccccaccaaggacaactaaactcctactactaaataactcaattgaatcaacacatgaggatcatacatatgatggtccttcaaagtttctctcttctcctcttgttttattagcctttaattccactgttttttcttctttccaaagatttggaggagagagagagagagagagagagagagagagagagagaagcacaagctgtttgtttgtattcgattttcttttgcgcgctttgaaatcatcgatgaaataataaatgtcagaagcttctttt

SEQ ID NO: 9161 - DNA, 1803 bp, Oryza sativa
  ref <308>: DATABASE ACCESSION NUMBER: AK106509
  ref <309>: DATABASE ENTRY DATE: 2002-08-28
tcagggcgccgccgccgccactcctacccaccacctgtttctcactcagtcccagctcgatctcatgcagcctcctctcgccagccacttccgtcgccatccctctgcggcggtggcggtggcggtggcggtggcggtggcggcgaggcgattgaacccgagcgaatcgtcagcagcagatcgaggcgccgtgcctgggtctcgtcagatttccagcccagcaaggcaaggcccaaggacctaaactgttgggctgttggactcgatcaagtcagtatatgtccagggatgcggcggcccgaccacgctgcttcacgtcgggcccacctgtccgtcccttcttcggcttgaaaactccccgcatccgcgcgctcaacgtcctcctcctctgttctctcctcttctctctcgctgcgccaaggatcaagaaatcccttgccagtcgccgccgtccgtctcctcctcctcaacaccaccacaccttcggagccgcagctcatcggcggctacctcctcttcttgggtgtcatgcccctgccggcgactcccgcctacggcgccgtccatctaccgcgccacaccggtgtctccatggacaccagcgctgaggccatcttcgtcggaccatcaccgcctgttacggctgacatcgaggagtccttaagtgattacacaagtatgatggagggttggactaaagagcatgtattggcagcacgtggtcttcgtaataaggttgcgcctattcgtgttgaggccatgcgcctagggattgctgctgacagtgctggaatcacatgttttttggatgcttttgatgagtgtatgaagcgagttgatctgcatctagttactcagaagaactcatttcaagaatttcttggtagtccactacagcaaacagttccagacacttgtgcgattgtctcttccaccaagtgcgtagaggtacagcatagaagggagtacgagactatgcacgggactggctccttcccctgcaacgccgcggccccccgcaagctgcgtagggcctgcttctgccagaaggtgtggaagccgaaagaaggagctcgagtgggagatgtgattgatatgatacagaggttaggtggagcgaggacgacaagcgcaccagctccagcgccatatatgctgccagtgcgctcgtggcagcggcaccggtgggacgttggtggtggcctgactgcggaccgcatcgccgagcttcttgacacacgcgggcctttcattggaaccatatgggtatgcccatggtatgatttgttcaactcggttgaagatgaagatctggtttacaggtcaggctgtgcacggagcaagatgcttcagaggttgagcaagttctgttttggaaaggatctcgtcggccttcattcagtgttgtgctttgaataccgcatctgcgacggacaactccacatacacatcttggataaccacgagaccactggaccgcagcgatggattcatcactccgagttggaggaggtgcataccatcactgtggagcggatcaatcatcttggtgaccgccacatcaggtatccacacagcggagtgtcttgacttggagtgtctttgttcgttttcgttttcgttctcactcgaaaacgaaaaacaacaaaactcacgccctcttgtgttgcgccttgtatttgttactgattcttccttttgttaatgttcttgtatatatactccgtatatcaacttccttgtaaccatatcactacatttgtcatctcctcgagaaaaaaaatattctagactatgaccacc

SEQ ID NO: 9162 - DNA, 1441 bp, Oryza sativa
  ref <308>: DATABASE ACCESSION NUMBER: AK106510
  ref <309>: DATABASE ENTRY DATE: 2002-08-28
aacaaaagatattcgaaatccatcccccccccaacaaaacccgtctcccatccaatcccccgatctctctctccccccacacaacccatcggcggtgatcgccatggcgaacaagctggtctcggagatgcggctacctccccacctcgcccacatcctcgccgcgcgccgcctcaccaccgccaaggacgtgctgtcgctgccggaggtggagctcatgggcgtcctcgacgccggcatccacaccgcccgcgccgccgtcgcccacgtcagcgagatcgcctgccctccgtaccaaacggcgcttgcgctcctcgaggccttcagggcaagaggagatgggcggctggccaccacgctccgcggattggatgaggcattgcatggaggaatccccgcagggaagctcactgaggtcgttgggccctcggggattggcaagacccagttctgtctgaagcttgctttgctagcaacattaccagaatgctatggaggcttaaatggtcgagttttgtatattgatactgaatccaaattctcttcacggaggatgatcgagattggtgagaaaagctttcctcaaatatttcgtcaagaaggcttggcccaaaagatggctgggaggatcctagtcctgcgcccaacatcattatctgaatttaccaagagtttggaacagatgaaggtgactcttcttcagcatgatgtgaagctacttgttgttgatagcatggctgctcttatgtcatctgagattgagaaaagcgcaacaggtctcagacaacaccctctaagatgggccctttcatttcttaaatctatagcagagttctcacagattcctgttgttgttacaaaccaagtacgcagccaaagtaatgatgatggctatcgttattcatttgaagttgagaagaaatacgatagtaataatgctgaaggctttgaatctcatcttgttgctgctctaggaatccagtgggctcatgctgtaactatacgtctagtctttgaggctcactcaggtcacaggtacatcaaggtagctaaatcccctatgactccagcggtagcttttccctttactgtggagtcatcaggaataatattacttagtgatgagggcattgatgtgccatctcctgaaataacctcaatccgttgtcaaggagaaaatgtcctggctcaatgaccatttgaatgctaccacatctacagttaaggaaaaccaatttaatctcagcgcactctgcatcaacttcagaagttatgttgcataccatgtatatttatttagagagtagcttaaattgtaagtaatctaggaaagagtgtaatagcataatctttaatttttgctactgaattgcattccgactgtaatagacagttaccaatccatctttacgtaattattatggttaacatcattaacttc

SEQ ID NO: 9163 - DNA, 1407 bp, Oryza sativa
  ref <308>: DATABASE ACCESSION NUMBER: AK106511
  ref <309>: DATABASE ENTRY DATE: 2002-08-28
aagtcggcggcgagggtttcgtctccttctcgccgctttgtcccgcgctgttcccctctcgtttcagctccagcacgaaccgcgccgcggcggcggcggcgagagaggcgtctcttctccgagcatggccaccaccaccgcgccggaggacgcgccgtccgcggccaagggggctaaaggagaggcgaagaggaaacagagcaactggcgtgggggaggaggaggcggcggcggccgcggcgacgggggtcaggggcagaagcggaagaggaaggaggtattcgtctacgggaactacaggaactactacggctaccggattgaccgtaatgttgatgaagaccctcgtcttaaaatatttaagagagagtggtttgaaagcaaggattgtcttgatattggatgcaaccagggtttggtaacgattggtctagctgcgaaatttaaatgccaaagcattcttggagttgatattgattcaggtttgatcgaaactgccaactggaatttaagaaggatgtctcgactggataaggtggttgtagaaaacaccaaggctcacaagtcatcagattcaccgtctgaaagctgtccggaaaaagtggcacctgagatatcaaatggggatatttctaatggcagtcatcatgatatttttaaagttgtttcctttcgtcgcgagaattttgtggacagcatgtgtacaagttcagaacagtatgatacaattgtttgtttgagtgtgaccaaatggatccacctgaactggggtgacgatggcataattactttatttgtgaagatctggagacttctaagaccgggtggagtttttattatggagcctcaaccttggacctcatataggagaaacagattggtttcagaggttgccaaagagaacttcaataccatcctaatacatccagataaattccgggagatacttctagacaagatcggattcaggtcggtagaggtggttacggacaaactggagggcgctgttactggttttgaccgcccaatcgaagtttaccacaaagtgatgggaactggatcaagttcttgacatttcctgccaaaggcatatgtggtgcttcagatgtgcagcttgttttagtgggattcattgagctccatgacgctttcttccattcgacaaacttcaacgatggcgccctcacataccgctggatttgcatttgcagaagactatttgaacgcccaaggaatgagatgggtagattggaactgttggtacgtcctctttggaagttttgacattttgtaggatgatcgatcggtttccaaaaaaaaaaaaacattttgtaggtcgaggcagttttgcctgtgtaaatgaatggtggatacgtacgtatgaaaaatattgttcctcgaggaaag

SEQ ID NO: 9164 - DNA, 1462 bp, Oryza sativa
  ref <308>: DATABASE ACCESSION NUMBER: AK106512
  ref <309>: DATABASE ENTRY DATE: 2002-08-28
aaaaacaaaaaaaaccgtgagccgcggccatcctccgcaacgaaaaaacagaacaaccctagatccgcgtcccacgccccgcgccgccctcggccttctccctctgccgcgtcctccaccgccgaggcgccgcctcctagccgccgtcgctgcgacccgcgccaccctcgaccgccgacgcgggaggaggacgtcacgccgcgccatcaccgccgaggcgccgcctcctcgccgccgtcgctgcgaccactcgcttgccctctaatcgtgacaacagccaaagaggaatatacgcccaccgcctgcgccgattcctcgccgtcgttctcctccggcctctcagccaccaccaccaggaaggagacgccgccgcctttgctgattcctgctgccatatcaagcgaagcctcatcgccgtccggtcagggacgccgcctcgttgtggccaacctacccttgactggaagcgtcgccgccggttcaagctcaggttacataggccggctccaaccagaccagagtcgagtcaggctggccatggccatggccatggatgccttcggctccgtgttcggcgaggccaagccgccggtgacgatacggatgcgacccgtcctcttccacgcccacgcccacgcccatactgatgatgtctcccaactctgcctcctcgccaccgacctccactcccacgcctgggaccgctccctcttcctctccgacatcgacgatctcagagacgacgtcgggatcggcggctcctgctccgacttcctggattacctcaaatcttgcctctcctctggggaagtcaacctcctctttcctcacaatgggcttgatcgcgttcatcttgttgctacaaaggcaaagggtctacctcgcatcaccatttccctcaacacccttactcactccgcgctgaatgatgtcattgccaatttctcactatcactctatgccgcttttaggactacgcaggaccatgcatccagagaacaagagcgagcgtcaaagctgatggagactctatcatctgaaaaggaaaagaatgaaataatgcaaaagcaactcgaagctctttcttttctagacaaaagaaaggcaacaaagccaaagctggtggccaatcaggttccaagtgtgtctgatgtgactcagggctctgatcaggttattgttccagcacagcagcaaacaccagtagtttcacctatcaaagttcctccagctaaagccacgaagaggatagcctctgtatctcggagggcgagagtgcgaggagctttgttgcaagatactgaggaagatgtcgaagaatagtcagatattgccttttctctgtattgattagttacaaacttctaaagcgtgagtgtgtggtttgttagttttggggccatttttacttgtatcaaatctatgaaatcaagctaatgcatttattgacacaaacctgctc

SEQ ID NO: 9165 - DNA, 1776 bp, Oryza sativa
  ref <308>: DATABASE ACCESSION NUMBER: AK106513
  ref <309>: DATABASE ENTRY DATE: 2002-08-28
acatcaacatagcctcgagctcttcctctctctcctgccatggccggcgttgtctaccaccagccgatctcctcctccgttgcttcccttcctattcccttttaccataggctttgcctcactccggtgattccatttttcctatttcccctctcctttagccacttccacaagccaccaacggcaccaccaaagccggccggagctgagctcttgttgccgctgttccagccatcctcttttccccctatgctttccaccgacctccccggatgcgcagcgagcgggaacacgcttggccgccgccgtcgaggccgttcaaccaccgaagcaccggcgccctgtcccttttcctctctgttgttgctcgggagaagaaacagaaggaaggagaggaacgggaggaagaagagacatatgacaagtaggccccgctgcacagtaaccttcctcttttatttgattttaattcaatttcaatctttagacacccatatctttccaaccacaaatccaatcccaatgagactttgacctaaattcatataatttcaaactcttcgttttgataccaaatttcctatttttaaaattttatttaaaattctttatttaaaaacccttttccttatttatttatttactttctaattttaaattattttaattaacctttaaaaattattttaaatttatttgatttactttacatcccctttaattttgaatttcttgttttatttaaaaacctttttaaattttaattatcctttaatttttaaatgcaccttttttttaccattttaaattttatttctttaatctatttaaaaccccttttgtgtttaaatttctttgatttatttaaatactcattttatttctaaaccattcccaaaccatcccttagccactaaaaatccgctgttggaattttacgccttctctgaagacgttcgcgtggtctcaaaccccgacgtcaaaccgttggctgtaaaacccggcataacttaatcccaatgtcgaagtgtcgctcttcgcaccccacgcctcaatgcttacagtggtcagagcctcactactccctcgacatccacagcacaccagctttcgagctctgtgtgaccctagccgctctactatcactcacaactgtagagtaacactattccgtaaacctgtacaaaattttcccaactcactagtcgtgatggttgaccatagcatcaactagatgagccaaatatttagccgttatgctgtccaaccttagcatcggctaaccagttcaaatatctagcaatcgtgctgctcaactctagcactgactagaaaccaaatccaccaaacaaaccccacctatccaaattatctatttccccgatttcttttgttttcaaattaaaatttatttcgaaccattctttttcctctcgccttgctccaattttatttattccttggttttatcgtttctttgtagcaatttgcttataggctttatttgccatctttttcatattcgtatgttagaccgtacagcgagttctatcggcatccaaggagctgacgtggacccaaatggctacgctgaaaccatgggaaatcttaaggcgcaaggcaagacataactaaaattttgatcatatataaaacttgatataatcttcatatttaaatttgatgcataatatcttactcttttaacatctgatgggtagatgttaaatgcttttaagcatgattacatgatattaataagatacatttgagatc

SEQ ID NO: 9166 - DNA, 2457 bp, Oryza sativa
  ref <308>: DATABASE ACCESSION NUMBER: AK106514
  ref <309>: DATABASE ENTRY DATE: 2002-08-28
ggacgcgagacggaaatggggcggagagagtagcgcgtaacccgcaagctccacgccaccaccaccctccccgaatccaatccaagccctagcgccaaccgccgccgacgaggacgccaaatccctcgatctcctcctcctcctccgccttccgcccccccaaaaccctagccccggcgggaggaggcggcggcggcggcgggggtgcagatcttaggatgtcggactccgcgtccatggccgccgccatcgaggcgcggttcagcggccgcgacctcatcggccgcggctccttcggcgacgtctacaaagggtttgacaaggaactgcataaggaagttgcaataaaagttatcgatttagaagaagctgaggatgacattgaagacatccaaaaggagatatctgttttgtcacaatgccgttgtccatatataactgactattatggctcatatcttcatcaaacgaaactgtggatagtaatggaatatatggctggtggttctgtcgctgacctactccaaactggccctcctctagatgaattgtctattgcatgcattctgagggacttgttacatgcagttgaatatcttcattcagaaggaaagattcaccgtgacattaaagcggcaaatatcctcctgactgaaagtggagatgtgaaggttgcagactttggtgtttctgcgcagctgactaaaacaatgtcaaggagaaagacatttgttggaactcccttttggatggcacctgaggttattcaaaactctgacgggtacaatgaaaaggcagatatctggtcgttaggtataactgctattgaaatggcaaaaggtgaaccccctttggcagatatccatcccatgagagttcttttcatgatacctcgtgaaaatcctcctcagcttgatgagcatttctctaaaccgatgaaggagtttgtgtcactatgtttaaagaagaatccagcagagaggctaagtgccaaggatcttcttaagcaccgctttgtaagaaatgctagaaaatctccaaagcttctggatagaataagagagcgaccgaagtttccagtaaaaagcagtgcggatgccacacaaaatggtcgaacacatgttgaagaagatgatggtactggtactatcaaggttgagagggctacaagggatgtagtctctccttcaagtcaaggaactgttaggaaagctgctggctggaatcttccagacagatcagagggcacaggaactgttcgaggtggtttaaagccatcacaagtcacctccaccaaggatagtagatccgatgcttctcatagtccaaacacaccaaaacgtacagctgatcgagaaaatcaatggagaacatcatggacggggtctgaagagtcgatctcaacaaacccgtcgcagagagatgcacaaagtgaatatggaagactagagagttctacagaagataatgaccaatctataagtgggtctggaactgttgtactgcgctcgccaagagcatctcaggtgtaccctgcagctactaaccacagttccaagcctcccagtagattctcctcgtatgaagacacgtctatcagtgggacagtcgttcggaatcaaattgaagaaccagaaactccacgatcttcaaggtcgagactgggaatccaagaaaagtcaccaaatgcttcactggaggacagtgcaactaaccttgcagaggcaaaggctgctctccaggctgcgtttaaaaagggtaatgctcgtgaaagacatgttatcagcaaacatgaaaaggaatcacatgaacccagaatttcggcagtaaacagtcatgatgccccaagtgagaatgctgacatggaaaaaggtcgcaaaccacgccaggtacatgatggacaatcagctcctcaagcttctggttctgtatcttcacctgcactctcgtcattgataattccttctctaaaagaggctactggtgacaagtttaacggaccagttgttcatacattccttgattccttgatgcatctcgaaaaagagctacctggatcttgtgaggtgctgattggcagaatgctccatcggctagggagctcgaaggagtcctcgctgcaaagtcttcaagagacggcgacatcagttttcgcaaagaaatctgaacctccctctgaacctccaagtaacaagaaaatggctaatacaccttccttggctgcccctaccgtaagccctttggcgaggttccttcttacaaggtttgtttagagaaattgtttcccttttcttattattgctttcccacaacaaagagtgagttgatgccattggtgcaggtggcaaaaccaagtttcccaagatcttaactccgtctgaagacaatacaaaaaaaaaaaaacccgtcatgattcaatgtataattaattttgagtgtacataacgctatggttag

SEQ ID NO: 9167 - DNA, 3151 bp, Oryza sativa
  ref <308>: DATABASE ACCESSION NUMBER: AK106515
  ref <309>: DATABASE ENTRY DATE: 2002-08-28
ggaagagaagccaggagataaagcctgttaagtttctttcaccgcttgatacaacagatgttaaaaaggaggttgagtctccaaccagggagcgtatatcttcctggaaaccttttccatcacctgtcccaaaaccccctaaagaccctacccctattaaagaggaatcacctaataagaaaacagatacaccccctgcagttagtagccaggctgaattgaacagtccagtggaatctacatcacatcaatctcttcctcccaagcatcaacacaaaacttcatggggtcactggtctgaccagccaaatatttctgaagaaggttcaataatgtgtcgcatatgtggagaatatgtccctactcattatgtagaaaatcactcagcaatatgtgcaagtgctgacagatgtgatcaaaaaggtgtaagcgttgatgaacgtctaattagagttgctgaagcacttgaaaagttggcagaatcttatacacaaaaagaccttccaaatgctgttggcagtccagatgttgcaaaagtatcaaattcaagcatcaatgaagaatctgatggcccctctccaaaactctctgattggtctagaagaggctcagctgatatgcttgactacctccaggaggctgatagcactatttcactggatgacataaaaaaccttccttccatgacatgtaagactcgttttgggccaaaatctgatcatggaatggctacatcttcagcaggaagtatgacccctagatctccactaacaactccaagatctaatcacatagacatgcttttagctggccgaagtgcaattaatgagagcgatgatcttcctcagattgttgaacttgctgatattgcgcggtgcattgcaactactcctctagatgaagaaagggcactctccctattggttacctgcatagaagatctgcaagaaattgtcaatcgtaggaagcatgaggctctcacggtgcagacatttggcacacgtatagaaaaactccaccgggagaagtacctactgctttgtgattcggttgatatggacaaagttgattcagcgagtactgtaatggatgaagaagatgatgttgtccgtagcttacgagctagtcctgttcacccagtcaaggatcgtacttcgattgatgacttcgaaatcattaaacctatcagccgtggagcatttggacgtgttttcttggccaagaaaagaactacaggagacctctttgctataaaggtattaaggaaggcagatatgattcggaaaaatgctgttgagagtatattggctgaacgtgatatcttgattacagtgaggaatccttttgtggttcgtttcttctattcttttacctcccgggaaaatttgtatctagtcatggagtacctgaatggaggggacctgtattctctactgagaaatttagggtgcttggatgaagatgttgctcgtatataccttgcagaagttgtgctagctttggaatatttgcactctatgcacatagttcatagagatcttaaacctgacaacttattgatagctcatgacgggcatataaaggttggtctgatcaacagcacggatgatctatctggtcctgctgttagcgggtcttcgttgtatggagatgatgaacctcagatgagcgaatttgaggaaatggatcaccgagcacggagacaaaagcgctctgctgtcggaactcctgattatttagcaccggaaatccttttggggacaggacatggtactagtgctgattggtggtctgtgggtgttatactttttgaattaattgttggaatacctccattcaacgcagaacacccccagacaattttcgacaacattctgaaccgcaaaataccttggccacatgtcccagaagaaatgagttctgaagctcagggtctaattgacaaattattgacagaagaccctcaccaacggctaggtgcaaatggcgcctctgaggttaagcagcatcaattttttaaagacattagctgggatacccttgctaggcaaaaggctgcctttgtcccctcctcagatagtgcatttgacacgagctacttcaccagccgttattcttggaatccatcggacgaaaacatctatgaagcatacgaatttgaggattccagtgataatggaagccttagtggcagcagtagctgtgtgagcaatcaccaagatgatatgggggatgagtctagtggcttcactgagtttgaatctagctcaaatgtcaactattctttcagcaatttctcattcaagaatctatcacaacttgtctctatcaattacgatttgctcaccaaaggattgaaggatgatccaccaacgaaatctgagacgtagcagttcgtgttatatcggaatttattcatttgaagtaaccaaacaatttacaaggtgctcgcgtggtgtagatcttgtacatatgaaagtgtgaggcatgggcttgttcctattgaggttgttcctacatttcgcggagccgagtacagttttgatgttgcttgttttcgaacaattcccgtgtcatcatcgatgaaacatccttgaccataagttggaatgcgtcacctaggagcgctgtttttttcccttctcttaccgcacttcatcggccttgggtgccaccaagatttggtcaaggttactgtatgcaaatagaacccttgaagatgtagatggtctgagcaatttttcattgtggcatgtgattgggaatgaccgaatgaagttcctgtcatctcggaggtatccctgtactcggaactatcaacacttcaaaataccattcactgggtataaatctggttaaatagcagtgctcaaattttctcggggcaagtatactgctctgtttggttcgcttggttagtcaatggattcactgtatctttaccaatcgagggaactcgggagactgcgcggtcttgagttcttttctcgtagagaatggtgaatgcctaagttttgcagtggaggtggctattacgtctaatttcattcctgttaacaaccaataaattatgaggtaatatgtataatgtaggtttgctactactccctctgtcatataataatataagggattttgagtttttgcttgc

SEQ ID NO: 9168 - DNA, 1508 bp, Oryza sativa
  ref <308>: DATABASE ACCESSION NUMBER: AK106516
  ref <309>: DATABASE ENTRY DATE: 2002-08-28
ctctcctgattcccttcgaccgaccgccaccatcaacgggcgacgccgcgccgtcgacccaccgcccgccggcccaccgccccgggccggtcccgtcgttctccacccgcggtccgccatcgacgccgcgtgatcggccgtcagatccacagctccggcatcatcccggcattttgttcttcccccaacagcacatcgtgacctggtggggcatcgtcgccatcggtcctccggccggcggcgatgaagtcctcggtttccccttcttgtctttgggactggcaagcagcggagcattgtgaaagcaatgctgcaagtcatgatgtttctagattcatgtgggactgcctcaatcaagatgatgatgacctactgggattgctgggcaatcaaactcctctaagagactgtcgtggcttctttgatattgatgatttcacctgcaaggagacgttggaccttgaggaatctcgggaatcaaagcgccgccgcatattggagtacccttctgagtctaatcaatcagaagatggaaatcgtgaaataagttctaccttgggcacatctgaggtatcagaaatttcattgctttgcaccgatgaaccgcagagcttcaattgggattcacagaacaattcaaataattttgattctttgtcaactggagcattctaccaatcatcacatagtcattcgaaaaattgctctgatgaaaatcaaatgcatttcaggcatgaccaaatgcattctagccaggagagcgttacatataccaatgatcaaagtggtatttcaggaactactgagaatgattcagtgacagaaagtcttgtaatgcaggagactaggaagctttctacacttaaagtatctaaaggagcctcactggttaaggcgaagcagaatttaactacaactatagcatacccttttaccctcatcaaaccatcctgggaggaaggagacgtcatcactctgaaggatataaatcagcgaatccgtgctcctccgaagaaggctccagaaaccctagggacttcagccttctctggcaagccagtcgttggcaaaacaaggatcagaactgacgggggcagaggcagcatcacgatactaagaacaaaaggttgagagtccaaacaacttgtttctcagccattacctggattgctttcagcaatttgatctccgtagctctccagtttttcgttttgatttttttttttttggccatggatttggtatttaggatgactatcaatggctaactcttcaaagatttaccattcatcctgtgtacattagcgacatgcggctaatgttatatatgagagttttgtgttcagaaaccatgcccctctactcatccaacttatgtcggatgttgttcagggttttctcccatttttctgaatagttgtccattctcgaatggacgcgtgtaatcgtgaaacatttgattattttgttgcttacaatatatagcacacatacaggggagtttatgt

SEQ ID NO: 9169 - DNA, 1817 bp, Oryza sativa
  ref <308>: DATABASE ACCESSION NUMBER: AK106517
  ref <309>: DATABASE ENTRY DATE: 2002-08-28
aacagcaaccaacaaacacacgcgaagaggcacacatctccgccttcgtgttcctcttcttctctcctcctccccccatccatccatctatcgcaccacctcccccgaaaaaatcccaccaatacctcatcgccttcgtccccttcctcgcttccacgccaaaagtcgttcgcttttccctcccttccttcccccccgtctccttgtgggttttgggaggggtggttcctcgaggtgtaggtgggtggcgcgctggcttcttcttggccgcgagggttttaggaggtttcttgagggttttggagtggtggtggtggaggattggagttggggtctgatgcgagtggagtgatgatgatgtggcctttggagatggaggaggggtttgtggctctcaagaggacggagcatgtcgaggtgacgtccttggcggtggcggtcgaggcgacgccgtcggcgaaggggggaaaggggaaggttgtggtgggtggtggtggcgccggcggcggcgttgggccgacgagggtgagggtgttctgtgatgacttcgacgcgacggactcgtcgagcgatgaggatgaggaggaggtgaccgcgcggcggagggtgaagcgctacgtgcaggagattcggttacagcgcgcggcggcggtggccgtgccgccggtgaaggtgaagggcgaggaggtgttcccggccgcggtgtcggcgaagatggcggaggccgcgaaggcgagggtggtgttggcggctgggaggaagaggaaggccggcggggtggacggcgccgagccgcggttccgcggcgtgcggaggcggccgtgggggaagtacgcggcggagatccgcgacccgtggaggcgggtgcgggtgtggctcggcacgttcgacaccgccgaggaggccgccaaggtgtacgacacggcggccatccagctacgcggccgcgacgccaccaccaacttcaaccagtccggggactcggcaagcctcgacgtcccacccgaggtcgccgagcgcgtcccgcagccgccgggggcgtccaagaacgcctccccggccacctcctacgactccggcgaggaatcccacgccgcggcggcctccccaacctccgtcctccgttccttccctccctccgccgtcgtcgcgaccgccgacacggccaacaagaagcagccgccgccgccgcctctcgtcgtccgcgagaccgacgagtcggtcgacgtcttcggctgctccttctccgacgacggcggcttcgccggcgagctcccacctctctacaccgacttcgacctcctcgccgacttcccggagcccccgctggacttcttgtccaacctccccgtggagcccttctccctggctcccttctccagcaacaatgggtcaccggacctccacctcgacgacgccccatcgccggcggcggcacaagtggacgacttcttccaagacatcaccgacctgttccagatccccgtcgtctagtgcagcagcaagaactgtaaaacaccggattaggagactaatccggcccaattttgtttgcgttttctctttttttttttcttctttattttttcgtttttagaggagaggagagttgagttaatgattccccgtcagtctagctgcggcagaacacccaccaccgcttcgtcaggggggaaagccttgacgaggcgagagagatgagaaagtcaaaagagaggcataaaacgagatcaatgttgttggggttatggtttttttgtaaaccatcgagaaaattaagttatcggtaattagcaaatactactactagtatcatc

SEQ ID NO: 9170 - DNA, 2434 bp, Oryza sativa
  ref <308>: DATABASE ACCESSION NUMBER: AK106518
  ref <309>: DATABASE ENTRY DATE: 2002-08-28
aaaaaacgcgggctaaattacggccgccaccattccagcgacgacagcgagtgaagtgaactggaggagctgtaccactgtgtacccctagtctttaaagcctcagctcgcgcgcggccggccaccacctccccccacgcaggcgccacacagcgtcttggctcacccgcacacgcgatcttgttggtagcgagtcggagaagatgagctcgccggtgcatggcgtgcaggagcatcggcagagcggcggcggcgagaagaaggcggagcagggagagaaggaggcggcggcgaaggtggagaaggtgccgttcctgaagctgttctcgttcgccgaccggtgggactacgtgctgatggcggtggggtcgctgggcgcgtgcgcgcacggcgcctccgtccccgtcttcttcatcttcttcggcaagctcatcaacatcatcggcctcgcctacctcttccccaccaccgtctccggccgcgtcgccaagtactcgctgttcgcgctcggcgtcacacaggcgctcgtgtcctactacatggggtgggagaccacgaagcgggaggtgcgcaagatcgcggtgctcttctgctgcggggccgtgctcaccgtggtgttccacgcgatcgagcacctcagcttcggcatcatgggggagcggctcacgctgcgcgtccgggagaggatgttcgcggccatcctccggaacgagatcgggtggttcgacgacaccagccacacgagctcgatgctgtcgtcgcggctcgagacggacgccacgctcgtgcgcaccatcgtcgtcgaccgctccaccatcctgctgcagaacatcggcatgatcgtgacgtcgctcatcatcgccttcatcatcaactggcggatcactctcgtcgttctcgccacataccccctcatggtcagcggccacatcagcgagaaaatgttcatgaaaggctacgggggcaaccttggcaagtcgtatctgaaagccaacatgctggccgcggaggcagtgagcaacatccgaacggtggcggccttctgcgctgaggagaaggtgataaagctctacgccgacgagctgaaggagccagcgaagcagtcattccggcgaggccagggcgccgggctcttctacggagtttcccagttcttcctcttctcttcctacgcgttggctttatggtatggttcggagctgatgagcaaggagatggccagcttcaagtcggtgatgaagtcattcatggtgctgatcgtgacggcgctggccatgggggagacgctggcgatggcgccggacatcatcaaggggaaccagatggtgtcgtcggtgttcgagatcctggacaggaagaccgacgtcctgatcgacgccggcaacgacgtcaagagagtcgagggcgtgatcgagctgaggggcgtcgagttccggtacccggcgcggcccgaggtggtggtgttcaagggcctcgacctcctcatgaaggccggcaagagcatggcgctcgtcggcatgagcggctccggcaagagcaccgtgctctcgctcatcctccgcttctacgaccccatcgccgggaaagtcttgatcgacgggaaggacatcaggaaggtgaagctcaagtcgctgaggaagcacatcggcctggtgcagcaagagccggcgctgttcgcgacgaccatctacgacaacatcctctacgggaaagacggcgcgacggaggcggaggtggtcgacgcggcgaagctggcgaacgcgcactccttcatcagcgcgctgccggagggctaccggacgagagtcggggagcgcggcgtgcagctctccggcgggcagcggcagcggatcgccatcgcgcgcgccatcgtgaaggacccggccatcctgctcctggacgaggcgacgagcgcgctggacgtggagtcggagcgcgtcgtgcagcaggcgctggaccgggtgatgaggaaccggaccaccgtgatggtggcgcaccggctgtcgacgatcaagaacgccgacgtcatctcggtgctgcaggacggcaagatcatcgagcagggtgctcaccaccagctcatcgagaacaggaacggcgcctaccacaagctcgtcagcttgcagcagcagcaacagcagcaggaccagatgcagaggcattgatcttgatcgatctcctgtgcttctgtatatttgctgtgtgcctccgcttcttcttggttgttaaggagtacagtacatggaatgaaacaaatcgctgcggtaagattcaattatttttccattgtaaaacgaggggttcacgattatgtacaagagaaagtattggatttgtttctctttttctgtacaagttaaataactgaatttagtagatacgcgattacatttacataagcagattcatggcaaaaaaaaaaaaaaaaaaaaac

SEQ ID NO: 9171 - DNA, 2644 bp, Oryza sativa
  ref <308>: DATABASE ACCESSION NUMBER: AK106519
  ref <309>: DATABASE ENTRY DATE: 2002-08-28
agatccgccgttgccgcggcggcctcggcagctcggtctccccccgctagggtttcgccgtctccgatcggaggggcgcagcgatggatcagagcaggcgggcggtggagtcgtactggaggtcgcggatggtggacggcgtcacggcggacgacgacaaggtggcccccgtctacaagctcgaggagatctgcgagctcctccgcgcctccgacgccagcgtcgtcaaggaggtcgctgacttcgtcctcaagcgactcgacaacaagagccccgtcgtcaagcagaaggctttgcggttgattaaatatgctgttgggaagtctggtactgatttcaagcgggaaatgcaacggcactcagcagctatgcgccagcttgttcactacaagggacaccctgaccccttgaaaggggattctcttaataaggctgtccgtgaaactgcaaatgatgccattgctgctattttctccacagaggaacctaaacctgctgttgcaacagaaggtcttggcaagcgcatacagggttttggaaatactaattttgagccatcaagagatgacaaaaaatctttccttagtgagctaagtgaagtagtgggcattggcagtgcttccattaaacagggtttgagcaactttgctgcttctcattcatcaatgataacaaatgataatggtggtccgtacaagagcccaaaccttcgtaggtctctgaccacagaaatggataaatatggcaggtatgatccaagtgaaattcaaggcgagagccgttcttcatctggtgcttcaaagaatgttagttctggttcatggggtcctagtccatccagttctgcaccaactgatgatactggttcaagtcaaacaggggttaagactcgtgaagagagacttttagatacaattgcaacttcaagtggtgtgcggttgcaaccaactcgagatgctctgcaaatatttctaacagaagctgccaaattggacgcagttgctttgagccgtgcccttgagaacaaattgaattctcctttatggcaggttcgcatgaaggcaatttgtgtattggaagcaattgtaaggaaacaggatactgatccttattcaatcattacttcatatttctgtgagaacagtgcatctgttgttagatgctgtgagcttccgcacgtttctctcagagaaaaggcttcgaaggtcttaaatctgctggttggggaacaacctactggaagcaataatttttcagaaacaaagacaacagtacctgctgcacagatgcctgatttgattgatacaggggatcaagatgacccaggagctcaaaattcagctcaggaaggtagcgagaggataatggggaatagcatgtttacttcttcggttgatgatttgctgggtggtgaacctattgctgatataagtaccaccaccagtaatggtaatggaggtgatccgtttgcagacgtttcattccatgagacagcagatactaaggatactaacgacctattctcggggatgacggtagaagaaaaggcaacagcagccttgcatgatagctcatcaataaacaaaaatgaattgtcagatatatttggcagcagccctgagccattcttccaagaaagagtaggggataaaggaaccgtgaatgatttgatggctggtttgaaccttaatggaactgcccaagctcagcctgggattaaaacagaatctaacaatactgtcaatgtttcacagctctttgacatgaacagtcagacaacaaatgtggctaattctgcagcaatgactggtattcttggccaaagcttttatcagcaacagcaggttcccttgcagtacaacttgccatcacagatgctgttaaatccagcatttgctgggcagcaattaaactatggtgctatgagtgtccttcttgctcagcagcagcagctgctgcaaaatctaggaaatttcaatgctgggttgggacattcgtctttgaatgcaatgaacagcggaaatgcatctgtgcttcctgatatcttcaattcaagtaaccaacctcaacatgttgctgtgatgagcaactcaaagaaggatgaaactaaagcttttgattttgtttcggatcatcttgcagcagctcgtggttcaaaaaagtaacccgagagcgatgggtatgttcagaatgtagcaacaatgcatttgtttggcttcacgcaaacttcactcgtactccatcgattagctggatcaatctcaggacaggttttgcatgttgtgctgcaacagatgacccaagaaagaaagaaaagaattcacgacgggggattgtgttgtatcatgtatctagacaaatgtcgatttttatgttgaaataagctgtacttatcttctcagtttcttttgatgccttgccttttttttttcttttaaagagtcggacattgtagattgttctcgggcgggattttgtttttgctgctgtacaacagcatatttggttcttttgacgggaattgtaaagcttgctacgttaataacaggtgccatacgggaataatgatgcctcttgaaccatactgctcacatgttgagtacattatatctacgaactatctgcattgtgcagattatgaatt

SEQ ID NO: 9172 - DNA, 2732 bp, Oryza sativa
  ref <308>: DATABASE ACCESSION NUMBER: AK106520
  ref <309>: DATABASE ENTRY DATE: 2002-08-28
gaaaacagatacaccccctgcagttagtagccaggctgaattgaacagtccagtggaatctacatcacatcaatctcttcctcccaagcatcaacacaaaacttcatggggtcactggtctgaccagccaaatatttctgaagaaggttcaataatgtgtcgcatatgtgaagaatatgtccctactcattatgtagaaaatcactcagcaatatgtgcaagtgctgacagatgtgatcaaaaaggtgtaagcgttgatgaacgtctaattagagttgctgaagcacttgaaaagttggtagaatcttatacacaaaaagaccttccaaatgctgttggcagtccagatgttgcaaaagtatcaaattcaagcatcaatgaagaatctgatggcccctctccaaaactctctgattggtctagaagaggctcagctgatatgcttgactacctccaggaggctgatagcactatttcactggatgacataaaaagccttccttccatgacatgtaagactcgttttgggccaaaatctgatcatggaatggctacatcttcagcaggaagtatgacccctagatctccactaacaactccaagatctaatcacatagacatgcttttagctggccgaagtgcaattaatgagagcgatgatcttcctcagattgttgaacttgctgatattgcgcggtgcattgcaactactcctctagatgaagaaagggcactctccctattggttacctgcatagaagatctgcaagaaattgtcaatcgtaggaagcatgaggctctcacggtgcagacatttggcacacgtatagaaaaactccaccgggagaagtacctactgctttgtgattcggttgatatggacaaagttgattcagcgagtactgtaatggatgaagaagatgatgttgtccgtagcttacgtgctagtcctgttcacccagtcaaggatcgtacttcgattgatgacttcgaaatcattaaacctatcagccgtggagcatttggacgtgttttcttggccaagaaaagaactacaggagacctctttgctataaaggtattaaggaaggcagatatgattcggaaaaatgctgttgagagtatattggctgaacgtgatatcttgattacagtgaggaatccttttgtggttcgtttcttctattcttttacctcccgggaaaatttgtatctagtcatggagtacctgaatggaggggacctgtattctctactgagaaatttagggtgcttggatgaagatgttgctcgtatataccttgcagaagttgtgctagctttggaatatttgcactctatgcacatagttcatagagatcttaaacctgacaacttattgatagctcatgacgggcatataaagttgacagattttgggttgtctaaggttggtctgatcaacagcacggatgatctatctggtcctgctgttagcgggtcttcgttgtatggagatgatgaacctcagatgagcgaatttgaggaaatggatcaccgagcacggagacaaaagcgctctgctgtcggaactcctgattatttagcaccggaaatccttttggggacaggacatggtactagtgctgattggtggtctgtgggtgttatactttttgaattaattgttggaatacctccattcaacgcagaacacccccagacaattttcgacaacattctgaaccgcaaaataccttggccacatgtcccagaagagatgagttctgaagctcaggatctaattgacaaattattgacagaagaccctcaccaacggctaggtgcaaatggcgtctctgaggttaagcagcatcaattttttaaagacattagctgggatacccttgctaggcaaaaggctgcctttgtcccctcctcagatagtgcatttgacacgagctacttcaccagccgttattcttggaatccatcggacgaaaacatctatgaagcatacgaatttgaggattccagtgataatggaagccttagtggcagcagtagctgtgtgagcaatcaccaagatgatatgggggatgagtctagtggcttcactgagtttgaatctagctcaaatgtcaactattctttcagcaatttctcattcaagaatctatcacaacttgtctctatcaattacgatttgctcaccaaaggattgaaggatgatccaccgacgaaatctgagacgtagcagttcgtgttatatcggaatttattcatttgaagtaaccaaacaatttacaaggtgctcgcgtggtgtagatcttgtacatatgaaagtgtgaggcatgggcttgttcctattgaggttgttcctacatttcgcggagccgagtacagttttgatgttgcttgttttcgaacaattcccgtgtcatcatcgatgaaacatccttgaccataagttggaaggcgtcacctaggagcgctgtttttttcccttctcttaccgcacttcatcggccttgggtgccaccaagatttggtcaaggttactgtatgcaaatagaacccttgaagatgtagatggtctgagcaatttttcattgtggcatgtgattgggaatgaccgaatgaagttcctgtcatctcggaggtatccctgtactcggaactatcaacacttcaaaataccattcactgggtataaatctggttaaatagcagtgctcaaattttctcggggc

SEQ ID NO: 9173 - DNA, 2715 bp, Oryza sativa
  ref <308>: DATABASE ACCESSION NUMBER: AK106521
  ref <309>: DATABASE ENTRY DATE: 2002-08-28
agttctcgaggcttctgtttcctcgtctctcgtcgtcgtcggcggcggcggcggccatggaggacgacgacgagtgccctcccctcgccgtcgagctctcgccggagaagccgtacagtcctccgccgctcggtccctccgcggcgtcgccggtcggagtcaccgtcatcactggctacctcggcgccggcaagtccacgttagtcaactacattctaagtgcgcaacatggaaagagaattgcagtgatattgaatgagtttggagaggaaattggggttgaaagagcaatgatcaatgaggggcaaggtggcgcgcttgttgaagagtgggtagagctggcaaatggatgtgtttgttgcacggtgaaacacagcctggttcaagcacttgagcagcttgtgcagagaaaggagagaatggatcacatattactagagacaacaggattggctgatcctgcacctcttgtctctattctttggctagacgaccagttggagtcatcaattaaactagactctatcattacggttattgatgcaaaaaacttcaggctgcaaattgatgagcacaataagtcatcatcattccctgaagcatttcatcaaattgcatttgcggatgttgtgatattgaacaaaattgacctagtagaaggcagtcttgaggatttggaaaggcagattcatgaagtcaacgctcttgttacagtggtgcagtctgtccgctgccaggttgacttaaataaaatatttgatcagcaagcatatggtgccaaggtcaatacctagctcgaaacttgcattttgttatttctttgtattcaatgcagaggaatctgtctttgattttgtttttggacaaaaaaaagactaactttgattagttaattgattaagtatgacatcaattagtcatgtcaacatatgggcactaaatctagtcatgccaagacatggaaactaagttattctcaggtcattaaactctatggcacttcttaacaaaagctcgaatcattcagcacgaaaaatcagtgttggtgagacgttttttcagcatctgcttgctcatgctaactagcaatacagaaatttgcttacttgcttttggtacttattttgtagttattgcttttgctggcgatggcaccttgtgctcaacaaaatctgaacaccttattcagggatttgattctgacatgtttttaatttattttccatagaattcatcgcagctgcaagaacttctggagtacagtaaatcagtaccacctaatctccgtcatgataacagtatttctaccttgtgtatttgtgagcaggatccaatttccctgtctaaggtactcttccattagagttttttttaactgcagttaacatttagaaaacatttcccttggacaactttgaaagggtatttattcattaatcttaaaaacatagattttggttgacaactacatcattgggatttgggatatttagtttttttttctgtactcacccattgttctgttagtactttgaagtacatgctcttatgtttcacctacttttctaaaatatgtcttcacattccatactgcttaggttgatttgaaaagttacaatgaacaagtgattgcaagctctacactcacttttcctggttgatgctacagcaacaactggaaacattatttgattaatattgccccttgaagtcttcatgttgagatagatgtgttatatgtcatgatttcaaagatgatcatttattgggatctgtgaaggatgctccatattctgctctactatagagaagagtagaagtctgtttaatattcaagcacatacactgcatttcctaggtttctccgttcatgaccaatgaacaccgatatacaattgtgagatatatgcatttttgtttgatttaatttgttctgaaggtggaatcatggctcgaggatcttctttgggaaaggaagttggacatggatatttatcgttgtaaagggattttacatgtccataactcggatcaagttcatacattacaggttgttgcatcataaaaagtattctcaagaatcatacattatgagttttcaaacaaatattatcccacctgtttgctctcatgcaggcagtgagggaagtttatgaagttctgccagctcgagaatggtccaagacagaatctcgcacaaacaagatagttgtcataggtcgcaacttggatatcaatatccttcaagattcatttagtcgttgcaagcactgatatcgaagggtttgttcatcctgtaccctgcacctccatgcaatcaaatactgcaaggagtttctatggctccccgaagtaatgtgctttatgtttgtctgtatatcttcaaaggtgacagtgctgacagcttcttggcaatgaagttctgcacaacggatgcgattatccgacgcgccatgttcaactttggaagaggaacatgcatccagttacaagatgatgaactacttgtagaagattttagttaagagtagtatgcaaactgatgatcggcaacatttctcgttgtatggaactgaccgaaagcaatctttttgtaagaaaccgattggcaacaataacatactgggagttgaaatctgatcctcaaattcatgtttgtaagtttgccactctcttgcaaaatgcaaaacgcagctacgtgctgccaaggttctt

SEQ ID NO: 9174 - DNA, 1794 bp, Oryza sativa
  ref <308>: DATABASE ACCESSION NUMBER: AK106522
  ref <309>: DATABASE ENTRY DATE: 2002-08-28
ggatgcggcgcacaagcgcaagcggccggacgccgacgacgacggcgctgcgggggcggtggacctctcctccctggagggcgccgacgacgtggaggtgctcgacctccgcgccgccaagcgcctcctgctcgccttcgagcgccgcctgcgcgacaacctcgaggcccgcatgaagcaccccgacgaccccgcccgcttcgccgactccgagatcgccctccacgccgagaccgaccgcctccgcctcctcgccggcgccccggacctcctcccggacctcgtccccctcggcctcgcctcctccctctcctccctcctcacccacgacaacgccgacctcgccgccgccgctgcctccctcctcgccgacctcaccgactccgacgaccccgacgacctcgccggcctccactccctcgccgacgccctcgtcgaagccaacgccctcgacctcctcgtccacaatctctcccgcttctccgaggccgaccccgacgaagccgaggctgtccaccacaccctctctgtcgttgaaaacctcctcgagctccgcccccaactcgccgacattgtctgcgaccgcaccaagcttctccgctggctcctcgcccgcctcaaggcccgcgagttcgatgccaacaagcagtacgcctccgagatcctcgccatcctcctacaggacagccccgccaaccagaagcgcctgggcaacatcaatggagtcgacggcctgctgcaggccgttgccatgtacaagtccagggacccaaagacctctgatgaggaggagatgctcgagaacctcttcgattgcctctgctgtgtgctcatgcccatggagaacaaggaaagatttgtcaaggcggagggcgtcgagctcatgatcatcatcatgaagcagaagaagctggcatacagctctgccatccggaccctcgattttgccatgactaggttcccacctgcttgcgagcgctttgttgatgtacttgggctgaagaccgcttttgctgcgttcatgggtaagattcctgtgaacaagaaaaacaaaaaagagagttatcaggaagcactagaagaacgggtcatttcactaattgcttcattgtttggtggtattacaaaaggttcacgaagaatcaggttactaggaaaatttgttgagaatgaatgtgaaaagatagaccgtttgatggagttttacacaaggtattcagaaagagtgaaagctgagactgaaagacttgacagtcttgatttagatgatctagagatggatgaagatgagcgctacaatcgcaagctagaagctggtctttacacacttcagttaattgcacttattctggggcatatatggcactctggcaattcacagatgagaacaagaatagagttgcttctaagacagaacaaactgacgaaggatgacgttaaggatatacttgaggagtatcatgacaacattggagatctggatgggcctgaagagaaggaaagagcgcaagggcggacaaaagagatcatagcatctttatctttgtgatgcgtactctattttgcgtcatcaccagtccaccaccctgtaaccaaaaccaatggtgttgtagctcctctcatcttgacaagacggactatcatatgatgacttgtgcgtagcgttggttgcgttgcagggtattctttttgtaaactagtaatataactagctgggtggcccgcgcaattgcgcggctagcattcatacataattatcggtttttttacatataatattacttaaaatttgct

SEQ ID NO: 9175 - DNA, 1236 bp, Oryza sativa
  ref <308>: DATABASE ACCESSION NUMBER: AK106523
  ref <309>: DATABASE ENTRY DATE: 2002-08-28
acgatcttctagaagcgattcgcgcgcgccgccgcctcctcccctccccttccccggagcgaagccgccccgccgggggggatgtcgccggcggcggacagcgcggcgtcgaagcggcaggcggagctgctcaagcaggagggcaacgccttcttcaagaaggaccgcatcagcgccgccatcgacgcctacaccggggccatagctctctgcccaaaggttgcagtatattggaccaaccgagcactttgctacaagaggcggaatgagtgggttagggctgaggaagattgtagaacagctattcagcttgacagccactctgttaaggcacattacatgctcgggcttgcacttctcaacaaggacgaattggccgagggaataaaagaactagagaagtcgttggagcttggaaggggtgcacatccagcaagttacatggttgaagagatctggcaagagctttctaaagcaaaatacatagaatgggaaaatttatcaagcgaacgagtccgtcaattgcataagctgaaggaagcatgtaaagaagctcttaggaattataacagccttgacaatcctcctgcatatgtccccgaggaacagctaaatgagcttgaggaagtttttcggaatgccaggaagtctgatattccaacagaagtacaacctgcctttgacactgcttacttccgtgccctgactggcttaatctgaaaagaaaagaactattttatatgcaggttcctgatcatctctgctgcaaaattactcttgatattttcagagacccggtgataaccccaagtggaatcacgtatgagagggcggtgattcttgatcatcttcatagggtggggaagtttgatcctgtgacccgtgagacacttgaaccacaccaactggttcctaaccttgccatcaaggaagctgtccatgcatttttgagtgaacatggttgggcttacaggatgagatgactactttgaattacacctgggcttggagctttggaggcaacatttcagattgcaatatacatgtttcggttagtcaacttaaatgtgtcattttgtttatctttacatatttattggtggaaaaggttttacctgggatggctgtgtacagattccccttctctagctatccctcctctctactctgttcatgtgtaatgcttggtatcagattatcacttatccacagtaaaagaaaattaaagtggctgtc

SEQ ID NO: 9176 - DNA, 3237 bp, Oryza sativa
  ref <308>: DATABASE ACCESSION NUMBER: AK106524
  ref <309>: DATABASE ENTRY DATE: 2002-08-28
tttttcaacttattttgcaagccgtctccctcctcctcctcccacgtctccgcttccaatccaatcgaactcaaatcaattccctcacgaaatccccaaaaatccccaaatcctcacgcggccactcgatttgatcatggcggccaacgatcggctctaccctccgatcgacccgtacgccctggagccaccgcagttcggcgacgacgcggcttgcggaggcggtggcggtggcggcgaggttagggttcgtgacccgtcggcggtgatgtgggacgaggagcccgaggcgtccccctcctccccggaggagccggtgactgagggaacccacacatttgagcaagggccaaaggttcatcttgctgaaaataacgtggtaggcagtgctggtgttggtgatgtctatgaatacagcagggaaatgaccaccatgcaggagttagtagaaaacacttactatgattgtgctcttcgtgatcaaactggcatgtgggtacctccatcggttccaccgatgacaaagcatgaccacgaggagtggcaaaagggctttggtgctaatggtgggtacttcgctgaagaagatttgtgggatatagatgaagaaaacaaggagatgacaatgtgggatgtgcttgctgcgatggtttctgcgggaaaagataaagtattgtctgttgtatcatatgatttcggaaggcaaggcatgtctctgatttcacatttgcttcttgaagaggcttgtaaggataaggctgatacacttgaagatgctagtgttggtctcgaacatgcactccttgaggcagaaccaacagtctggctgcctgacagtgctgctccttcttgcatgctttgtggagctcgttttcatccaataatttgctcccgccatcattgtcgtttctgtggtggactattctgtggtggttgctcaaagggtagaagcttgatgcctccaaaattcagcacttcagaacctcagagggtttgtgatgtttgtggagtacgtcttgagtgtattcagccttatttgatgaataagatcagccgtgcttgtcagattccaacaaatgatttgacagacctgagcaccttgaggtcgtggttaaacttaccatgggcacgcacgatggaatatgagatatacaaggctgtaaattctatatatggatattttaaggtatggccatcctataattctaatacctgtccgtgttataacttggttgctttgcattcctctaatttttgtctggaactctgtattctcatgtatatcgccccaaaatgtatgttgttatgcttgtttgctttctgacaaatatgtctgcttaactaaaaattgttgactgtctatttttatcaagttcatgactatcaaattggtactaggaaccaactgaacatgcctaaaattccaattcttctgcgcagctgaactttacacaacacaaccgaaatcgcgtttgctataactctagccagctttagtccaccacatacttcatattcaaaaccattgcagcaaggttgataatccaagttcttaatttcctatcaaacctatactcagccaaaccatttttctttcaaagccttttcattagtcattatgttccttttaccattccaggccatggtgagagcttacatgattgttctattctatccacaatgtaaaaaattctggtgtcatgctaacaattattttcacaaaccagcatcacatgaagttttaatttgaacatttattagtgtgagcatttattctggatttcagatgattttgtaggtttaaatcccagcatatcctttgtagttcctgaggaagaaaataagtggtgtggtctgtatagcattttctagaagacccttttgaaattcaaatgaatccattccttttgcctttgacaatgttgagattgcactatggaaatttcaccttctcttttccagctacactaaggctgggttcgtttccaagttttcccaactcacctctctctttttccgtgcgcacgcttttcaaactgataaacggtgtgttttttgcaaaaattctgtacgaaagttgctttaaaaaatcatattactccatttttcaaaaaaaaaagattaatacttaattaatcgtgcgctaatgagttgctccgttttgcgtgcgcgagggattagttcccatccccaagtgccgaacacagccactaaatgctgctatgaagcattgttagctattcagtgttgaccacttcatatattcaattacaacctgttcttaaatttgtgagaccatgataaagttttaagacttttgtccagcttcttgttcgatcagtcattttggaatcagttagaacactaatcgcattttgtgtgcttcaatgcaattttaaggttggaagtttgaaaccggagaagtcaatccctgattcgattcttagacaagcaaaaggacttgctgtaattactgtggtaaatgttggaatgatggtcacatacaaaattggtactggattggttgttgctcgaagggcggatggttcctggtcacctccttctgccatctctacttatggtgttggatatggagttcaggctggaggtgagttagccgactacatcattgttctgaggaatactgatgccatcagaactttcagtggaaatgcacacctgtcagttggggctggcattagtgcttctgctggtcatcttgggcgagtggcagaggctgatttccgtgctggtgatggtggttatgcagcctgttacacatacagttgcagcaaaggggcatttgtgggctgtgcactcaatggaagtgttgtatcaactcgacattcggcgaatgcccaattttatggtggtccaataaaggcatcagaaatccttcttggttcagtgagcaggccagctgctgccgctaccctctacagagctctgtccaaattgtttgagaaggtcgaaaattactcctctcctctagatttctgacacacattgtgtcccctggtgattacccagtggtaactctaggtattgctttgtgctctctgcttactcctgggtgggtgatttatcaactgtacagtttgccattcgttgccatcaaatagatcatctctccagtgccacaaacagaaaaaccactctgtaaatgttgtatatataattgttacgtttgcgtgaatcatgataaatgaaaagaaaagaaaagaatcatttgttctg

SEQ ID NO: 9177 - DNA, 1422 bp, Oryza sativa
  ref <308>: DATABASE ACCESSION NUMBER: AK106525
  ref <309>: DATABASE ENTRY DATE: 2002-08-28
agaagacttccggtccgtaccttcgttttcacacgcgaaaactgcctttcttccggcatctggaagctactactactacggtcggtcctcgccggatcagatccggccgcctccccggcggatggcggagcagggggcgggcgaggcggatgcgggcggcggggagccgccgccggcggcggtgatgacggcggcggcggaggcgttggcggggcagaggtcgctgccgacgccgttcctgacgaagacgtaccagctggtggaggacccggcggtggacgacgtgatctcgtggaacgaggacgggtcgacgttcgtgttgtggcggccggcggagttcgcgcgggacctcctccccaagtacttcaagcacaacaacttctccagcttcgtgcgccagctcaacacctatggatttaggaagatcgtgccggaccggtgggagttcgccaacgactgcttccggcgaggggagaagcgtttgttgtgtgatatacaccgccggaaggtggtggcggcggctgccgcggcgccgccgccgccgtcgccggggatggcgacggcagctgccgcggtggcttcgggagctgtgacggtggccgcggcgccgatacctatggcgctgccggtgacgcgggcgggctcgccggcgcactcctcggaggagcaggtgctgtcgtcaaactctgggtcgggggaggagcaccggcaagcgtctgggtccggctctgcgcccggcggcggcggcggcggctccgcgtccggcggcgacatgggcgaggagaacgagcggctccggcgggagaacgcgcggctgacgcgggagctcggccacatgaagaagctctgtaacaacatcctcctcctcatgtccaagtacgccgccacccagcacgtggagggctccgcggggatatcctccatagcgaactgctccggcgagtcgtcggaggccgttcccccgccgccgcctctccccccggcgatactcgatctaatgccctcgtgccccgccctggccaccgccgccgccgctgcggggctcgccatagacggcgagcccgacccgagcgcgcggctgttcggcgtctccatcggcctgaagcggacgcgagacgacgccgccgccgccgccgacgaagacggcggcggcgaggatcaggccgagcacggcggcgcggacgtgaagccggaggcggcggatccgcatcccgccggcggcggcggcggaagcagcacggaggcgtcgccggagtcgcacccgtggcccatataccggccaacccccatgtaccacgcggtcaggcccacttgcaacgggccggacagggccgggtccgaccaagacgggtccagctccaggtgagttggcccccccaaccctgtagaagcttctagacccctatattacttaattgcccc

SEQ ID NO: 9178 - DNA, 1681 bp, Oryza sativa
  ref <308>: DATABASE ACCESSION NUMBER: AK106526
  ref <309>: DATABASE ENTRY DATE: 2002-08-28
agagaagcagagtacagcaggcagctcttcttctctttgcgaaggttggctacttggccagccattaggaaacaagttagtttggagaagaagcagagttgagactgcatttgcattgctctgtagccatgggcaagcaccatgtcaccctgtgttgtgtcgtttttgctgtgctctgcctggcgtccagcttagcacaagcccaagttctcttccaggggtttaactgggagtcgtggaggaagcaaggcgggtggtacaactttctgcacgagaaggtggaggagatcgccagcacgggcgccacccacgtctggctcccgccgccgtcgcactctgtctcgccgcagggttacatgccggggcggctcttcgacctggacgcgtccaagtacggcacggaggcggagctcaagtcgctgatcgaggcattccacgacaagaacgtcgagtgcctcgccgacatcgtcatcaaccaccgctgcgccgactacaaggacagccgcggcgtgtactgcgtgttcgagggcggcacgcccgacggccgcctcgactggggccccgacatgatctgcagcgacgacacgcagtactccaacggccgcggccaccgcgacaccggcgccgggttcggcgccgcgcccgacatcgaccacctcaacccgcgtgtccagcgggagctcaccgactggctcaactggctcaggaccgacctcggcttcgacggctggcgcctcgacttcgccaagggctactccgcgccgctggcgaggatctacgtcgacaacaccaacccgacgttcgtcgtcggcgagatctggagctcgctcatctacaacggcgacggcaagccgtcgaccaaccaggacgcggacaggcaggagctggtgaactgggtggagggcgtcggcaagccggcgacggcgttcgacttcaccaccaagggcatcctccaggccgccgtgcagggcgagctgtggaggctccacgacggcaacggcaaggcgcccggcctcatggggtggatgcccgatcaggccgtaaccttcgtcgacaaccacgacaccggctcgacccagtcgctctggccgttcccttccgacaaggtcatgcagggctacgcctacatcctcactcaccctggcatcccatgcatcttctacgaccatgtgttcgactggaacctgcagcacgagatcgcgacgctggctgaaatccggtcaaggaacgggatccatgcggagagcacgctggacatcctcaaggccgagggggacatctacgtcgccatgatcgacggcaaggtgatcaccaagctcgggccgaggtacgacgccggcgggatcatcccctccgacttccatgtcgtggcgcacggcaacgactactgcgtctgggagaaggaaggcctcagggttcctgccggtagaaagcactattagctttagctatagcgatcgagttgcatggtgctttgcaaccctagataatatatatacgtacgtggctctagctatgaatcatgcaattttgctgcgagatgtgtacgagcgagcttcgatcgatgtacgcttcgttataactagcgttcttcggaaataagtaagcggaatgtgccctgttaatcctgcagaaatgtaggatgaatggaattaactagctactgttcgtttcgatcctc

SEQ ID NO: 9179 - DNA, 2648 bp, Oryza sativa
  ref <308>: DATABASE ACCESSION NUMBER: AK106527
  ref <309>: DATABASE ENTRY DATE: 2002-08-28
gtgctcctcatcctcttcgccgccgcgtcgccggcggcggcggccgcgagagagcagtcgacgtacatcctccacctcgcgcccgagcacccggcgctcagggccacgcgcgtcggcggcggcggcggcgccgtgttcctcggccgcctccttcgcctcccgcgccatctgcgcgcaccgcggccacggttgctctactcctacgcgcacgcagcgacgggggtcgcggcgcgcctcacccccgaacaggcggcgcacgtcgaggcgcagcctggggtgctcgccgtccaccccgaccaggcgcgccagctgcacaccacccataccccggcgttcctccaccttacccaggcttccgggctcctgcccgccgccgcctccggtggcgcgtcgtcacccatcgtcggggtgctcgacaccgggatctaccccatcggccgcggctccttcgcgcccaccgacgggctcggcccgccgcccgcgtccttctccggcggatgcgtctccaccgcctccttcaacgcctccgcctactgcaacaacaagctcatcggcgcaaagttcttctacaagggatacgaggctgctctcggccacgccatcgatgagacggaggagtccaagtcgccactggacaccgagggccacgggacccacaccgcctccaccgccgcagggtcgccggtgaccggcgccgggttcttcgactacgcgcgtggccaggcggtgggcatgtcccccgcggcgcacatcgccgcgtacaagatctgctggaagtccggttgctacgactccgacatcctcgccgccatggacgaggccgtcgcggacggcgtcgacgtcatatccctctccgtcggcgccggcggctacgccccgagcttcttccgcgactccatcgccatcggctccttccacgccgttagcaagggcatcgtggtgtccgcgtccgccggcaactccggccccggcgagtacaccgcgacgaacatcgcgccatggatactgaccgtcggcgcatctaccatcgaccgcgaattcccggctgatgtggttctaggcaacggtcaggtctacggcggcgtgtccctgtactccggcgaacccctgaactccacactgctcccggtggtgtacgccggcgactgcgggtctcggctttgcataatcggcgagctcgatccagcgaaggtttccggcaagatcgttctgtgtgagcgtgggagcaacgcccgtgtggcgaaaggcggggcagtgaaggtggccggcggtgccggcatgattctggtgaacacggcggagagcggcgaggagctggttgccgactcccacctcgtcccggcgacaatggtggggcagaaattcggcgacaagatcaagtactacgtccagagcgatccgtcgccgatggcgaccatcgtgttccggggcacggtcatcgggaagtcgccgtccgcgccgcgcgtcgcggcgttctcgagccggggccccaactaccgcgcgccggagatcctcaagccggacgtcattgcccccggcgtcaacatcctcgcggcgtggaccggcgagtctgcgcccaccgacctcgacatcgacccgaggcgcgtggagttcaacatcatctccggcacgtccatgtcgtgcccgcacgtcagcggcctcgccgcgctgctccgccaggcgcaaccggactggagcccggcggcgatcaagtcggcgctcatgaccacggcgtacaacgtggacaactccagcgcggtcatcaaggacctggctaccgggaccgagtcgacgccgttcgtccgtggcgccggccacgtcgaccccaaccgcgcgctcgaccctggcctcgtgtacgacgccgggaccgaagactacgtctccttcctctgcacgctcggctactccccctccatcatctccctcttcacaacagacggctccgtcgccaactgttcgacgaaattcccccgcaccggggacctcaactaccccgccttcgccgtcgtcctatcctcctacaaagattcagtcacctaccacagggtggtgcgcaacgtcggcagcaacgccaatgccgtctacgaagccaagatcgacagcccgtccggtgtggatgtcacggtgagcccaagcaagctggtgttcgacgagagccaccagagcctgtcctacgacatcaccatcgccgcgtcgggtaacccggtgatcgtcgacaccgagtacaccttcgggtcggtcacctggagcgacggcgtgcacgacgtcactagccccatcgccgtgacatggccgtcgaacggccgagcagcatccatgtagagtagtgttggaaatttgggtgtcttctggtttggtggcaatggggacagcttgtataggtccttcttggacagagatctccacgcatgagaccaaatccttccatgaagcttagtgctcccatggcttcatggaagggatcggttgcctgttcatcgctatgcacatgtgtaactcactggattggagtggtgaataattttatttatgctaaattacctggattcccatgctagaagttattagacttcatttcatcagataggtgtactgaataagatgtaattcccttcatttcaaattacttgtcattctagttttaccat

SEQ ID NO: 9180 - DNA, 2031 bp, Oryza sativa
  ref <308>: DATABASE ACCESSION NUMBER: AK106528
  ref <309>: DATABASE ENTRY DATE: 2002-08-28
ttgccgagagaaaaatagagggagggagagggagagaagcagagtgttgagcacaagctagtgaaagggttagatagaaacttggtagaatagacagataggcagagagagagagagagcttagcaagctaaggcttagctgctgcaaggctccatccatgcttcttgttgtgagatgagattgagataagatgagcagggggtggtggtgcctggtgtgaggctataggtaagatggtgggaggagagcttgtgctggctgctctggtgatcctgcttgctttgctgctgaccctggtgctgagccacttcctgcctttgctcctgaatcccaaggctcccaagggaagctttgggtggcctctccttggtgagacgctgaggttcctcagtcctcatgctagcaacaccctgggcagcttcctggaggatcactgctccaggtatgggagggtgtttaagtcccatctgttctgcacccccaccatagtgtcctgtgaccaggagctgaaccacttcatccttcagaatgaggagaggctgtttcagtgcagctaccccaggccaattcatggcattctgggcaagtcctccatgttagtggtcctaggggaggaccacaagaggctcaggaaccttgctctagcactggtcacctccacaaagctcaagcccagctaccttggcgacattgagaagattgcactgcatatagttgggtcatggcatggcaagagcaaggacaaggggatggtcaatgtcatcgccttctgcgaggaggcaagaaagtttgcattcagtgtaatagtgaagcaggtgctggggctatcaccagaggagccggtcactgccatgatacttgaagatttcctcgccttcatgaagggtctcatctctttccctctctacatcccagggacgccctatgccaaagctgtgcaggccagagcgaggatatcaagcactgtgaagggtattattgaggagaggaggaatgctggctccagcaacaagggtgatttccttgatgtgctgctttcaagcaatgagctctctgatgaggagaaagtgagctttgtgctggattccttactgggaggatatgagaccacctcactcttgatctccatggttgtgtatttccttgggcagtcagctcaagatctggaactagtgaagagggagcatgaaggcataagatcgaagaaagagaaggacgagttcttgagctctgaagactataagaagatggaatatacccaacatgttatcaatgaggcactgagatgtggcaacattgtcaagtttgtccacaggaaggctctcaaagatgtcagatacaaagagtatctgattccttctggttggaaggtcctacctgttttcagtgctgttcatttgaaccccttacttcatggaaatgcccaacaatttcagccctgcagatgggagggtgcaagccaagggacaagcaagaagtttacgccgttcggcggtggcccccggctctgccctggatcagagcttgcaaaagtagaggctgctttcttcctccatcaccttgtgctcaattatagatggagaatcgatggcgatgacattccgatggcatacccgtacgtggagttccagagaggtctgcccatagaaatcgagccactttgctctgaatcctgacaggtttgcagttgcagccacggtgagcgagttcatcaaatcatccccgcaagcgagggggagatgcgggcgagaacgacggactgagaggattagtcagtgaaacaaaaaaaaggagagaaaatatttcaagaactgaagaatgcactgagcattagctagtagtacctatcaatgagccaagctgagattgtaatttgctgtacatggtgtagatatattttgtccatgccgattgcttgcggtggtggtggtgcggtgcttcaccctgtaacatcctccactgtttcaactttcatctgctattctatagaagaaaaaaaaaaagaagaaaattgggctattgggctattg

SEQ ID NO: 9181 - DNA, 1914 bp, Oryza sativa
  ref <308>: DATABASE ACCESSION NUMBER: AK106529
  ref <309>: DATABASE ENTRY DATE: 2002-08-28
gacgagattgcgggggcacgccgcacgggcaccacctcgccgcccgccaccaccgcttcctcacccgccgcagccaccgcctccacctcctcctcctccaccaccttcctagccctgctgccgcttctcgtactctccatccccgtagtcggcatccgtgcggcctcagcacacctcctccatctcccagatggccacatgactacacagtggcgctcagccacgtctcccctcccctacggcaagttcagagaagacggagctgggggtaggccggcaacgagtcgccatctcctccccacgagcccacgcctccccgcctcagccgccgcggcccaccactccggcttccacctcagatcgcgaatcgcaagactttgatttggcacttgaggcgtcagaacacaaagggtaaagatcctcggtttgccactggctggggtggatctggtgtgacgcagataccccaaagcactgagaagccattgaggaagctcactcttgaggacacgcgcccctttggctgcactagcacagatttcacaagaacagagaagagtgaggagagcaatggaacaagaagcagcaacagctttggcagccaagcaagaggaagtggcgcagctcggggagggtatcctccaccactttgagcaaatcctccatcaagattccctcatagatgaagtggggttcttgcacccgacacagttccagtcactagaacacagccagactagtaattggacatttgaagtacctgaatgtcctcagagatacctgtggtgcaaagaccataagcttgccatatccacggaaatcttacctaagctctaccgtgctgcacagcatgcatactccaattcagcagcagccaaggatggttcattcatggaaactgatctgatgaggcacagcaaggcactgctcattctttgccctgacatgctcaccgcatggaactcaaggaagatagtgctatcagtgaattatgatttcactaagctcaaggatgagctgcaattgtgtgctctgatcctttcatactcaccaaaaaacgaaagcacctggagccataggagatgggtgatcaagaaggtttcagagcacaaccaggatgtgtcggagcttatagagatggaatctgtactagtgaaacagatagcagagaaatcaaagatgaactaccgtgcgtggaggcatcgctgctggcttattccctacatgacaagagaacaggttctgaatgagttaaagaaatcaacaagatggaacgagttacatgtcgctgacaactgttgttttcactaccgacggtccctactgcttgcattactagacagttgccatgtagaggacacagaagattcccttgataggaagtcagaagttcatttactgtggaaggaggaactgacgtggaatgagaaacttatcaggcgctaccaagggagagagtctttgtggatccatcgtaggttcctctcacaatggtggatgaagttcttgctcagcagtgaggaaacagagtgtgctgcaggcacatcgctggtggatctcttcctagtccaggagatatacctcctgtcagactgcctgaatgcccctgccgatgaatttggtgaggcatgtgtccaatctgaacttgcagccctctacattctctggatatcaaagcaagttccggctgtgaaactaaagctggaagaaaggctacattcgttggggagcctggaggatgtgttagcaagggcctgcccggagagaagtagattgtggacgcatttgatagcttgactattgaaagcagaacaaggacatgcattgtagcaatatgtggtactcatatccaacggaaaacgacgcttggaatacaaccatttctgaggcgactagacattttgcacgactcct

SEQ ID NO: 9182 - DNA, 2576 bp, Oryza sativa
  ref <308>: DATABASE ACCESSION NUMBER: AK106530
  ref <309>: DATABASE ENTRY DATE: 2002-08-28
tgtttagacttcatttcttccaaacaactacatcgtggcggggttgattcaccttcgtggcgctcaggagctcagcctgacaacattgtaatcaaggcaacaggtggtggagcattcaaatatgctgatctcttcaaggagagattgggagtcagtcttgaaaaggaagatgaaatggactgccttgtagctggagcaaattttttgctgaagtctatacgccatgaagcctttacgcacatggatggccaaaaggaatacgtgcagattgaccagaatgatctgtttccattccttcttgttaatgtggggtctggtgttagcataatcaaggttgatgggcatggaaagtttcaacgagtaagtggaacaaatgttggtggtggtacatactggggtttggggaggttaatgacaaagtgcaagagtttcgatgagttactagagctgagccggcgtggagacaacagcacaatcgacatgcttgttggagatatatatggtggtttggactactccaagattggcctttcagcatcaacaattgcctctagttttgggaagacaatttcagatgacaaggaactgtcagattatagaccagaggatatttcactctctctgctgcggatgatttcttataacattggtcagatttcctatcttaacgcactccgatatggacttaagaggatattttttggtggattcttcattcgtggtcatgcctacactatggacacaatttctttcgctgtaaatttttggtcaaaaggagaggcaaaagccatgtttctgcgtcacgagggttttctaggagcacttggtgcatttatgagttatgagaagcatggtcttgatgacttgagaatacatcacttggttgaacgcttcccaatgggtgctccatatgttggtggaaaaattcatgggcctcctcttggggatctcaatgagaagatatcatggatggagaagtttgtgcagaagggtactcagattacagcacccgtacctgttggatttcctgtgacaacaggtatgggaggttttgagaggcctaccgccaagggagacattttgcggtcagatgcaagtgcagctctgaatgttggtgttctccatcttgtacccacattggatgtatttccgctgttagaagatccaaagatgtatgaaccaaacacgattgatctcgacctgaatgagtacaagtactggttcaagattttgtcagaccatttgcctgaccttgtggacaaggcggttgctagtgaaggtgggactgatgatgccaaaaggaggggtgacgcattcgcacatgctttttctgctcatttggcaaggttgatggaggagcctgctgcttatgggaagtttggtttagccaacctgttggagctgagagaagaatgcctgagagaattccagtttgtcgatgcatatgttagcattaagcaaagggaaaatgaagcttcactggctgttttacctgatcttctgatggaacttgatagtatgaatgaggaagctagattgcttgcactaatcgagggtgtccttgctgcaaacatatttgattggggctctcgagcttgtgtggacctttatcacaagggaactataatagaaatttatcgcatgagccgcaagaagatgcaacgtccttggcggattgatgactttgatatgtttaaaaagagaatgcttgctgataagaagggccaaccatacaaaagagcactgctttttgttgataactcgggtgctgatgtggtccttggaatgattcctttagcacgggaattattacgcaatggaactgaggtggttttggttgcaaattcattgcctgctttgaatgatgttaccgctaatgagcttccaggaattgtggctgaagctgcgaagcattgtggtatacttcggaaagctgcagaggcaggtggattgatctttgatgccatggctggcatccaagatgatctgaaagatgaaccagtatcagttccccttatggttgttgagaatggatgtggcagtccgtgtattgatttccggcaggttagctcagaacttgctgctgcagcgaaagatgcagatttgttaatcttagagggcatggggcgatctctgcataccaacctcaatgcccgttttaagtgcgatactctgaagctggcgatggtcaagaatcagagattggcagaaaaacttttcaatggaaatatatatgactgcatctgtaaatttgaacctgttccttgaacaatgcggaagaatgtgccgtggatttggtttgctctagcacagaagcagctaataacaggtacatctcacttaatctgtaaccagtggggtcatggtattagcagtgtcacatatccaagcaaaaagccataagaacaaatttcttatataagaactaaaagatcctctcaatgtactaaatgctcctttagatggtaaagaatcaaagaagtgttgttgacttgttgtgaatattgttatcaaaacaatttttctgaacatggagtagcgacataataaaggtttttaaagaatttgtagaaagc

SEQ ID NO: 9183 - DNA, 1977 bp, Oryza sativa
  ref <308>: DATABASE ACCESSION NUMBER: AK106531
  ref <309>: DATABASE ENTRY DATE: 2002-08-28
actctccccaccaaattcccccaaatcgcagctgttcgccacccgcattgcgccgccattgcctccaaatccgagtactccttgagtaatctcagatccatctcgggttcctcccgccgttggcagcagccggagcttttttccgcggaagaaatggcgccgtttcggtgagttcttggcagtttgggatgatgcttggtgggtaggaggactaggagtgcggcggctcggggagaggctgcgatggagagcgccgccggggaggaggggaaggctgccccgtcgcttcccctggcgaccctgatcggccgcgagctccgcggcggcggctccgagcggccgctcgtccggtacggccacttcggcttcgccaagcgcggcgaggactacttcctcgtcaagcccgactgcctccgcgtcccgggcgacccttcctccgccttctccgtcttcgccgtgttcgacggacacaatggcgtgtcggcggcggtgttcagcaaggagcacctgctggagcacgtgatgagcgccgtgccgcagggcatcggccgcgacgactggctgcaggcgctgccgcgcgcgctggtcgcgggcttcgtgaagacggacatcgacttccaacgcaagggggaggcatcagggacgacagcgacgctggtcgtcgtcgatgggttcacggtcacggtggcgtctgttggggactccaggtgcatattggacacgcagggcggtgtgatctcgctgctaaccgtggaccatcgtctcgaggagaatgtagaggagcgggagcgcgtcaccgcgagtggaggggaggtcagccggctcaacctgtgtggtggacaggaggtgggacctctcagatgctggccaggtggattgtgcctttcaagatcgattggggatactgacgttggggagttcattgtgccaattccacatgtcaagcaagtgaagctatcaaatgctggagggaggctaataattgcatcagatggaatttgggatgcactgtcctcagaagctgctgctcaggcatgccgaggattgcctgcagagctggctgcaaagcttgtcgtgaagcaagcactgaagacaagtgggctgaaagatgacaccacctgtgtggttgttgatatcatcccatctgatcattcttcaacacctccatcactatctccaaagaaaaaccagaacaagttgagatctcttctttttggtaggaggtcacatagttctgttggaaagcttggaaacaagtctgcttcatttgactctgtggaggaattatttgaagagggttccgcaatgttggatgaaaggttgggtaggaattttccatcaaaagcaaactcgtccccatctcgctgtgcaatctgccaagtggatcaagcaccttttgaagatttagtgacagataatggaggtggttgctgttctgccccatcgacaccatgggttggcccttatctttgttcagattgtaggaaaaagaaggatgcaatggaaggtaaaagatctagtcgctcaacagcgtgcaggtgaaattgccaataggactaactggtccttgttcgtgcaaactggtctcctggttcggttgtctgccacatgtaaaaagaggataataatctgtttgctgctggatccaagtattattggtgaaactaactgcaatctagcctgaactgaacaaattgggctactaacaatcttgggagtctatcaacagcgcagatgaaaatttctgtttgcactgggaagatagctcacaggatttcaaccccgtagttttttttttttttgaaccttagtatgtaaagtgaaatgtctagcttaacaatgtttgtaagagatggcaattggcaaggctccttgttctaccttggaatgtatatgcttgtggagccgaacagactaatttatttatctcatgctatcctaatcaatggtaatgtctttcggtgttctacgtggact

SEQ ID NO: 9184 - DNA, 1895 bp, Oryza sativa
  ref <308>: DATABASE ACCESSION NUMBER: AK106532
  ref <309>: DATABASE ENTRY DATE: 2002-08-28
gttctgcgccgtctcgccggtctccatctccatcaccggagaacagcgatgtcggcgacctactgcttccgccgcatacttttgcctttcactcctcgcgcccagtcaatctccccatctcctcggcctcggcaatagtatcctcgcgagttcgcccgccggcgccaatctccatcccgcgagcagccgtgccggcgtcctgctgcttccgcccccggtttcccccaaaaagaaatatatttggtgcccctggcatccggtagatcggcatgccagcggccttggtggcgtgcagcggcaagcgccggcggcggacggccaccactcatgctgctcgggactcatcgtcgtgggcttccctggcggaggatctggtgagcctgataggctggcgggtgctggctggagatgtgcgagactacatctgcttccgcgccgcgtgccaccactggcgctcctgcaccgccagcccgtgcggccgcggcgttgtggacccacgcttccacccgcggcggtggatgatgctccctgaggggaacggtctctacccgggccacggcatgctgcgtggcttcgttcgcttcttcaacctctccaccggcgctttcgtccgtctcaagctgcccatcgtccgcgaccaccgcatccttgactccgtcgacggaatcctcctcctgcagcggaaccgtgacaccgcggtccgtcttctccaccccttcaccggcgacatcgtcgacttcccgccgctggacaccttgctgccgtacatgggccgccggtcggaggaatatctcagagatgtcgctgctgcctccataacatcatcagctgatgatcaagccgtcttgcttatgatatggttattccgcacggtgcgcgtagccttcgccgcctctggggataagcagtggagggtgtcgagctggtccatgtaccaagcctatactccattgccattccaaggcaagctatacatattggatcaagccacggcttatggtggacctgaggtcttgcagatagacccacccctgcaactgcaactggaagggacgacggagctctcgctaccaccaccaaaatcaattgctaaatgtccagcaaggacacctgactcattctttctctaccatttggtagaatgtgactctgacattctgttggtcacctttggtgttagtgtgtatgcacaaatttcagtttacagactagctgatcttatttcgggaacaactgtcccggtgacttgcatcggcagcaattcccttttccttggtaataggaatctctgtgtcagctccaaggcgtttcctaccattgtgggtgatgccattgtgttttaccatcagaaggagaattatcttgcacaataccacctcagaagcggcacattgtcacccacatcagatggatgtatctttgcgactaatatgccaagtcctagtagcatcattcaccatatctacacctgttgctttcgtacacaatggaccaagggacatttattgtttcaaagggagaacagggcatggcagatgaaacggaagtagggatagacggggcgtaaacaactcttgttttgtgttggtggtggtgcctgcctgcctggttttccttcagggatatatttgttgatctacaggggaagtagttcccggtggctgtgaaagttttgctttggtacttataatcatgttactatttatgtgacaaagatgcttccctctgttgttgaatcaggcaactgtttcatgttgaaacaactaaattaattattgtaattggcatggtattttccaatggagttatgtaaccctggcttgtaaagttcttgtgacaattgatcaaacttccatcatcatagtagaattctaatatatccttatgagctagtc

SEQ ID NO: 9185 - DNA, 2322 bp, Oryza sativa
  ref <308>: DATABASE ACCESSION NUMBER: AK106533
  ref <309>: DATABASE ENTRY DATE: 2002-08-28
atccgatcggttgactcgcaactgatcatgcgtagtaccccccgaatattcggacgagatgatcacatcatcacgcgtcccctagaaaaacccactccgccgccgccgtcgtcgcgtcgcacgcggcgccctaaaacagcagccgccgcgccggccgctcgccacattcacactagcggggccggcctctctcacgagagcaaaccaacaaactagttcggcgagcgagctcggtcaatcgggataccgccaaagagtgcgtgcgagtggcaatggcgatgccgctgggtgggattctcctcctcttcctcgtgctcctcgccgccgccgcggcgggcggcggcggcggcgtgtgggcgttctcctcgtcgtcgtcgtcgtcgtcgtattccaggatcggcgagcagccgctgtcgctgatcggcatccaccgcgcgacggtcggcatcgacgccgcggcttccgtgcaagcgtcgcctcggcttctcggtgtcaagggggaagatactgcctgggtaactgttgatttcgcagctccgcatgcgagtgacggcgattggatcggagtattctctccttcaaatttcaacgcgtccacatgccccggtccttctggatcagactcaggacctgttatatgctctgcaccaataacgtatcagcttgcaaattattcttcagattatggcaagacaggaaaaggcactctcaagtttcagttgatcaatcagaggcaggacttctcctttgcactgttcactggtggtctctcaaatccaaagcttatcgcagtatcaaataagatcgccttcgcaaacccgaaagctccggtttaccctcgtctagctcaaggcaaatcctggaatgagatgactgtcacatggactagtggttatgacatcaaagaggcatatccctttgttgaatggggcatgaaatggagccctcctacgcgcacagcagctggcaccgtcacttttgatcgcgaaagcttatgcggagaacctgcccgtactgttggttggagagatccaggtttcatacacacagcattcctgactgatttatggccaaataaagaatactattacaagattggacatatgctacctgatggaaaaattgtatggggcaaattttactccttcaaagcacctccttttcctgggcaaaagtcactgcagagggttgtcatttttggtgatatgggaaaggccgagagggatggaagcaacgagtacagcaactaccagcctggatcactgaacacaactgacacactgatcaaggaccttgacaacatcgacattgtatttcacatcggtgacattacctatgccaacgggtacatttcccagtgggatcagttcactcagcaagtcgagccgatcactgctcgagtcccctacatgattgcaagtggaaaccatgaacgggattggccaaacagtggatctttcttcaatgggacagattctggaggggagtgtggggtgcttgctgagaccatgtactacacacccacagagaacagggcaaactactggtacaagacggactacgggatgttcagattctgcgtggcggacagcgagcacgactggcgggaaggcacggagcagtacgcgttcatcgagagctgcctcgccacggtggaccggaagaagcagccatggctggtgttcatcgcgcaccgcgtcctcggctactcctcgggcttcttctacggcgccggcggcgccttcgcggagccgacggcaaggcagagcctccagaggctatggcagcggcaccgcgtcgacctcgccttctacggccacgtccacaactacgagcggacgtgcccggtctacgacgggcggtgcgcgtcgccggagaggtcgcgctactccggcgcggtgggcggcaccatccacgcggtggtcggcggcggcggcagccacctgagcaacttcaccgccgaggcgccgccgtggagcgtgtacagggagatggactacggcttcgtcaagctcacggcgttcaactacacgtcgctgctctacgagtacaggcggtccagcgacggcgaggtgcacgacagcttcaccgtccaccgggagtaccgcgacgtgctcgcctgcgtcgccgacagctgcccgccgaccatcccgccggcgacgtgatccagctccggtgattccgccggcgagtctgccggcgacgtgtgcactattgctgcttggtggtgcttgcgggcctcgtctgtaatcttgacttgtcaatcgtgtgtaaattgaattgcgaaatatttcgaaattaagtcaaataaagaaatgttac

SEQ ID NO: 9186 - DNA, 1627 bp, Oryza sativa
  ref <308>: DATABASE ACCESSION NUMBER: AK106534
  ref <309>: DATABASE ENTRY DATE: 2002-08-28
tgaatccatcatcagctcctattgacagtgagcacattttgggagttgaaggaagattgaacagcttgcttgatgtaaatggaggtattagcaaacgaaaagacgcaacaaatggatacttgaagcttctccttgtgactgcagcggaaggtgacaatgctgggggcacgtctaaaagtgtaagggatctttcgttaattcttgatgcacttctgaaaacaagatccaattctgtcctgttggatatcatcaataagaatggactgcaaatgcttcacaatatattaaagcagaataaaagcgatttccataggatacctataataagaaagcttgtgaaggtacttgagtttctagcttccaagggcattctgacatctgaacatataaatggtggtcctcgatgtgctgggacagaaagcttcagggagtcgatgttgggcttgttaaggcataatgatatgcaggttcaacagattgctcggaactttcgtgatagatggatccaatgggcccctcgaaatatttcaagaaatgagccaacagaatattcacgtgcatccatatctgcacacgatattcatgtcatttcaacagctggtggatcttttccaacttcagccaacactatggattggaaatccatcagaagaaaacgcaagagccgttgggattaccaaccagatgaccactataaaatgggtggcctgaaaattcagaaagtttgtcctgtacaaagtgagtttcggactggctcggtgggaaataagttgcatggtaattggggaacgaacagctcccacaatgatgttcctgtggtgggaagttcagccgatggtgcagatgatgaagcacctcctggatttgagtctcagcaggaaagtcggcctggacaagcttgtttagaatcgggggtttctccaggattatacttggagaggtatcaacataacttgactatttcatacgggattccaatcgcttttgttgagcattttggaaccccagaagttgaaggagggccatgtcgcaaaaactggaaagtcgcacctggtgtgcctttccagccctttccaccattgccgccctatccaagagggagtccttgtccttccactcagatgtctcagcatgaacacaacagtttgggacattgtggcagggctgcaaatagagacgggagaatacataggaattggagaaatggggcgagaacaaaatttccatacaatcatcaaggacggagatttcctaacaataatcaaagattttgaaagttgcctgctgcctccaacgtctcaggagcagggtgatccaggacctagaggcagggagtgacccaagtcctggtttttgaacctcaaatagtggtttatacattgtagttcctgtttatcagagccccagaggtgtatcagaattgcgtgcgcccgtaattctatttaataggagcagatgttactgtcagtttattagaggtagaaacatattctgcaaataggtcattgcctttgcggttcttttactaattaatttgcccattggctccctctgcgctatgtgtaatcccataggaataattgatttgattcaaatcgttttacaggcaaaacggctaattggtttc

SEQ ID NO: 9187 - DNA, 1771 bp, Oryza sativa
  ref <308>: DATABASE ACCESSION NUMBER: AK106535
  ref <309>: DATABASE ENTRY DATE: 2002-08-28
taactcgacggatcgcacggccctcgtgccggcgacgcatcattcaaatttctgttctatcaactttcgatggtaggataggggaggcggggaagcggccatggcggagcacgacctgacggcgcggatggcggggcacctggactgccacctggtgctcccgctgctggagttcctgcaggagcggcacctctacccggaggaggagatcctcgaggcgaagatccgcctcctccggggcaccaacatggtcgactacgccatggacatccacaagtcgcgctacggcaccgacgacgtccccgaggccatcgacaacatccaccagaaccagcagattggtcctgatcagattgagactctgtatcagtatgccaaatttcagtttgactgtgggaattactcatttgctgctcagtacttgcatcaataccgtgctctgtgcacaaacattgagaggagcttgagtgccctgtggggaaagctggcagctgagattttgatgcagaactgggatgttgcactggaggagctcaaccgtttgaaggagattattgattcaaagaacttctcttcaccgctaaatcagcttcagaataggatatggctgatgcactggagtatctttatcttctacaaccatgaaaacggcagaaatgggatcatagatctgttcttccaggagaggtacttgaatgcaatccagacaaatgcaccacatcttctgagataccttgctacagcagttgttgtgaacaaaaggagaaggaatatgcttaaggagttgattaaagtcattcagcaggggcagcacagctacaaggatcccattactgaatttctggaatgcttgtttgttaactatgatttgatggcgcacaacagaaactcatagagtgtgaggaggtcatattgaatgatcctttcctgggaaagcgcattgaggaagggaattccatcactgttcctttgagagatgaattccttgaaaatgctcgtctgtttatctttgaaacttactgccgtattcatcggtccattgatattggcatgctctctcagaaactgaacatgcgctatgatgaaggggagttgtggataatgaacttagttagaaattcaaagctcgatgccaagattgattcagtgtctggaactcttatcatgacgaccaatcatgttaacatccacgagcagtttatcgaaagcttgaagaatcttaacatgcggacttccatgctagcaaagaacattgtggagccagctcaagcaatgcaacaggcaactcggtgatattgacagagaacatcaattttgaggcgcccagaactcgtgaagttagacaaactattaaacttttagcaccgacgtcgcgttattagtacttgcgattcctctataaagaaaaaggattcaacaactagtgtacagaaatatttctaattacgtatcaaagctactaatacagcaatatcccggggcaaaaggaaacccaggaggtgtgttctcgttcgctgcagcatatgctgaagtttttgttattttgtacttggaatcctgtggctgaactgctgaagttaatcctttcttttgtactagactgtactagaatcaagcttacctgattgtggtggtgtttcgtgtgtctgtgaagtgctgaagtgtggttgctatttagtttcgagttcgatgctttttgtctagattcggaaaatgttctgtcgaattattcatttttgcatggggatcaccacaaaagttggttggaccg

SEQ ID NO: 9188 - DNA, 2377 bp, Oryza sativa
  ref <308>: DATABASE ACCESSION NUMBER: AK106536
  ref <309>: DATABASE ENTRY DATE: 2002-08-28
gattttagtctcacgaactgctgggaggctagggttcccggcggctccccttgcgccaccgcgccgcggccgtcttctcgccgccgacgctgagacaggccgcgccgccgctcctctccacgcgccggtccggtccggtccgtcgccgttcggtgctccgagctcgctcaaccagcggcgatggcgggcggcgacagggagagggatgtcgaggaggagacgaggaaccagatgatgcagaatctcttcggcgaccagtcggaggaggaggaggaggacgacgacgaggccgtcgatttcgtcgacgaggacgaccacccgcatccgcatcagcagcagcagcagcttcgccaccaggtggtggatgacgacgacgacgacgacgcccacgcccgctccggctaccactcggaagaagtggaaggtgaggctgataatggaggggaaggtgaagcggaaggagaaggtgaaagtgaggggcaagttgggatggaagaagaaagtgaagctgaagctcatcgtgctgatcttgatcaaggagaaagtgatggggaaaaggtccagagctccccaggagaacttagtgaccgggtgatgcaaaatgatgcagcaggcatggatagtgaagatgaagcctatcaacagcggccagtagctagcagaagaagaggagttgttgcctctgaatctgaggggtctgaagatgactattatgctggtcgagctcatgaagatgaggaacctcgtcaaacaaggaaagcatcaagctcgccagttgaggaggagagagatcaggaagttgtccgtgatgtatttggtgaaagcgatgaagatgaacctgctccatatcgtgatcaacaagaaattgatgaagattcccatagatcacccatggaagatgaaggtcactatgagaaggatttgcagcccgacgatgtagtggctgatgaagatatgagatatgaatcagatgaaaatcgtgaactgaaaccaaaagagaaaccagttggtccaccgctgaacctggtggttccacttaagcagccaccagctcaacccgagagaatgaatgtgatcaaggtatcaaatattatggggattgacccaaagccttttgatcctaaaacatatgtggaggaggatgtatttgttacagatgaatctgggaccaaaaaaaggatacgactggaggacaatattgtgcggtggagaaccgttaagaatgctaatggcactacatcttgtgaaagtaatgcgcgcattgtaaaatggaaagatgggaccatgcagctgctgattggcaatgaagttcttgatatatctgttcatgaagcacatcatgatcagtcccatctgtttctgaggaatgggaagggagtccttcaatcacaaggaaggctcttacggaaaatgagattcatgccatcttccttgtcttcgaaatcacatcgtttattaactgctcttgttgattctcagaataagaaaacagttaagatgcaaaaatggatcgaatctaaggatccagagagagtgaagcaggaaaaagaaagggccttgggccaaaatattcgagcccattcaattcttcaacgcaaaagagaaaaggttagccgcaagtacacacagcccgccaggcaaagaaggcagctttctcccggatttttggaagatgcattagatgaggatgaggaacctgaccatcaatatggttctcgccgaatgccagcacgtagtcgttttggggatgaactggaggctgaagcactagctgagaggcgcatagttagtgcaaagaagtcaagtatgggcagaaacattcctcgcaaaccatcctttcctgctcgtccgcctagacgacaggaaaatgaatattctgagagtgaaagggaggagtcagagtatgaaactgaaggagaggatattgagcactcaccaacccaggggagggaagatgagcttgatgaagaggatgaatatgaggaagatgtggaagaagaagcagctatgtcagatgaagaaatcgaggaaccaaaacggaggagagaatctgggggtgccagtgccagccaaaggcgcaaggagatcgactcggatgatgattctcctccaagaaaacaacaggcagttcatcgtcggaaggcagtcgtttttgacagtgatgacgaatgatgagaagaaaaaggttgcaaacaccaatatttgcttgaggattgttgtttagaaataacaaaaaaaaatgttgtcaattgttaatgtattcgggatgctgtcttgaaatcaaatgttagctgtgctaccagttttcctacactaatatagatgatatagtagtattattttctaaaaaaaaatacagatgatctggtaaaccatc

SEQ ID NO: 9189 - DNA, 522 bp, Oryza sativa
  ref <308>: DATABASE ACCESSION NUMBER: AK106537
  ref <309>: DATABASE ENTRY DATE: 2002-08-28
gaaactcaaaccgcagttcacacacgacgcgtacgggcacacgtggcttcctcctcctcatcatccaagaagctgtcgctcaccttcgtcgtcctcctcctcgccgggctcgtggtgctcggcgagatggccggggccgcgacggcggcggcggcggactgctcgacggtgcgctgcatccagggaggctacatcacctgcaagaactacccggggaagaagctcgacgggtgcgtctgcctgtgcgcgcccaccgacggcgagcgctgcgtcctccacctccacgacggctcctcctacaagtgtcgcgcgcccaactaaactagtactacaattgctgctgccccagcctcgccggcgtcgccttcgccgccgccgccgccgcggcagctttgcttcttgttcagcgaatgtagcgccagcttacctcacaagctgttgttatacaacttcacaccgataataatactgcggttcatggttcagaataaaatttagagctggttggttttggggccaaag

SEQ ID NO: 9190 - DNA, 2109 bp, Oryza sativa
  ref <308>: DATABASE ACCESSION NUMBER: AK106538
  ref <309>: DATABASE ENTRY DATE: 2002-08-28
agctaatttcgagctgcaccacctccgggttgaccaacccagccgcccgccaatggcgaccgccgccgccgacgagctcgcgctgcggcggctggacgacgccacccgcgacgcccggaggcttcagctcgagaccctccgcgccatcctcgccgagaatgccggcgccgcctacctccgccggtacatcccctccgacggcggcgcccaccacctcctccgctccaccgacctcgccgcggcggccgacgaattccgcctcctcgtccccgtcacctcctacgacgactacgccgagtccatccgccgcgtcgcggatggcgacgctgcccccgacgagctctcgccgcgccccctcctctgcttcttcctcagctctgggacgagctcgctgcggccgaagctgataccctacttggattcgccgggggcgagggccgccaccgccgccgtgatgcaggccaactccgccctcgtcagaaggtgctgttccctccacggccggcggtgagcaaggcgctgtggttcttgtacgccggcgaggtcaggaagacgaagggtggatacgaggccatggcggcgacggcgtggggcatccggagcagcggcatccggggagcctcgccggtgatgtccgcctgcgtcagccccgccgaggtcatcctcggcgccgaccaccagcagcagatgtactgccacctcctctgcggcctccgccgatgggacgccgtcgactgcatccgcgcgccgtacgccgccgccctggcgcgcgccctccgcctcctccagtccaagtggcgtcaactctgcgatgacctcgagtgcgggacagtctgcgccgacgtcgtcaccgacgcggcgatgagaggcgccgtccaggacggagtgctcgccgggccatgccccgagctcgccggccgcgtccgccgaatctgcgagagggatgactggcgcggcgtgctgcgccaactgtggccggacgcgaggtacatctcctgcgtcacgacggggaccatggagcagtacttcccggcgatcaagcacttcgccggcgaggcgttgccggtgctcggaacggactacctcgcctccgagtgcgccatcggcatcaacctggagcgcacgtcgccgcctgaggaaaccacctacgtgctcctccccagggcggcatacttcgagttcatcccgttcgacatggacgccgccggccgcggcgccgccgcggcagagccggtggacatcgccggcgtggaggccggcaagacgtacgagttggtggccaccacgttccgtgggctgtaccggtacaaagtcggcgacgtcgtgaagatcgccggcttccaccactcctcccctcggcttcagttcgtgacccgcgcgccgccgccgcaagaacacggcgaggtgctcaccgagagggacgtcatggccgccatggacaccttccagctcatgctaaaggacggcggcgaggttatcgaatttgcggcgttcatcattgacggcgacggaggccagcggcggcggcgatgcgcgacgatcgccgtcgaggtgagcaatggaagcaagctgctcgaccatgagaggtcagccgccttcctcaggcgatgcaccgcgccgctcgagggctgcctcggcggagcgtacaggctgagcagagccaccggcgacgtcgcgccgctggaggtcgccgtggtgaggcccggcacgttcgacaggctcgccgaggccgcgatccgcggcggcgctccggcgaaccagtacaagccgcccagatcgtcaggcaccggcacctcgtcgatgtgctgcaatcctccgtggtgtgcagcagcagctcaatcactgaaccagctgctcactagcatctgtctcattgtgtcactgaaccagcggcagtttcttgatcgtgagtccaattccggcactgacaaggtgttcatctccgattcgattctgaattttcagcactggggaggtttcagtctccgattcgatctacaagaagaatccctcaccctttataaggatcacccaagctagagggaatcgtcggtcggttgctctcgtttggtcagcgctgatttcagaaattcagacttgcgtccccgc

SEQ ID NO: 9191 - DNA, 1961 bp, Oryza sativa
  ref <308>: DATABASE ACCESSION NUMBER: AK106539
  ref <309>: DATABASE ENTRY DATE: 2002-08-28
agatcattggcagtcaacctcccatggttggtactgatgcatcccaaagtagtgcgcatgctggattatggaattttccatcaggttcagcagatatggcacgtcacagtgcatctatttcaggcagggtcccagcaggaccaaataggagcgatgttgcaggagctgatattcatcaaggctccatgtcacagaagagtggaagatcctctggaatggaaagccctgccagtctgcaaatagaggatactagatctatgaattcacatgattctttgaagtcagatgaaaaaacaagcaaaaaatcatcttctaagagaaaaagagtggatccaaaagcagcaggggacttgcattctgaagacaactcaaaatcagatgccatgtctaccggacaaaatattagaaagggacacagcctggcaaagctggtactcagggtcaactttccaggacagtcgaacacgatccatcacatacattacaagttggtaatgctcaggtgccaccgttacccagtggtgcacctttctttagggctcaccaggaaggaccatcagcttcttctgcaaggactatagacaagactaaaccatcaaatccattcacaatggcacaaatttcaaattttgctgaaggactagcttctggcaacattcctgctgagttgcagaaaagtatattgggaggagcaaatctacttaatgctagttttggctggaaccagaatgcacaaggtccagttatgaagaatactcaagggtctgttcccaacctaatgagacctggtgttaatgtcgaagggaaagttaacttaggatcacaaggaacttttaattctatgtctgcatcacaaatggattaccccacagttcctccttatgtgtcttcttcctttggaggtggtccacagtatcttgacaaagggaaagacttgacttcaggcaatactggcagtgaactaaattcttctaaagctggagctcagctggggatcatgcatggcagtccaatgcaagaaaggcacggaattgtcagagcacctcagagagctggttcatctcaaatgtctcaaacctctcccagcattccattcaaagagcagcagttgaagcagctcagagcgcagtgcttagtatttcttgcatttagaaataatctgcagccccggaaggtacatcttgaaattgctttaggtgttggtccccctgcttcagaaggtggcagtgcaggtcagagaggtagtgagagcagaatggctgatggttctggaaaggaaaatggaaacagccaggaaaaccctgctatttttggtaggcaaagtgatatttctagacttcaatcaacatctacaggcagtgttgcggatgttgattccgcatcaaaggacccagaaattgttaaaaagaagatcaagatagctgaacatgagaaatcatttgaagcagaaaatatccagcaaaccgttcctatacagggaactgattctgaaatgcattctcaagaaacgatatctcccatgccatctgggcaactgcattactttcagggagatacaagaaaaactacccctgagatctacaaggctgatgcagaaaatttgaataggaacttaggctgggtaggaggccagggaccatctcctttgggtggtaataggcatactagtatggaagttggcctcttggccaaagatgaagtgtccaaagaaccatttgcagttttgaggcctcatcatatgcctgttgatggtagcaaccacaatttatctggaaaggatcaaactcctgagacagctggcaatgaaattgataatggtagccacatgggagagatgatatttgagcgatctgcagatgaaggagacgaagatctttctgagcaagatgatttaccattatctcctccgaagtacacaatgactgataaatggattttggatcatcagaagagaagatatg

SEQ ID NO: 9192 - DNA, 1964 bp, Oryza sativa
  ref <308>: DATABASE ACCESSION NUMBER: AK106540
  ref <309>: DATABASE ENTRY DATE: 2002-08-28
gttttatgtagtgagcttgagagtgagaatgctgaagtcaagaaagcaaggaggttgaagataccaattctgcgagaaggttaccttggagaatgcattagaaaaaacagagtgcttccatttgatttgtataaagtagaagctgcattggaatcttcgaaaggaggcacaatgactgttaaagttaaagggcgaagtgctgttcatgagtcctctggtttgcaagatacaggtcatattcttgaagatggaaaaagcatatacaatacaaccctgaacatgtctgacctgacacgaggtgtgaacagctattatatacttcaggtcattgaagaggataatgggtctgattgttatgtattccgaaagtggggacgagttgggaatgaaaaaattggaggcactaagttggaggagatgtcgaaaattcatgctattcaggaatttagaagattgtttcttgagaagactggaaacccctgggaagcatgggaacaaaaaacaaatttccaaaagcagcctgggaaattttatccacttgacattgactatggtgtaaggcaaggaccaaagcggaaagacattgacaaaatgaaaagttcacttcctccccagttgctggagctcatgaatatgcttttcaatattgaaacatacagggctgctatgctggaattcaaaattaacatgtctgagatgcccctgggtaaactaagcaaggaaaatatccaaaaaggtgttgaagcattaactgagatacagaatctattgggtaacactaataatcaagaactggcggttagagagagcttgatcgttgccgcgagcaatcgtttcttcacccttattccttctattcatcctcacattatacaagatgaggatgatttgatggtgaaagtgaaaatgcttgaagctctgcaagatattgaaattgcttctaaacttgttggcttcgatagtgacaatgatgagtctcttgatgacaagtacaagaaacttcgatgtgccattacgccactccctcatgattgtgaagattacaagctagttgagaagtatcttcttaacactcatgctcctacccacaaggagtggtcactggaattagaggaagtcttttcgcttgatcgagatggagaattcagcaagtactcaagatataagaataatctacataacaagatgttgttatggcatggttcaaggttgaccaattatgttggaatatttagtcaaggactaagaatagcacctcctgaggctcccgtgacaggctatatgtttgggaaaggcctctactttgcagatttagtaagcaagagtgcacaatattgttacgtggataggaagaatccagttggcttgatgcttctttccgaggttgctctaggtgacatgtatgaactgaagaaagccacgtccatggacaaacctccaagagggaaacactcgaccaagggcttaggcaaaaccgtgccgctcgagtctgagtttgcgaaatggagggatgatgttgtggtgccatgcggaaagccagtgccagcatctatcaagacatctgagcttatgtacaatgagtatattgtctacaatacatcccaggtgaagatgcagtacttgttgaaggttaggttccatcacaagaggtgactagaagacttgaggtaggagtagaaatgtagaattaatcagtggaagtatctccatcgttatcagtagtctgtggtggctacgcttttgatgtgttagaatgatttatccagtagtttcaggttggtaggaggttatgtgctgctcgcgtatgatccgttttggggtatgttgcatgggcatcgcgcgagtggcgcaagtaaatcccctgcgcatgccatgggcatttgatagatgtttgcctaattttctgtggcaatgtgcgcatttggcatctctgtttagcttgctattttatcatcactcgcgtt

SEQ ID NO: 9193 - DNA, 3602 bp, Oryza sativa
  ref <308>: DATABASE ACCESSION NUMBER: AK106541
  ref <309>: DATABASE ENTRY DATE: 2002-08-28
gtcttgcgccgctgagtttctgaccccgccgcggcctccgccgtttcgtacgccttctcctctcccgcgcgcacccgcctccgcctccgccttccccggccgccgccgccgccgcaggagaggagacgcaggccgcggcggcgtcaaccgccgctctccctttgccaccatctccgctcccgacacacactccactccactccagtccacagcactaacccatcggtcccggcgatccccactagtgcccctcctcgcccgcttgccatggcggcttgcggcgccgcggcggcggagtattcagctctcctgtccctctcatgtgggcctatcactcgccgccgtttcgccgtctcctgccgcgctcgaccgcccggcaacctcagtgcacagcagaagaagaagcgagggaaaaacattgctccaaaacagcgctcttcaaatgcaaaactcttgcttactactgaggaaaatggacagcttccaagtaccagtttgaggacttctatggaacgtcctcagaagagtacatccagtgaggacgataccaatggggctattagccagatagatgaaaaaattgcagccattggtaatgaacagcaagagaggtcaaaggataaacatttcgaatcagactttcaacttgaagattttggggaaatgatacaaaacatggaaaagaatattctgctcctaaatcaagctcgtctccaagcaattgaagatgttgacaaaattcttactgaaaaggaagctttgcagaaaaaggttgacactctagagatgaatttgtcaaaagcacttgcaaccaaagggaacataaatacagatatccctggtgatcatttagagaaatttacaaaagaaattttgatagagagtgctctaagtggaggcaatccagcacatttgtgtgagtctccacttttcatggagctgactgttctaaaagaagagaatatgctacttaaggctgacgcacaatttcttaaagcaaagattgttgagtttgctggaacagaggaattcctattcaaattggagaaagaaaggtcactgttagacgctacagttagggagctggaagctaggtttctagttgctcaaactgatatctggaaagttgtccctctgcaatatgatgtttggatggagaaagtagaaaatctgcaacacatgcttggatgtttgaaaaatcatgtagagaagtatgctgcattgttggatcagcatgatgatctgcatgacaagattgatgagctagaagcatcactaaaagaagggaaaacatctgagttttctccttatgttgttgaacttctgcaacagaagttgaaagcagcaaaaagccatcaccaagcaggccatcaagaaacaaacactcacattcaagtatatcagcagttaactgaggaatttcaagataacctaggtaaactaatagaagaaagtggcagactggagcattctgcaaatagtatgccatcagaattctggagtcacatcctgctcatgattgatggttggttccttgagcggaaaataccaaatactgatgcacgtatgctgagagaaatggcatggaagagagatgaccgtatctgtgaagcctactttgcttgcaagggtgcagaagaaagtgatgttatggaaactttcctaaagctatcgttatcaggaaacagttctggcttgcacattgtccatatagcagcagagatggctccagtggcaaaggttggcggtctggcagatgtagttgctggtcttggcaaggcacttcagactaagggacatttagtagagattgttcttcccaaatacgactgtatgcaacttgaccagattactaatcttaaggttttagatgttgtcatacaatcctattttgatggaaatctattcagcaacaacgtgtggacaggaactgttgaaggtcttccagtctattttattgagccacagcatccttcaaaattcttctggagggcccaatactatggagagcatgacgattttaaacgttattcatactttagccgtgcagcactggaattactttaccaatctgggaagaaaattgatataatccactgccatgactggcaaactgcatttgttgcacctctatattgggatatatatgcaactcgaggcttcagctcagctagaatttgtttcacttgccacaacttcgaataccaaggtacagcacctgctcctgatttatcatattgcggccttgatgttgagcagttggatagaccagacaggatgcaagacaatgcacatggaagaataaatgttgccaagggtggaattgtttattccaatattgtgacaactgtatcaccaacatatgctttagaagtgcgctcagagggtggtcgtggtctccaagatacacttaaaatgcattccaggaaatttgtggggatacttaatggaatcgacacaggaacatggaacccttccacagacagatttcttgctgtgcaatatagtgctactgatcttcaggggaaagcagcaaacaaagcatttctcaggaagcagctagggctgtattctgaggatgcctctcaaccactggtagcctgcattacgaggctagttcctcaaaagggtctacatcttatcaggcatgcaatatacaaaacagctgagttaggaggacagtttgtactcctgggttcaagtccagttccacatattcagagggaatttgagggtgttgcagaccaattccagaagaataacaatattaggttaattctgaaatatgatgaagctttgtctcattgtatttatgcggcatctgacatgtttatcattccatcaatgtttgagccttgtggccttactcagatgatagctatgagatatggttctgtgccaattgttcgacaaactggtggattgtgtgatagtgtttttgattttgatgatgaaactatacctgtggagctgcggaatggctttacatttgctaggactgatgagcaggatctaagcagttgcttggaaagggcattcagctactacagcagaaaacctatggtttggaaacagttagtgcagaaggatatgcagattgatttcagctgggattctccagcttcacagtacgaaaacctttatcagagtgctgttgctcaggcaaggggagcggctcaaacataaaccttttcatgatgacattgtgagcttagattctcccaagcgcagagacaatcgtcagttttatcatatctgaaccaggcatatgctgaagaaatattgttcttctcacattcacagaattcacacatcgtgatccttgctgttgccattcccgaaagaactgagaaagagtagtcttacagttgatcaagatattgcattttgcagtcagtgcacggaactagttctgggtttaatggggatgagtaatcataatctatactggattgcccccctctaaattccccccaaccgttagtttttgtgggaatgcaagaagtaaatatgtgcactgtagggtgacattcgcatacatgatactgtacggtttattcagatcaacgtttgggtaatgtgactacttttgagtttgagag

SEQ ID NO: 9194 - DNA, 1476 bp, Oryza sativa
  ref <308>: DATABASE ACCESSION NUMBER: AK106542
  ref <309>: DATABASE ENTRY DATE: 2002-08-28
gctcgctctcacccgcccacggatccgatccgcctccactccctcccccaccggcgggcggccgcccgagcggcgcggtgctcctcctccctcctcgtcgtcgtcgtcggcgccggcgatggtcgtctgcaaatgccgcaaggcgacaagggtttattgcttcgtgcacaaggttcctgtctgcggcgaatgcatctgcttcccggagcatcagttatgcgtggttaaaaattatgctgaatgggttgttaatcctgattatgactggccacaacactgttcatcttgcaattctgttctggaagctggaagcgaagaaactacacgattgggttgcttgcatgtgatgcacacaagatgtttgatctcacacatacaaagttattcaacccaaactgcaccagctggatatgtttgtccttcatgttctacacctatatggcctccttcaactattaaagatactggctcgcgccttcactctaaactaaaggaagcaatagcccagactggattggagaagaacgtatttggaaatcattttgtgacaatgcctaaagctgatactcgcacccctcctgcttttgcttcagatcctcttaaacgtgtatccatttctggtgatagagaatcaaatggtgcaaacataatcaattctgctatagatgcaaatgtgcaatctggtggaatgtattcttctgctactgtgggatctgggacacctagtcacgttgaaccagaaatagttgaaatagatggtccaagtccaataacaactcagttccctgaacaggagtccaacttcatcagaagtcctagcccacatgggccgagtgccatgacaagaaaaggtgctaactatgttgagagacaaaattcagagatttcttattatgctgatgatgaggacgcaaaccgcaagaagtataccaaaaggggtacattccgtcacaaatttctaaggatgctgctacctttctggtccagtgcattgccaacactgccagttacagcacctcctagaaaagagagtgatgctccagagggccgttcacgacatcaaaaatcatcaagaatggatcctacaaagatcttacttgcattggcgatcatggcatgtatagcaacaatggggatactttattaccgtttgacacaacgcagtctttccgagaactttattgaggatgaacctcaatagtaccctgaggttgtcaatcttgcagttcattcctggttatgctgctgattccaagggttttataccctccttgtatttcttttcttctccctttttgtggggctttcttggtggctgagatgggtagttagatactacataagaattatagtagactgcttccatatgatgattgatgtgcatgtttatgtaactataatgctataaaatatcctctttgttatttacacctgatgagaaatcatagaaattgccaccatttgtttatctacctc

SEQ ID NO: 9195 - DNA, 1746 bp, Oryza sativa
  ref <308>: DATABASE ACCESSION NUMBER: AK106543
  ref <309>: DATABASE ENTRY DATE: 2002-08-28
gtgcatatgtaatgaaaaatgatggtagaaacacactcaaattctctttcaaaagcaacagtactaagcctgcattagattcatctgaacaagagaagaatgctatcaagagctcagggtcaaataagaagcattccatgaagaaagggaatcaaaataataaaacagttagcgagcaggatgagatatttttggagaaaaggaatgaaactaaatcattgggtagtttgggagatcaaattgcagatgttactcgtgataagagttcatttaaaaatgatgccgatgcgtttgtgctgtcttcagctcaaagtgcagagaaggctttgaaattacaatctgccaaagctgcagcacataatgctgatatgatacccaaagtcaagattaaaggaactaaggttccgagtttgcatttcaaggatgtaggcgaggaaaatgctgccaagagtgacacagggaaaggtaccaagttggttattcatatcggttcacgacacaaaagtaggagtggctctcccaagtctgaaatgtccaattctcagaaagagcaagagctggtttcaatgcatggagggaaagttgatgtgacaagccagttcaaaagctctagaagtgaaataaaagaaaaaagtgtaatgaagctagttagagagactggagtacaacaaaatagccttctaggagatctaggtgcttcaaaaaagcatgcaaccggaaaaaggagcaatgctatagtttctgcaatggaaaatgcaagtgaaagtggtaccagaagcagatcgtttggacaaaaacaatctgttaatcatctgactgagaaccaggggaatgcttcattttctgtgaacaactctcctgacagcttgaagccatcattgctcaagcttaaatttaaacgtccaatttttgagcagccaagcactcagtcttctcaaccagaggagccgggcacctgggcttcaccgcaagaggagttaaatgttgctaaaggccagagatcaaagaggaagagaccttcattagacaagatggatggttcggaaagtaaggctccagctgccaagagacatgagcagagcacaggagaagaagcaatggatgcgaactggatcctgcgcaagttgggcaaggatgcgattgggaagaggattgaggtccagctagcttctgatggcaaatggcatcagggggtagtctcgaatgtaatcaatggcactttgtgccttcagttagataatggtaggtctgagaacatagagctgggaaagcgggcaatccgcttgatagcacaaaggtcaaagagcggaaagcgatgaacccattttgcgcctgcctccctgttcttgctctcagtcaacttcctgccaccagggtagtaagcagacctctccaggctccagcatttggatcgtcgcagtctctgattcatgggagattgggaggtctgaaggtctgccgttcttgctgccttaagctgactggatgagacgtagaaatgcaacatcatccgttgcgcggtgtctcactagcctagcatgtaacagactagtttttttttttgtcctgctgcatgaagcgcattggcttcattttgacttctggtagtgtaggaacaaacaactgggaaggctttttaggggccaccctggatgtagaagaaatgcctgatgatggccatgtacatgtagctgtagctgctgaatgagttcttttttttaaccagtttacccagaattccctgtg

SEQ ID NO: 9196 - DNA, 1620 bp, Oryza sativa
  ref <308>: DATABASE ACCESSION NUMBER: AK106544
  ref <309>: DATABASE ENTRY DATE: 2002-08-28
ctctcctctccgccattaaacctcacaaaaataattaaaaaaaatacccccaaactttgcaaaattttttctccccaaatccacccaaaaatccttcatccccaatcttctcaattcgcgaattcatcctctccagcaatcgccccccagtttttgttttctctttctctctctcggttttgtgtttctcgaggtgtttctttgtggccttctcgtcgccattcttggttggattagggttagggttcgtcgggatgagggtgcacgaggaggcgtcggaagacaaggagcgggaggtggaggaggcgccggacctgatgccgctgtctccgccgctgaccgccgccgccactgccgccgtggttgcggtggcggggcagcggctggtggtgggctacgccctgaccaagaagaaggtgaagagcttcctccagcccaagctgctctcgctcgccaggaagaagagcattcattttgtatcaattgatgagactcgtcctctctctgaacaaggcccgtttgatattatattgcacaagcttactgacaaggagtggcagcaagttttggaggattatcgtgaagaacatccagaagtaactgtccttgatccacctaatgctattcaacatttgcacaatcgccagtcaatgcttcaagaagttgctgatttgaacttatcaaatgcctatggtgaggtttgcactccacgacagctggttatcatgaaagacccattgtctataccatctgcagttgccaaggctggactaacgttgcccttggttgccaaaccattggtagttgatggaacatcgaaatcccatgaactatctcttgcatatgtggagacatccttgtcaatgcttgatcctcctctggttctccaggaatttgtcaatcatggtgggatcttatttaaggtatatgttgttggtgaaacaatacgtgttgttcgccgattttctcttcctgatgtaaacatctatgatctggaaaacaatgatggcatcttccgttttccgagagtttcctgtgctacaaatactgcagaagatgcagaagttgacccttctattgctgaacttcctccaaagccgcttctagagaaacttgggagggagcttcggcgcagactgggtcttagactgtttaacttcgatatgattagagagcatggaagaaaggatcggtactatgtcattgacatcaactattttcctggatatgggaaaatgccaggctatgagcatatattcattgacttcctactcagccttgtgcaaaacaagtacaagaggcgtttaagcgggagctgaagtgtagagaatatatccagccgagagtgataccattgacaacaaaatgccaccaatgttagctggcagcttagatagattttttttttcagtttgtacaggtcaaggagatgttagctttgaggcagatgcctgacgagcagttcaaaaaaaaaaaaaaggctgcttagtgccaggacgatattaagaacaaacaaaaaaagggaaagagaaaaaaggttcggtctctccgtgcccaacctgtgtaaatcgttcactgagttccagcctgaagcttttcaacaaaatgatgtgattgccc

SEQ ID NO: 9197 - DNA, 1756 bp, Oryza sativa
  ref <308>: DATABASE ACCESSION NUMBER: AK106545
  ref <309>: DATABASE ENTRY DATE: 2002-08-28
aaagacttccggtccgtaccttcgttttcacacgcgaaaactgcctttcttccggcatctggaagctactactactacggtcggtcctcgccggatcagatccggccgcctccccggcggatggcggagcagggggcgggcgaggcggatgcgggcggcggggagccgccgccggcggcggtgatgacggcggcggcggaggcgttggcggggcagaggtcgctgccgacgccgttcctgacgaagacgtaccagctggtggaggacccggcggtggacgacgtgatctcgtggaacgaggacgggtcgacgttcgtggtgtggcggccggcggagttcgcgcgggacctcctccccaagtacttcaagcacaacaacttctccagcctcgtgcgtcagctcaacacctatggatttaggaagatcgtgccggaccggtgggagttcgccaacgactgcttccggcgaggggagaagcgtttgttgtgtgatatacaccgccggaaggtggtggcggcggctgccgcggcgccgccgccgccgtcgccgggatggcgacggcagctgccgcggtggcttcgggagctgtgacggtggccgcggcgccgatacctatggcgctgccggtgacgcgggcgggctcgccggcgcactcctcggaggaacaggtgctgtcgtcaaactctgggtcgggggaggagcaccggcaagcgtctgggtccggctctgcgcccggcggcggcggcggcggctccgcgtccggcggcgacatgggcgaggagaacgagcggctccggcgggagaacgcgcggctgacgcgggagctcggccacatgaagaagctctgtaacaacatcctcctcctcatgtccaagtacgccgccacccagcacgtggagggctccgcggggatatcctccatagcgaactgctccggcgagtcgtcggaggccgttcccccgccgccgcctctccccccggcgatactcgatctaatgccctcgtgccccgccctggccaccgccgccgccgctgcggggctcgccatagacggcgagcccgacccgagcgcgcggctgttcggcgtctccatcggcctgaagcggacgcgagacgacgccgccgccgccgccgacgaagacggcggcggcgaggatcaggccgagcacggcggcgcggacgtgaagccggaggcggcggatccgcatcccgccggcggcggcggcggaagcagcacggaggcgtcgccggagtcgcacccgtggcccatataccggccaacccccatgtaccacgcggtcaggctcacttgcaacgggccggacagggccgggtccgaccaagacgggtccagctccagccaaacgatgggacctggtgaattcgacgatctgcaaaagatgatggtggtgcaacagagcaacttcgtgatgcactggggacgctcggaatgcggtagtggcgtaaggggttttggatggtgatggcagacaacagcaaatggtgttgtgatccacggaggcggagatggtgcggtgatgggtagctgggactagttccaattctccctttccatcctctcgggttgcggcggaaagttcaagtcatcgttgaaggtttaaagctaactcttcaagctttgtgtgtgtgttggtgtgtttgtgtgttttcctctgcatgaggattggagtctaagaacttgtatgttatggttgtgtgatatagaggctagattaataaaaaaaattcattatct

SEQ ID NO: 9198 - DNA, 2015 bp, Oryza sativa
  ref <308>: DATABASE ACCESSION NUMBER: AK106546
  ref <309>: DATABASE ENTRY DATE: 2002-08-28
ctctctctttctcgtctctccaatggcggcggcggcggcgtcgtcggagtcagcggatgccgccgccgctgggccgtcgacgctgagcatctacaaggcggcgcggcgcatcaagcggcgggagagcacgctgtacaacgcgctgcggagcgtggcggacgacgccgcgttcgtggcggagatcgcggcgctgtggccggcgctgccgctggtcgccaacctccgctgcgggctctggtacttgccgccccgcgccgtcgccgccacctgctacttcaagtccaccgatgggcacgcgggcaactgggccttctccaccgcccgcctcaacctccacctcgccctcctcgctggggagagaggagggtgcataattgttgattcaacaaggagagggaaacgtttccctgacagcatgtcaaagaccatacccatttggtgttgtgtcctcaaccgagcaattgagaggtatcggctgcagactaacaacaagtcagctgctgtagccaacaaagacgctgaaaagatctctgaatcatcaaactgggataactcagtgcatcttcctgtatgggttctagagactgagaaaaatgctatagaggggcgtatcgaggaatggacaacccaatttgaatcatgtggtgcagacattcgttctcttgcgttaagtttgaagaaaccactacgtccattgtggatatcacaaaggacacggatatggttaaatgaagttccagagcttgaatcatgggatttcacccctatcatattagtttcagcatctgcatctggtgcagtagctacacaaaggatgacttcagagttcagctggcactatattcctggagctggagatgatgaagagagttgggcacgtggtctcactcctacattattctggaagcactcatatgatctgcttgatggtggaccagacctttgtaatcagttagttgcagatattgttgaaaaagatagggtctatcgtgcacagagaggcgaatattctccccaaattacagctaagcctttgaagtgttcaagccatgatggtcctttcagtaatggtgatcatacaagtattgtgcaaccaatggactcggatcctcctaccgttactgctatggacaaacaaaattccagtgatggccatatactcttctggattgggacatcaaaccttgcagtagcatcaactctccaagttggagattccttagctgaagtggattgtatactgaactgtgacagcacatcaaatttacctttgacttcatcagagaattcttaccttgaactacctatggtgggatcaaaggacgaccggttttcgttgatgaaaaaccttccaaaagcagttagctttgcaaacaggaatttgatagcagggaagaagctactaatatgctgtcaaaatggagaggatataagcatctgtgtggccttggcgataattacacgattatttgattgcgatggattctttgatcatggtaattcatttctgaaaggagacgtcacgaagttggagatgaggaagaggctggtttttgtttgcaaatatgctgttaatgcaagaccatctagaggaaacttgaagcaggtctatggtttcctttgcagcgagaaggaacagttttcttgtttgacgtagtttatttacgtctagtcttgtggatcctgatcagttgtttcctttcctatcccctgcaagatgcatctatgtgttccgatcagttagggaagctctggtttctgagtttttcatgtcaactgatgaactgctagtgtatatggggaaccaatagtcgcaaattgcccttgggatttcactgacaaacaacctggagttgatctcataccaggttaatcgacaaactggcactgcttattaacctgttaatgatacgacggtggtttctgtaaaatcatcccagtgggacgatttgcaacagtgggtgagaacttgcagtattattagggcagtaccgttcctaatgttcaagcaacac

SEQ ID NO: 9199 - DNA, 1467 bp, Oryza sativa
  ref <308>: DATABASE ACCESSION NUMBER: AK106547
  ref <309>: DATABASE ENTRY DATE: 2002-08-28
gagcagcggtgatggccggcgtgggcgtggtagtagatccggaggcggtgggcggcggtggagatggaggtggagatgggcggatgaaggaagggttggcgcggcgggcggtggaaaacctgaggttccggtcggtgtggggcgaggtgaacggcgccatgggcgacctcgggacgtacatccccatcgtgctgtcgctggcgctgtcccggcagctggacctcggcaccaccctcgtcttcaccggcatctacaacgccatcaccggcctcctctacggcgtccccatgcccgtccagcccatgaagtccatcgccgccgccgccctcgccgacccctccttcgccatcccggagatcatggccgccggcatcctcaccgccgccttcgtcctcttcctcggcctcacccgcctcatggacctcgtctaccgcttcgtcccgctctccgtcgtgcgtggcatccagctcgcccagggcctcaacttcgccatggccgccgtcaagtacatacgctacgagcaggacttgggcaagggcaagtccctcgggcggcgcccctgggtgggcttcgacggcctcgtgctcgccatcgcggcggtctgcttcatcgtgctcgtcaacggggccggagaagagcaggagcagcgtcagcagcagcagcagcagcaacagtggtggcgtcgtcggttgggttccgttccttcggctgtggtggtgttcgtggtgggcgttgcgttcgcggtggcgcgtcacccagcggcggtgagggagctgcgcgctgggccgtcgcggatgcgggtggtgcacatctctcgggaggcgtggaagcaagggttcatcaagggcgcgctgccgcagatcccgctgtcggtgctcaactcggtggtggcggtgtgcaagctgacgcgcgacctgttcccggagcggaaggagtcgccgacgtcggtgtcggtgacgatgggagccatgaacctggtggggtgctggttcggcgccatgccgtgctgccacggcgcgggagggctggcggggcagtacaagttcggggggaggagcggcgggtgcgtggcggcgctgggcgtgctgaagctggcgctgggcctgctgctgggcggctccatgctgcgtgtcctcgtccagttccccgtcggtcttctcggcgcgctgctgctgttcgccggagtggagctcgcggcggcggcgagggacatgtccacgagggcggaggcgttcgtgatgctgctgtgcacggcggtgtcgctggtgggctccagcgccgcgctcggcttcctctgcgggatgctcgcccacgcccttctctacctcagggcctgcgcgctcagggaacgcatcgtctcatctcaaacggatttgtaattccaattccatttcactatcatctcaaaaaacgccagccaaacattcataaataatcactcaatacagctcgttccgtatgctgtcc

SEQ ID NO: 9200 - DNA, 1289 bp, Oryza sativa
  ref <308>: DATABASE ACCESSION NUMBER: AK106548
  ref <309>: DATABASE ENTRY DATE: 2002-08-28
cttcggcttccccaccacgacaaaacctcgtcctcatcgagtcaaaacaacccatgaaaccctaaaaccccaatccccccagcccaatccgccattgcctccccgatgcaagcgtccgcgcgcctctacaccgccgccgcatccaagcgggtgattgcgggcgtctctagcacgatctcgcgctcgtgccaccggacttgccgatggaagtcacatgccgcgccgctgtccgctcaggaggcgcccaaagggccaaagaggatgaccaagcaggagaggagggttaaaatagagaaatttgttgaggagtataaggcatcgaatgatggtaaattccccacgatgacgactgttcgtcaacatgttggagggggtcactacacggtgagggagatagttcaggaacttgagtacaaccagagaatgttacaactggaccagtctaaggcagctgagctgcccgaaacagctgaacattctgagcatttaaagcccaaggatgtccatggaaatgctcaatttaattctgaaagcttcagtggaaaccaaaatacagatgaccttcacctctcccagaaagttgctgctaccagcactgaaatcatagataagactgaaacatggagattggaagaatcacagatgacatcaggcacttctcattacactggagaaacagaagctgtcaagcaagaccttcacactgcagatagtttacagggtgcaaatgaatcaatcaagtcatgtcaaacagaaagtgacagcataaagaatgaagattccatatctctgggactagatactaaatcagatccaactgacctagaactaggggaaagcaaatctgacaagatagagctgaatagtacagcaaggtttaagaatgtcagtgaaccacctgtatcagatccaattgaaggtgataagacggttaaggcaaatgtactggacagagaagagaacccggaggttgagccgaagacaggtctttttgggagcctgaaatcttttgcttctgggatcagaaatttttggagaaaactgtgaatttcttgttatgtctggaagatgacacattcctcttgctgctacgactttgcgaggctggagcaaattatgacgttttctgaaagctgtagaattggttatcagcctttgaaatttgtgagcctgaagcaaattgtaaagtcgcctttaagctaccgaagtaatggtcaaattcatgctgtcacgttactgacaagctaggtatgagcattgtgtatccattgggcgatcattttagtttt

SEQ ID NO: 9201 - DNA, 1766 bp, Oryza sativa
  ref <308>: DATABASE ACCESSION NUMBER: AK106549
  ref <309>: DATABASE ENTRY DATE: 2002-08-28
agatcgatctaaactcttcactgaacccagccgccgccgccgccgccggctgcccccctccgccgctcaccggcgaccagccatggctcgagccccttccttcctcctcctccccttactcctcctcgtctcctcctcgctcacgcccgccgccgtccgcgcgcacctcgactcctccgcggcgccgttccacgccgccgcgctctcctccgtcccttactccgtcgtcgacgacctcgtcgccgaggactaccgcgcgctcgtcgacaccggctccgccccgtcggtgtacatctacctgctcaacctcggcccgcagccgcggccgtacgcctacaccgcggcatcgtcgccggccgatgcgcattcacctggcttctcccgctgcctcgcccccgtctgggctggcaaggagcggtacatttggatcgacctgggtgcagggccggtggactatggccctgcgctctccggtgaaggcgtgctcccccgtggcgagttccaccctctcgccgcgctccacggccggccgaggtcggagaaggcattggttgctgatcttgcttcgctggtgctcagtgcttacaagtcattgctagtgccttcgctcagaattccagtgcattacgagagctcgttgctggttcaggtctttcacatccatggacacgagagggatacgtccgggcttgattggggttcgatcgaacagtcgattcgtgatgggaatctggcatatgaagggcagaggttgaagtttgatttgaacaggatcaggttctctgactgcccaatttgctcgtttgcggttgcgcggtcgacaacctcgtttacgtccaggttcttgtttgataattacacgctgattgtgagtgaatacttggactccaagcggatgaggcaggtgctgtctgactcgttggaagagttgcacaaggtggctggtgtccatgataatgatgactatgacaaggttgtgccagtttttgtgtttgatttagattatgataagcttctgttgctagataggtatcaccaggcagtggcttttcgtgatatggtgatttctgtgaggacaaggagctcacagacggtcagcgactacagctgtaatggtcgacatgtgattacaatgactaggaatcttgaccggccgatcatcgcttcagttctgcagagcatgtggggtgtgtcaccgacacaccagtcatggagccctgagcacaatgctaccgtcgttgactacacttggagcactggacatacaccatttggcccattctcagagaccaaatcgctttcttttgtgcagaaagatgcagcccgtaggaatgttcttctaaccactctgaactacacaatcacaagcgctattgatgttttggagtcaatggctgcgcatggtggagagagtatactccttagaaggaaaaggcgtgttgaattcattcaaagatggaatctgctcacttataaactggagaaggtggtctcagccatgtcccgcctcgactacaataaagcgatgtactttctgagatcgtcagatcatgatctgtttgccgtccacactttggtgtatcaggcgtctcaggagttggaggcttctctggtttgcttcaaagatccaccatttccctggttgtcagtttccatgtctggaattttcgtttttggtttcttttatgtttactcgaagagagataaattgttcaggagcaaaaggaaacagttttgactgcacttcagttcacggatactgtttg

SEQ ID NO: 9202 - DNA, 1647 bp, Oryza sativa
  ref <308>: DATABASE ACCESSION NUMBER: AK106550
  ref <309>: DATABASE ENTRY DATE: 2002-08-28
gtgtttctgaaccggacttcggcagaaccccgaaacagggtgctggatcggacagcacacagagtactgctccaggatctggtagttcacgctttggttggttaggctccacactacagaagacaatgggatttgtttcaaaatcccaccggcaggctaaattagggcaacaaaacaagttttactatgacgaaaagctaaagcgatgggtggaggaaggtgctgagattcctgccgaggagcctcctctccctccacctccatcaaaaccctcattccagaatggtgtggtagactataaattaaatggccccatgagtgcaagtcatactcccaatggattcatggaagggaaatcttcaacttcttcagagcatggttcgggaatgccaccaattccgccaagccagaaccagttttctgcccgtggacggatgggtgtccggtccagatatgtggacacattcaacaagggtggaggaggaggagcagtcccatcctataacaagccagctgttgcatctgtgacaccacccagtggtgccaaattctttgtgcccactgcggctgttgttgctgcagagcagatgcctaaccaaacagcggaaacacatggtgaaaccttccgtccagatgagcgttcatccccagctgaaacgtcattttcttcacccccaccagcaacacaattttcagcaccactgatggtgcctaccattcagcggtatccgagcatggataacatcactaccccgaacaatggatccggattatcatcgggaagtaacagcagctcattctcaagatcacgagcagcatcgtggagtggaacttactctgaacaaattaatgctgtggcaggtgctagatctcctgaccagcagaccatgccatcgcccctcatgcctgggaagcagtcacatagtcgttccaacagcaactcatctgttcagttcaacagtttgacagaggatcttctgaggttgagctctgatatgctgcgactgctcagtatgacccatgattttatagaaacaacctgggtaaaataccttgatcctctcagcaaaccccctagaggagggagggagggagggagggaaaaagagaggaaatgttttacagtaaatgaagggaatgccacaagtgaaatggatatctcctgtcttgcacaaagttgtgggatggggaagtaaagcaaggtgtgcccgccctgtactcgtacaaacagttgtttttttgggagattttgtaggtattgttggttattatgggtttagagaaggggataaagagtcggatgtccttttttacatgtgagaagcagagagcatgtggacaccattgtacagataatccaccccagcccagccccagccctgcccccatattataattcattgaagacgcagagaattgggaattcatccgccccacatccttttttgtcattgtattattatcattttttttcttcataattttggagaaggatagaagagagggagaggtcaagatgtgtctggatattctagtgtaagaaagaagaaagcttttgactgcgtagagtgttgttatacttactgtaatgttcctataccatgatgatgataatattattctttggagtcgaccgatggatcaatc

SEQ ID NO: 9203 - DNA, 1680 bp, Oryza sativa
  ref <308>: DATABASE ACCESSION NUMBER: AK106551
  ref <309>: DATABASE ENTRY DATE: 2002-08-28
aaaaagcctcctcctctccacccctcgtcggcggcatctcgtcgcccccgcctcgaagcttccagaagcttctcctcctctctcctcccctccccatggcgcggcggggccaccaccaccacctggcggaggtggccctcctcgcgtcggcctccgaggacctcgccgccgtgggcgccggcgagagggaggggtggctcgacgaccccgccgtgctcccctccctcgcgccgcgcgcgcgcgccctcgccgtcgccagcgcggcgaggtccgtgctcgcggttgtcccggtcgccggagtaggcggtggggtcacggtgaggcccgcgctggggcccgacgacggccggatctccgcggtggagtgggtcccgctcgtcggggaggacgccgaggaggctggtggggagggagtggccgtcgccgtgggcaccgacgccgggtggcttctgttctactctctcgcaggcgatctactgcacaagcagagtatttatccttcaaagatactgaaacttaacttccgtgagaggaaggaaaacgcctgggaagattcgggttcagatgagctttctgtggttttccctggtgttattgcacgttttgatggtgctgaccttcagaacatgcttcaaaaatcattacatgaagttaaatcacacctgtggaaagacaaatctgaacaggaagatgctgaggaagatagttcctttggaagaataccttttcaaatttggaatgtaagcaaattcagttcttgtgcagatgctgcaattgttgggctgatgccacctcccttgctggaacttcagtcgagtcagcgccattattgtgcaattacagttggagaggatgctgtagtttctgcatataggttatcagaagacagaagcaggtcaattgttggagcaattttatcaagaggtgttgctgcaacattttcaacaatatcatctctgtctaaaattatatggcggagcgaaccatcaccaaccaagaaatcacgtcctaagcctcagtcctttgcaaaaacatcaccactaacttgcttgaaagattcaccgaggaagggtgaacggcttacactatctccaagtggtacattggctgccataactgattctcttggccgcattctactattggatactcatgcccttgtggctgtacggctgtggaagggttaccgtgatgcttcatgtctttttgttgagatgcttctgaacaaagataaagcatcgagctcactgcacacagaatatacaaagagtgactattgcctgtgcctagcgatccatgctccacggaaaggcatcattgagatctggcaaatgcgtaccggggcacgtcttctgaccatcccgtgccccaagggaagcaggatcttacagccatcgacgaggttcatgtcatcgcccttctcatcgttgtattcaccattggaggtttacctgttcaacggtgactctgggcagttgttgtattgaataggcacattggttaaatatatcttctcttgtgctgttttctttttttcttttaccgcccagggttgtacagtactattttaattcctgaatggctaggtgtttatgatttggcctttcaaggagataaataaataaagctagttttgtgtgattttgccaatatatgaaaagctaaagaattcctcatgcc

SEQ ID NO: 9204 - DNA, 1778 bp, Oryza sativa
  ref <308>: DATABASE ACCESSION NUMBER: AK106552
  ref <309>: DATABASE ENTRY DATE: 2002-08-28
gtccacggtgcgccgccaccccaagcaaagcagtggcggtggcggcggcgcggtgccgagcgcggccggcgcctcggcgggtgggggcgggcgccgctaccggcggtacggcgcacgtcggcgggcgagaaagcgccgctggagtgctgctacttacttggctgcggcatggcggcgggaccttcgctccgtcgcggcggccggcggttagccgctcggctaatccaaatccggccgggcaaagcgagcacattctccactgccttaggagcaaatttcttcactgcgtccccgacagtcaggaatatcttgtcttcaccgatgagatccgtgagtttcgctgatcggagcttcaggatcacagctggccccggattggctagaatcagctgaggaatgccaggaaggatgctccgatcaatatcgtctgccagttccactgcagcagcaaccaagctagcatcagttgtacccaatactggtttccatcaaagaatgatgaagaagcaataagttcttaaaggaatgatattattttgtcctaccccatggtgaacatttccccagactgatttcatgaccgagatgatgtcagtcttcttggtgaagtttgcaattccaaggaagcctttaagctgctgaagggcaatggtgatggccgctcccgccatgaatccaacgatggcagcatgggacaagaactctatgataaaccctagcctgcagcagagtacaatctcactctatggtagccactcacctgaggaatccgagcgctgcctgggtgaccccagcgaagaacgttgcagtgaaggccagccgggtgtactcttcctgattcttcttgggatcaaactcattctggaggagagtgccaagcagcagcgaaacgacggccactggaccaatggctatatccctggaacttcccatcatcgcgtatatcaaaggcggtacgaagctgctgtctgaaaaatcagcagatttccgttagaccactggctggactatcactcgagcacaccctatacaaatactagagctgtgctattcaggtcgctgctgtgcgtgcaagatggtgtttgatcgtcaggcacaaacctggggtatgcagaggctggcaatggtgaggccggagacgaggtcgcccctgaacttgcggaaggtgtagtgccggccccagtccagcaccgggaagaagttttgcaggctgatcaacaccttctttgacatcggctggtccttgtactgccgcaacgggtcgtcggcgaagaacgtctccttcacggcgtcggtgaactcgtcgatgagcttcttcttcggtgggaactcgaccttgtggccgtgatgatgatgatgatggccgccgtccatgtggctgtgcgatgacgtccggctggcgatgtcggcgtcgatggcctcgcccccgtcggacacggctcgcggcattgccggcgttattcaccggcaaggtgctgaaggcgaacctatctgcacatgaagcgcagtactgaagcaggtaagcacaaacacatcaaccttattacgatgaactaattatttacagataaattcagtcttgatccattaattcaatccagcagtactgccaaagcacctgcatgcatcaacgcatgcatggtcgacagtgaagaaaaaaaaaacttttgcagtacggagaaccaaaatatctgaaacatttgcatttacaacgcagggaagaaatctatatgtatgtactagtactactaacaagaagcagcaaaaatattatattc

SEQ ID NO: 9205 - DNA, 1258 bp, Oryza sativa
  ref <308>: DATABASE ACCESSION NUMBER: AK106553
  ref <309>: DATABASE ENTRY DATE: 2002-08-28
aaaaaaggccagcgaagccaacgcgtcacctcctctccccgaacccccaaccctccagaaccttccgcctcccgccggcgccggcgccgccgactcggccgcggaaaccctagcgtgcgctcgcgcccgccctcgctcgccggccacctccggactccgcctcctccgcctgctcctcgtctccggcccctccgccgccgtcgaccggtcagatctcgacgccgtcaagccgcgatggaggactgggattctgaagactttcagcccgcagtgcctagtgcaaaagctgagccgcttaaaagtaagtgggcagatgaagatgtggaagaagatgatgtaaaagaatcatgggaagaagaggaggaggagaaacctaaaccaccacctgtagaaaagactgcaccaaaacctagtgggaaaggtgctgcgaagaaaggaaaacaacaagcatcaactagttctgaagtagttcaagatgaggctctggatgatcctgctctagagaaacttcgtcaacaaaggcttgtggaagaagctgactttaagtcaactacggaactttttggaaagaaggacggcagtgaaaagtccctagataccttcatcccaaagtctgagagtgactttgcggaatatgcagagcttattgcaaacaaactgcgtccctatgagaaaagcttccactatatgggtctactcaagaatgtcatgagactttccatggcatcattgaaaggtgcggatgcgaaagatatatcgtcctccattgcagcaattgctaatgaaaagatcaaggctgagaaagaagctgcagcaggcaaaaagaaacaaggggcaaaaaagaagcagctacacattgagaataaagacgatgatttcatccctggaaagggtaattttgatgatccggatgagtacgatttcatgtgatcggctgtgagggaaccgtcatcttctatgtataccttggcaagcagagattagagtttgcggcatagttggtattttcattcagaggcacctgaacacttgaaacgattgcatgggaacaatgcccatttgttcgacgttgattttgactctcacagaatagggaagagcacctgtgtgctcgagctcgacacataggcgttttttcttattcttaatccacattgtgtttttggtctgttcatgggttgggatctatatttttttgccaactgtagtataatgtgtatctggtttatattggagtcctgcaagtgaatcttggtgc

SEQ ID NO: 9206 - DNA, 1567 bp, Oryza sativa
  ref <308>: DATABASE ACCESSION NUMBER: AK106554
  ref <309>: DATABASE ENTRY DATE: 2002-08-28
gctgcaacctatagctagagagctactgcggcactagtcactctctctctctctctatagctttgcctgatcatatcaataccaccgccctacaaatctctctctctctctctcaagaggaattgaactgaagttcttgcagcacggtcgagaagtaagggagttgagagttgagagagtagagaagagggagatggggagggagagcttgccgacgctggccatggtgatggtgcagctgggcttcgccggcatgaatgtggtgtccaagctggcgctggacaccggcatgagcccctacgtcctcatcgcctaccgcaacatcatcgccgccgtcttcctcgcccccttcgcctactacttcgagaggaagagtggcatggtgatcaccaagaaagtacttgtccagatattcttctcctccatttttggcgcgacgctgaaccaggtgctctacttcgtggggctcaagtccacgacgccgacggtggcgtgcgcgctcagcaacacgctcccggcgctgacgttcgccatggcggcggcgttccggatggagtcggtgcggctgagcgcggccgccgggcaggccaaggtgttcggcacggtggtctgcgtcggcggctccatgatcatgccgttctacaagggcccgctcctcaggctctgggcgtcgcccatccactggcggttcgcggagagcgccgcgtcgggcgcggcggcgccagccgcgggcggcgccgccgtcctcggcgacgtcctcatcatcctcagctgcgccgcgtgggccgtgtggttcatcatacagaccaagatgtcggagcggttctcggcgccgtacacgagcacgaccatcatgtgcttgatggccggtgtgcagtgcgccggcgtcagcgccgccatggacaggagcgtcgccgtgtggaagctcggcttcgacatccgcctctactccgtgctctacatcggcgtggtcgggtcggggatcgcgttcgcgctcatgtcgtggtgcatccaggtgcgcggcccgctgttcgtgtccatgttcagcccgctgatgctggtggtcgtggccattgtcggctgggcgatcctcgacgagaagatacacgtcggcagcgcgatcgggtccgtgctgatcgtcgccgggctgtacatggtgctgtgggggaaggcgagggagatgggctcgccatcggacctcgacggcggcggcggcggcggcggcgtggtggagctgaacggcaagggcgccgacgccgcgacgaccttgccggtgttctgcaccaccaccaacaagcacgagacgacccggaacggctgcagcaactgaagctgatggcgcaccggggcatatggatggcggatcacctgattatatatgcgctagctgcacatttcacaggctgttgcatgtgtgacaactacatcttgctggggatatcaattggtgcggtagtatatagatgtgggagtttgctagtggtagctaggtaaaagttgggggaggtgtgtgagactgtacctgtgccttggttcttgacattaaaaatggattgtgcacttgtgc

SEQ ID NO: 9207 - DNA, 1693 bp, Oryza sativa
  ref <308>: DATABASE ACCESSION NUMBER: AK106555
  ref <309>: DATABASE ENTRY DATE: 2002-08-28
attttctccccctcccggctgcagctcgccgtatcctgctttcttgccttgcgggcgtcgtcgtagcgtggtaggagtaggggagcccggcgcgcgggcgggcgcgggtggttggtgagtgcgcgcgcaacgcgcagcagcagcagcagcgggaaaaaaaaaaggctaactaagctaggacagaggagagaaaagccgtggcgctttgcggtcacgagattcagggggtggtttgcttttgctcgcaagggaagtgttgggggagccgtagacatccgaactgttctaatggcgaccctctggggggcggtggcggtggcgttgctttgcgcgatgtattggtgaggccggtactaggggagggggtagtagtagtggtacaagtggtggttgtcgtcgtcgtagtcttgtgggttgcgtgcgtgcgttcgtgcgcgccagcgaagttcttgcgacgatcgtgtggggtgggttcgtgtgctctctcgctcctgccattggttgatgagcatggggcattactccgagcagaggccggggttcgaggtgaccaaggactggaacggcgccgaccaggtcatgatccggtcgccgcggggggcgtccgtcctggtcagcctgcacggcgggcaggtcgtctcctggaggaacgaccgcggcgaggagctcctcttcaccagcagcaaggctatcttcaagccaccaaaagcgatgcgaggtggaattcccatatgctttccacagtttggaaattgtggaacattggagcagcatggatttgcaaggaacaggctatgggccatagatgatgaggctccaccactaaatcataatgataacaacggcaaagtttctgttgaccttctgttaaagccatctgaagatgatctcaaatgttggccacactgctttgaattccgtctcagagtttctctttcgacggatggagatctctcgttagtatcacgagtcaggaatgttaatgggaagccattcagtttttcgtttgcttaccatacatatctttcagtctctgacatcagtgaggtgagaatagaaggtctggagacacttgattatcttgacaaccttagccaaagagaacgttttacagaacaaggagatgctataacatttgagtctgaggttgacagagtctacgttggttccccaagcgtaattgctgtgcttgaccatgagaagaaacgcaccttcattgtaaggaaagaagggcttcctgacgtcgttgtttggaacccatgggacaagaagtcgaaaacgatggcggattttggcgacgaggagtacaagcagatgctgtgtgtggacgctgccgcagtcgagcgagccatcacgctgaagccaggcgaggagtggacggggaagctggagctgtccgccgtcgcttccaccaactgcagcgaccatctggactacccttgtagctagctccagtgttcctataatgcgttccagtagctatattcagatgctagttttgccccccctaaatcgaaaatcatgtactacgtttttccttgtacatgggagtgtgtactacgtttttcattgtacaacatgggggcgctagctaggtccgtcgtcttgatcagcctgttgctgatcagtctacccgtgtcatttgtcagatactactatatattcagatgcaaagttgttgtgacaagacttc

SEQ ID NO: 9208 - DNA, 2157 bp, Oryza sativa
  ref <308>: DATABASE ACCESSION NUMBER: AK106556
  ref <309>: DATABASE ENTRY DATE: 2002-08-28
attcaatgctgagaaccctgttgatggtaattatggtaatttgcatataccccaacggcgggtggaggctgtgaattctaagagcatgctggatgattggcaagagaatttggctattataactgcaaacaggacgaaaggtgatgatcttgtaattacgcaccttggagattgcctctggaaagagaaaaatgaggtggcagctgctcattcatgctatttagctgcggaactaaatatcgagtcgtattcagaaagttcaagaatgtgtctaattggtgcagaccatttgagatgtcctcgtacatttaccagccctgaagctatccagcgaacagaggtgtatgaatatgcaaaagttcttggtaattctcagtacatcctcttgccatttcaaccatataagctgatatatgcatacatgcttgtggaggttgggaaggtttctgattcattaaggtattgtcaagcatgcttgaaggtgctgaaagcatctggccgtgcacctgaattagaggcatggaagcagttgttttcatccctagaggagcggatacgcacctaccagcagggtggttatggtacaaatctagcccctgcaaagcttgttggaaaacttttcacatcacttgataaatctttgtcccgcatgatgggtacacaaccttcagcgttgtcaccagtgccacagggctccttaaccgaaagagattcctattcggctcctgcagctacaaattttgtgaataatcagccagtgatggctatgtcttctttgatgtcttctgtttcagagcaatctatgagtgaaatgtcaggaaatactggccctgacagaaaagtcacacataacagaagtgtctctgaaccagactttggcaggacccccaaccagggtgcaggattagataatgcacaaagcacatcaggttcaggtagttcacgttttggatggttgctgcagaagacaatgggacttgtttcaagatctcatcatcaggcgaagctgggggaacaaaacaagttctactatgacgagaagctgaagcggtgggtggaagaaggtgctgacatacctgctgaggagcctccccttcccccacctccaacaaaggccttgttccagaacggtattccagatcagagttcgaatggcccaggcagtgtaagttatactgctaatggattttcagaagcaaggcctttgaatccttctgggcctagttcagggatgccaccaatgccacctagccagaaccaattctcagcacgtggacggatgggtgttagatcaagatacgtcgacacatttaacaagggtggtgcaagtgccactggaccgtcatataataaaccagccaccccatccatgaatccactgtctggtgccactttctttgtgccaactccagctactgttgcgtcagagcagatccctgacccaacagtcaatgttcatcaggatcaaccatcttccacgatagctctgcgggaatcctcggcttcgccaccaccatcagtacaatcaataccagttcaatcaaatattcagcggtatccaagtatggacaacatcatgaccccatctggcagtgggaatggcagctcattctcaaggtcacgagcagcatcatggagtggagcatattcagagcagttgagcggcaatgctgtttcgagatcaccagatggacaacggaccatgatgcagtctccgttgattcctggacagaaacaatcccacagccgttccagtagtaactcatcacttcaattcaacaatggcctgggcgaggatcttcacgaggtagagctctgatacctgaacaaaagggtaaaagatgaggtgcgtccatcgtgtaaatcaatcatatggccatgttttgtttttcatgtcattttgtatttaatatctatgatgtctagagaggaaacaaaggagcggcgtcccttttcttttcttttctttttttacatgaaagaagtatgcggatgccgttgtacagatagatcactgccagttgatttgagatgccaaaggaaagaaatgacttggtgtaaagtgattactttgctactttcttttacccctttagagcatttgttcatttatttgaaaacaaggatggtctgaaataacaatgccgtgtggctgat

SEQ ID NO: 9209 - DNA, 2952 bp, Oryza sativa
  ref <308>: DATABASE ACCESSION NUMBER: AK106557
  ref <309>: DATABASE ENTRY DATE: 2002-08-28
agaaagagaagagagagagatcccctctcgcctcgcctcctccctcctgcctcctcgatcccgatctctcctcctccgccgcctcgccgccgccgccgtggacgcctcaagggctgatggaaaatttctccccgagaaccctgctcaatagtatcttgcgtatcactgtcttaacctccgatggctctactgcaaggcccaagcccattcagaagtactgccaaaatgtgtgtgatatctcaagcattgtgagccctctcatagaggatctatgtgagtctcctgaagagcaactcaatgaggtgttaagggagcttggcactgctattaacagagcttcagggcttattgggaactggcaacagacaaccagcaaaatatattttatatggcagattgaatcagtaatctcagatatccagggatgttctctacagctgtgccagcttgttaactctctattaccttctttgactggccgtgcatgcacatgtattgagaaactccaagacataaattatgaaaacatgtttgatctggtaaaggagtcttcattggagctagttgagacggacacaacaagtcctgagaatctgtcgagactatctagtacattgagtttgtcaactaacctggaattttacatggaagctgtttcccttgagaatctcagagcaagggcaatgcggagtgagaaccgtgaagaaatggatctggctgacaagatgatccccctggtcaactatatgcatgaccaccttctgagggaaacacaactgcttagcatcaatggggtgcccattcctgcagatttttgctgcccgctgtccctagagctgatgtcagatcctgttattgtagcatctggtcagacatatgagcgggtttatatcaagttatggcttgatgagggttttactatctgcccgaagacacgccaaagacttggtcactccaatttaattccaaattacaccgtgaaggctttgatagctaattggtgcgaatcacacaacattaggcttcctgatcctatgaaatccttgaaattgaacttccctttggctgcgtctgctctccaggattcgagcaccacaggaagcagccctctacatcctactgtcgctgctaagggtaatattcctgggtccccggaagctgacctttatatgagaagcttgaatagagcatctcctccacacagtgtagtccatcagaattctcatgcgcatgtgaaccgtgctggtcatgaagcctccattaagcaatcttcagaaaatgctaatggttctgcatcagatgtttcaaggttatctcttgcaggttctgaaacaagagagtctagtctggaagaaagaaatgctggttctatcggtcaaacttcagaacagtcaattgaggaagcatttcaagcatctaatttggacagggattcacatgaccatgtgggtagttcttcggtgaatggtagccttccaaatagcggtcaacttgatgcagaatgtgacaatgggccaagcgaaaggacaaattacagtagtgatgcatctggagaagttacagatgggccttcagcatcttctgctcctcagagggagcatctaatcccttctagattggctgatgttcgtagtagaggccaatttgttcggcgaccatctgaaaggggtttccccagaataatatcttcctcatccatggatacacggagtgatctttccgccatcgagaatcaggtccgcaagttagttgatgatttaagaagtgattctgtagatgttcaaagatcagcgacatcagatatccgccttttagctaagcacaacatggagaacaggatcatcattgcaaactgtggagctataaacttgctggttggtcttcttcattcgccagattccaaaacccaagagcatgccgtgacagcccttctgaatttgtcaatcaatgataataataagattgccattgcaaatgctgatgctgttgaccccctcatccatgtccttgagactgggaaccctgaagccaaggagaattcagcggctacattattcagtctctcggttattgaagaaaacaaagtgaggattggaagatccggtgccatcaaacctctcgtcgacctactaggaaatgggacccctcgaggaaagaaagatgcagctactgcattgtttaatttatccatattacatgagaacaaggcgcgtattgtgcaggctgacgctgtgaagtacctagttgaacttatggaccctgctgctggaatggttgacaaagctgtggctgttttggcaaaccttgctaccataccagaagggaggacagcaattggtcaagcgcgtggtattccagcccttgttgaagttgttgaactcggttcagcaagggggaaggaaaatgcggctgcagcattgcttcagctatgtacaaacagcagcagattttgcagtatagttcttcaagagggtgctgtgcctcctctagttgcattgtcacagtcaggcacgccacgggcaagagagaaggcacaggctcttctcagctactttcgcagccaaaggcacgggaattcagcaaggagatgaccttctcagaattttttgtaggtatacattaagcatctcctctgattccttcaggcatcggcttggctcctcatattgttgttgttggctcttgggtggccctatgtattgtttatagtcaaattgagattgtgctcatgtcatacaaatgttgtgagcgatgggttgggtgtttgttgttgagatggtgtaacttttggttctcttttcttttttgaaggatatctttgttcttgtataggttgtccattggtagcaacttacctattcaatgggattttgctttgtatatgctattaaccctgacattatgattgttttgaatggttgtaaaattcgatattgccctgcatgttgtacc

SEQ ID NO: 9210 - DNA, 2598 bp, Oryza sativa
  ref <308>: DATABASE ACCESSION NUMBER: AK106558
  ref <309>: DATABASE ENTRY DATE: 2002-08-28
cagtattaatttgatcttgtgatgatcttagttcttgtaccctgccttcccttgaggctacttccggatacccaaggccctagcgcgaagacgtgtgagggggctgcaggtgagtcgggctatcgccgtggagcgaccgtggtgaagcagcagctctacagcggccggatcagtgcggtggtccggtggctttacggttgctagagctgttgctgtttagggtcaactaggaggaagtgtctgtgtggtgattcatcacagttgcggcggtctcgacctacagcatatgtccatgatcgatgcgtgacaagagccgaaaaggatcatccattgttgatgcagtttttcaagcaagtggataagagcagcaagtattatgaatttcgctgcaaaactagattagtgaaaccatcaatcctccactttcagaacctatacaaggaagggctcttggagcaactgctacagtcaactgctctactggttagttggtcacttggtcgtcacttgtcagcctgacagtgcagcatctaaaagctaacttatacagtgtgctttatctctggtatggctgacctcagttgtaagttctgaattttgagtggtgttggttagaaccatttatctgattgctcttgttcatgatgaatggcaatataatgggattactcttaggcattgatggaaagtttcaagatttgtgcagtcaatgatggcatcataaattgcgtggatatggtaaaaatatatcatttaccagttttctcttttgctgaatcattgattgatctactatatttgatcttgatcaaatcatatttttgaactaatgtagttctttgacatgaaaaaagcttgatgttaagtacagaagaaccaggtatgcataatcattgtgtgggttcattttcttttttcttctgtagagttgcatgcattttcctttttgcttcgcccccgccccctgaatagaaatgtatacggagaactactgatctttagaatatcagagaaaaggtctaatctgatttgtatgatctctataaggatttggaactcaccagaaacatccaatttccatttctaagatagacaattatctttaccttaccctgtaattttttcgtttgaccaccgataattctgattccacatggatcttttatgtactttcttcatccgccatctttattcttgtaacagtggaaatgtacatcagagaagcccctagaactgctcctattacaaataagaccgtaacaagtcattaagctaatgtcttaagggatatattatgtactcactttataaatcaatgcagttcttagctaatacgtgctcatgtgatgaaatatttttgtgccttttcctttgctttctgcttgattgatgatttctagataaaagttttagatgatactaacaacagttttttcactctagaacaaactattaggtagtaatacaatgcttaagaaacactccattatggtgtaatgtcttcatttcctgactgcttatccttctatacctcttaaacctagccattttatttgtttataccgaaacctagacattcaattttgtccggtacttttactataagtggttagtagatgatgccatgtatgttatcttgggacaaaagtaagataattcagtggcttgatgaaactgtacaggaatatccccttttttagtaatctattgtgaaatcagttgctagatgtttcactaatcatgacgggtgggttagtaaatatgtgcggattattaccgggtaatacatttatccacatactgatcataattaagaggaacaaaatatattggcattgattatttattctgattgtgaggttaaagagtattcagcgtgcaagtaataaaattgtactactacatttgtacctaggaagtcagctctttctggtaaaaattttagcatccttttattctaaatatgttttatatcttctagatttatttctttttcagggcaagtcactaactttatggtattggagttggagtagaagatcagcagctccatcatcgacgatggcctgatccacaaagatggattttggtggtgatacttccagggaggtaaaatattgtgctatttgacacatgctgatggggtgcaatgtcgtctgtgccaaatggacctaaaaatattgttagctagcctgacttaactgcaggcaagaccaagaggaaatctggttactacttggtccagatacgacctgatttgattaatcttatgagttgccgacttggaatttcactttgaggagattttagttcagaatctaatcatgcaattggcttaggcgacatgaacattttttatctgtttatcttttatttgtagctgaactgtcgtggtgcacacttcctaaagtttgaaacttactatctttgttaccaaactaatctatgtttatatgattatgtcctacaaattgctgagtctgttacatcattgttacatctgttttcaaactatttgctaatatgaatactatgacaggatagtgcctttgcttaactatttgtttgggtaaatctgaaaatactaaactggttctc

SEQ ID NO: 9211 - DNA, 1885 bp, Oryza sativa
  ref <308>: DATABASE ACCESSION NUMBER: AK106559
  ref <309>: DATABASE ENTRY DATE: 2002-08-28
aaaaaaaaaaaaaaaaaaaaaaaaaaaaaaaaaaaaaaaaaaaaaaaaattaattctagaagattgtgatgatgtggaagatgtggaaggttgtggtggaaatagtgtggatcatcttggcagtttacttcacttgaggtaccttgggttaccagatactgacattagcaagctcccaaaggaagtaggaggtctcaagtttctccagactttggatttatggaatactggcataaaggagctgccacaggcagtgggcctgttgacacaactgttgtgcttacacactgatcggagtacgacagtgccagccggtttgatcggcaagctgacgtctttgcaagagctgtggacatggcctggttccgcatactaccgcgacatggacccagtggctggtgccgcttcgacacgccgttttgcgaaggagctgggtaacctgagggaactgagggtgctccgtgctagtatttatgcagttgatgagagcacggagagagatttgatggagtccctgcttggcaatcttcagaaaattcagagtgtggatatttttggatcaccactagagaggggagtcacatgggatgcaggatttgcctctcgttggcgcctccggcacctgaatttggaatgcttcgagctctctagactgccagcgtcggttaactcctcgcttcttccgaacctctcccatctagacatgaaagtgcaggttatgcaagagcaggacatggaaactcttgggaggctgcccgagctgcgttgccttgtactggattcgcgttacaccaaagtggtaagaattaagaatactggcagtgattgctacttcaagaagttgagattcttcacgatgggcagttcatccatcttgtttgatgtgcaaggcagtgaatgcgctatcatgccaagccttgaatcccttgcatttagtgtccatgtgcggttcctcaaagacgcggacctgctttgtttcaaaaaacttggcttggtgaacctccctagctcgcttcagcgagtcaccgttgaaatcaactcttgggatgcccatgatacagaggtggaagaagcggaggccatgttggagcatgcagccatcgtccatcctaatcatcccatcttccaaaccacacggccatttggaaaatatatcatgctcttacctgaccaagagccaagcagcaccaatcctaaagttgatagatgtgatgtcaatctgcgaaagaacgacggagaccatttggacttccgatggctgttgatgaatccacgcgtcgagaaattctgtgtctccataaactgcgagaatgctagtcttgaggaggttgaggaagcagaggcggctgcaagatatgcagtcgatgtccatcccaattgtcccactcttgaactggtgagatatggtgaagataagatggtgctacccaacccccagcaacaggttggttatctatcttgatgactttcacaatcatgttgctggttgtaagaatgaatcatcacatacttggcaacttcggagtatatgcctgtgaaactctagacagaatgtattggatatcgttcactccaaaaatacaagtttacaacacaaggattctataccactagtttctgatggaaatggcagcaagcatgaatgagctgaacatgtcaaccttccagacgtgtgtgtgctcatgctgtttactttgcagatcgtttaacacatcgtgatattgaacagacaacaaaaatatcacctgtatattgaaatgaagtgaggaaatctctgatgatgtcaatgataatttgctagaaagttgttcaaggtcagtatgtaaggaccacatttttttttctggttgtggatagttgaatatcatagaattatttctgaggt

SEQ ID NO: 9212 - DNA, 2691 bp, Oryza sativa
  ref <308>: DATABASE ACCESSION NUMBER: AK106560
  ref <309>: DATABASE ENTRY DATE: 2002-08-28
cactctcctacgcttccaccccccattcccatcccctccacccagatcgccgccgccgccttcgcctcggacggccgtacggcgccgtccaccgcgcacgtctccggcgatctacaggtgtagatcgcttccggagacatccaaccgcggccatggcgaccttcgcgaaacctgagaacgcgctcaagagagcggaggagttgatacatgttgggcagaagcaggcagcgctacaggcgttacatgatctcatcacttcaaaaagatacaggtcatggcaaaagccactcgaaaggattatgatgaagtatgtggagctctgtgtagacctgaggaagggcaggtttgcgaaagatggccttattcagtacaggattgtctgccagcaagtgaatgtgtcatccttggaggaggtgataaaacacttcatgcagctttccaatgagaaagcagagcaagcaaggaaccaggcgcaagcactggaagatgccctggatgtagaagatctggaagcagacaagcggcctgaggatttgatgctcagctatgtcagcggggagaaagggaaggaccgatcagacagagagcatgtcacaccatggttcaagtttctctgggaaacatacagaacagttcttgagatattgagaaacaattcaaagcttgaagcattatatgctatgactgctcacaaggcttttcaattttgtaagcagtataagagaacgactgaattccgtaggttgtgcgagataataagaaatcatcttgctaacttgaacaaataccgtgaccagcgagatcgtcctgatctgactgccccagaaagcttacagctatacctggacactagagttgaacaactaaaaattgctacagagctctctctctggcaggaggcctttaggtctgtggaagacatccatggcttgatgagcatggtgaagaaaacaccaaaaccatctgtcctggttgtgtattatgccaagttgactgaaatattctggatatctgattgccacttgtatcatgcatatgcatggcttaagctattctacttgcagaaaagctacaataagaacttgtctcagaaggaccttcaattaatagcttcttctgttttgcttgctgcacttgccgtgtcaccatatgaccataaatatggcgcatctcatcttgagcttgaaaatgagaaagatcgtaatctgcggatagctaatctcgtcaacttctcccttgactccaagcgtgagaatagagaagtgccatcaagagcatctcttttttctgagctggctgccaaaggtgtcattgcctgtgcttcacaagatgtcaaagatttatacaaccttttggaacacgattttcttccttggatctcgtatccaaagcacagccactgctatctaagatttcaaagattggagggaagctttcatcagctcccttggttccagaagtttttctgtcacagtaccttcctgctttggagaagttaacaactttaagggtgttgcaacaggcttcccagatatttcagtctgtgaaaattgatatgctctcaagaatgatcccattctttgactcttctgttgttgagaagatctctgttgatgccgtgaaacacaattttgttgctatgaaagtcaaccatttatcaggagctgtccattttgggaaaatggacattgaatctgattgtctcagtaatcacctaagtgttttggctgattctctaaataaagcaaggagccttatccatccacctgtgaagaagccatccaagcttggtgaaaacttaacgagtcttgctgcagtagtggagaatgagcacaagcgtcttcttgcgaggaaatcaattattgaaaaacgcaaagaagatcttgagcgccaaatattggaaaaggaaaaggaagaagaaaaaaagagattgagtgttctcaagaaatctgcagaagatgaaaggataaggcttctcaatgatgtaaaattgagggaacaggagaggatccgtcgacaattggttgaaaaagaaaagatagaggcagaagaactgcttcagaaacagataaaggagatagcaaagagaggaggaaaaaaacctgtccttcagggggaagttactaaggaggctgtgatggaattggctatgaatgagcagtttaaggagcgccaagagatggagaaaaaactacagaagactggtaagcaaatggattacttggagagggcaaaaaggcaggaagaggcacctctaattgagcaagcttttcaaaaacgccttgaagtagagaaaatccttcatgagcaagagcagctgagagagattgagctcagcaagcaacaccatgcaggtgacctgcaggagaagaacagactttctcgaatgttggagcataagaacattttccaggaaagaattgtccaacgtcgtgaagctgagtttagtcgtcttaagaaagagagggatgaaaggactagtcaattgatatcatcaaggaagcgtgaaagggatacagtgcggaagttaatgtactatcttaacttagaagagcagcgcctccaaaggctccgtgaggaagaggaagctagaaaacgtgaagaggaagagaggagaaagagggaagagactgagaggaaggctaagctggatgcaattgcagccaagcagctgcagagagagagggaact

SEQ ID NO: 9213 - DNA, 2966 bp, Oryza sativa
  ref <308>: DATABASE ACCESSION NUMBER: AK106561
  ref <309>: DATABASE ENTRY DATE: 2002-08-28
tagtatgcttgagaaatttgcatgttccttatgacaccatttcctcaatacctcgaatagggaaacttacatgtcttgaatatttaaatgcatttagtgtccagaaaagaattggacacactgtgtgtgaactaaagaatttgtcacaacttcatcatcttcgactgcgagatattcagaatgttgggtcatgcaaagaagttttggatgctaacttgaaggataagaaacatatgaggacattttctttgcattggtcttctcacgaggttattgcagaaaatgtaagtgacctagttcttgattacttgcaaccgcattctgaccttgaagagctggatattataggattctctggcactaggcttccattctggataacagactcctatcttgtaaatattgtatcgctcaatatcatcaattgttgcaaaattgagcacgttccatcgttagcaagtctctgttcactaaagaatctgtttttgcaagatctttcactattagcaagtatgggctgcatgcttcatgaatgtgacaagattcctgttggttgcagtcattcattccaagaatgtccaagttcaattgatatgtcggaagggatggttgatgttgaatcagaaggagtctcttttccgcctcatctcagtactctgacaattcgaggatgtcctcaactgatgaaactcccaactttaccatccatgctaaagcagttgaaaatagaaaaatctgggttgatgcttcttccaaagatgtaccagaagcacaatgatacagagggaagtttcccatgtccaaatgaatcacaacttacaaacgtgctcatcgaatattgcccaaacttgaattctttgttacattgtttcttgggacagaatgtaactcttacatctcttagagagctccgcatcaaccaatgtgaaaagcttgagtatttaccattgaatggtttaatggaattagtaaacctgcaaatcctagaggtgtcggattgttcaatgctcaagaaaagtgggatggaagttaagcttcttccgtcatcgctggaacagctctccattaaatcctgtggtgaattagcaaacatattgattgatttattggcaggactggaagctcttaccttcctagagctagctaattgcagccacctgatatccctgcccacagtgaagacatttgaaactttgacagcacttaaggaactgagactatatggttgtccagaattgtcttccttgggtgggttgcagtgcctcaaatctctaagactattgattatccgtggttgctgtagtctcacaaagatttcttcattgccacctccattacaatgctggagtagccaagatgattccacagagaattcgctaaaacttgggacattatttattgatgatcactctctgctttttgtggagccactacgaagtgttcggtttactaggagattatctcttttggatgatcctatcatgacatcactacctgagcaatggctcctgcagaatcgcacgacactaagtattttgtggctatggaatgtgaagtctctgcaatgccttccttcaagcataaaagatctctgtcacctccaaagtttcactctatttaatgctcctcttgtaaactcactgccagacatgcctgcatcacttaaggatctcattattgattgttgtcaaatagccttagctgagcggtgcagaaaaggaggctgtgactggagcaagattgctcatgtcactcttctgaaaattaatggtaacgagcccttgtaggtcctctaccttacttctacagtgggagttgacaatatgggatgatcctgttatgacttcattgccagagcaatatgactcctgcagagccgccttgttctacgaaatttgtcgatatggaacacaaaggctctacaatgtcttccttcaaacctggcaaatctctgccatctccaaagttttactctaatcaatgctcccattgtcagtgcaattccagacctgccagcatcgctgagcaatctcattgttcaaaattgccacacaatattagctgaccggtgcagaaagggagctcacgactggaataaatcctgccctcatgacatctttttcatcaacttgtaagagcttccagtttcatcttcctctccttttcctgtggatgaatgctccaaggcagccaagcaagtggaaggactccctgcgaacacctatagtatattttgtatccttatccatgaattgatggagtgaagattttcatctaccagatttcagctgttactgtcagagttcttatggccaaccagtcaatggatccacatattcaatcacagcaaatggcacatagcctaaagctctgtgcctacgtattgctcctattccttgttcatagtgattctcctgttaatgaaagcacgacacagttttgtatccgtgcttccagcggccgtcattctgcctggcctcgttcacattattgctgctccaaaatacctccagatgatacatggtcaggcggcgtctggaactgagctcacagtggcctcttctcatacctcctccctgaggatgacggcacggttcgcttcatgaaccaatctacgcggcaattcatgactattcgttgtatatcaataaggtccaaggcagcgttccttgacccgggaatatcgtccccatcctgggaaattggggacatttttatcccccaccttataaaaaacatcacaaggagcgattatgttcgccccattcctcgacccaatcaacctgggaattttgtgactatgtcatgattctaagaaaccataggatgtttataccgatcttgagcggtcatcggcctcgttggactgttagtacaaggacagatctggacatacataccggatgtcgtgttcatcggagtcaggacgacacgacagtcagcaagggatgaaaatggttagaaat

SEQ ID NO: 9214 - DNA, 2055 bp, Oryza sativa
  ref <308>: DATABASE ACCESSION NUMBER: AK106562
  ref <309>: DATABASE ENTRY DATE: 2002-08-28
taaaacgaactgcgaaggagattaattagatagacctttttatttttcgtcatttgatcacgaaaacagggattctggaacggccaagaatcccagcggttgttcgggtcgaaaaaccgagaacaagacgtgccacaaagtggcagatgaaggcaggggggagagcctagcttccttccctccctgatgagcgatacttcgatatcgccaggagataataaataaacacataagtacagtattagtattactccgtacttacgcgtgaagatggatagcgatgatgcgttggctcgtgtgtcaattaggctcgatcgagtttgatcgttaagtaagttcagtttattgtttcatttgcacggcatgcatgtttgttagatgtgtgatacatctgattaattatatatagtatttcatatatatgtttcttttttacgatgttgattagttcaaaataaactataacaatagatcatatagaaagtatatgtatgtgtgtatatatatttatgtatgaacccgtgtagttaattaattatatatagctttgttttggcgtgcgaaaaatggagatatactgtggaattagctgccaggccggaggggagaaatcatcgtgatgaagtacttatatatttttcacctggaggtatgttttatttgctctttgtcaggaaatctaaattacttgtcgtttacgccggtgtgaagggttctgagatttgaatgtttgtcaagtagtataatttatgccgctatcatgcatggaaggttctggtgatttttacatgcttgtcaagctggcagatactgcacgccttttccccccctgatttgcatgtagtattgtttcggtgttctcaatttatttccgattttcagagcgatacggcgtcttatatttacgtactttctctggtaaaaaaaccaacttagtttaggaagggacgtgactcctcctagctagtattgttttggtgttctcaatttttttccttgattttcagcgtggcacagtgtcttgtatataccttctccctccgttaaaaaaagccaacatagctaggaggggatgtgacccctcctattattgttttggtgttctcatttttcccttgattttcagcgcggcacggtgtctatatacatactccctttatcaaaaaaaaaaaaagccaacgtagttaagaggggatatgacccctcctagtattgttttggtgttctcaattttttctcctgatttttagtgtggcacggcatcttgtatatacgtattgcctccgtccaaaaaaaagccaacatagcttaactacgtattgacatcttgtctcaattttttctcctgatttttaggacgtgacccctcctagtattgttttggtgttctcaattttttccttgatttttagcgcggcacggcgtcttgtatatacatactccctcagtgaaaaaaaaaggttatactagaaggtctcgcatgctctacttggtgggcgttttctttctttttttttttactgagctagggagtacgtgctaagtgttaacattcgatctgattttttttttcaggataaatatcatattaaccagctgtatgcacttcacggtgcagagaaggcgacatgcaagatcttttgtcattgtctcaaagcatattcgatcgttcactcgttcttcaattactttttaatatatagtaacaaattaactaacaatctatcctctttatttttgcagatatgtatcggcgcgcattattaacgattaacgtgggttgtggttcaaaaccggatgccgccgttggtgatatatatttggatacacaagacagtcggccatatatatcgtctttaggccacacatatattatatgtatcccagtagcaaaaacatatttttcctttttgcaaattacaagctagcatgcatgtaacaaattctttttttaatagataaaaattcattctcgcatttgtttttcccatgtcatcgtcattaagattacaaaacattttagtgaataaaaaaagaggaaccgctgctgactgc

SEQ ID NO: 9215 - DNA, 1568 bp, Oryza sativa
  ref <308>: DATABASE ACCESSION NUMBER: AK106563
  ref <309>: DATABASE ENTRY DATE: 2002-08-28
agagagaaatttgcaagtgatcaacagctgacttgtttgcctctgccatggagaagaattgtgcatgcccaccaccaagcaagggaaacatgatcacaattctgagtattgatggaggtggggtgaagggtatcattcctgctgtcatcctctcattcctggaatctaaacttcaggagcttgatgggaaggatgctcggattgcaaactactttgatgccattgctggcacaagcacaggtggtcttattgcaggcatgctagcagctccatcactgggcgatgccaatcaaccatgctatgccaaggatattgtcccattttacctcaagcattccccccacatctttccgcacaggactggattttttggttggttcttcaacatcctgggcatcataaagatggccattgggccaaagtatgatggaaaataccttcacagactaatcaatgatcttcttggcgagacgaggatgaaagaaacattgacaaatgttgtgattcccacttttgatgtgaagtgtgtgaagccaataatattcagcacattcaaggcgagacgtaagcccttgaagaatgcttgtcttgctgatgtatgtattggtacatctgcagcaccaacctttctccctgcacactattttgaaaccgtggatcacacgggtgcatcgcaaagcttcaacattattgatggtggcatggcagcaaacaatccaactttggtgactatgggtgagataacaaagcagatcaagcggaagagcgaggagttcccgaaagccgagcccttggattaccgcaagtatctggtgatatctttgggcacgggtctgcctgagcacgatatcatgtttgatgcaagaaatgttgccaaatggggcatttttcgatggctagttgataaggatacaatgccgttgctcaacatgttctttcatgccagctcagatatggccgatactctcgttgcagacctctttcaagcaatcggatgttcacaccaactattgcgcattcaggatcacaacatcccaataggggcaatatccaatgacctctcgacgaaggatcatcttcaactgttggttaagataggcgaaaaccttctcaagaagccactaagcaaggaagagtgtgagaagaacaacattgagccagagccaaaccttcatggtgaccatgtgacgacctatgcagatatgctcacacggtttgcaaagctactttcagacgagaggaagctaaggctccacaacatgaagctggatgctaagccctagcacaattgaaacgtgagatccttggaacagatgtctcatgttcatctataggattgcgtgtcccctactaagccaattaattttgtattgtgaaatagctgtctgaactgttaaaaataagaactttgtacagtagtggtaatgttgcttttatttgcttcaaaaaacactagttggtaaagtttatactacctatatctgtgtgatgtgtggtgtctgttcagaatgtagaactatgtattgtaatggtgaatttatgaaaaacgatgtatttgcatatattgt

SEQ ID NO: 9216 - DNA, 1841 bp, Oryza sativa
  ref <308>: DATABASE ACCESSION NUMBER: AK106564
  ref <309>: DATABASE ENTRY DATE: 2002-08-28
aaaaaagaagggctctctagctctcatgaaaaaaacccccaagtcccaatccatcttcttccttcccgcgattttctggcattccccccaaaatcatcgacccccattatcccatctctcccactccccatgtttgccggtctaattgtgatttcctcatctgattggagagatttatttgcccctccgttggcacccccgtcgcactccgagccatcaggtgcggcacctcctgtagcccggtgcctgacacccaggcccagcactcctacctcgtcggagtgtgccgctctgccgtgccccgatccttcctcctcagtactatgtcaagacgccatcgacattatccggatcctgaagttgaagaccattttgaggattcaacacaagatgaaccttcaaattctttggttacttcaacaaaagaaagtaagggtggtcgtggtccaaatgttttgatggcaccagttccagagaaagatagggcagtgataactccactcaataaagatgcttggattacgaatcctatgaagaagaatgtttcatctaccatcacatgtcttataaaagctcactaccctggcacatatagacctttggataaacatggcaaacaggtgcctgaggatgaagcagttgtcattgctcattatcacaacttttctgctcatacaaggataactattctgaaggaatttttgctgtgttttaagtttgctgatggtagagaagaggattgtgctagattattttatcgcaaagctgttgaacgttttagccaagctttgtcacatgagaaatctgaagcaaaacgttctttggagaagcatatcgaaaatatgcgtgcgactgagttacaacaggatggagatgccccttctcatgatgattttgatgttgatgaacctcaactttggaaggcattccctccttattggattgagcaaaagtggtgggatatgttgtgtgacttgtggtctgatgaaaatgtaaagaaggtgtcagctcaaaacagcaaaaatcggatggaaggaggtggtgttcatcatacttgtggttcacgaagtgttgctatgcataaacaagccatgataattgagaatgcagggacggatgttgatgatattgatgtctttgaacgcacacatcgacatgcaaagggcaagggacagtatgccaacaagaaagctgaatagttagcggtggtgtataatgatcgtgtcaaggaaggagaaaacaatcaagtcaacaaacaacatgtttgggtgcagctcactaaaggtagaaaacgtggaaggtattatggtctttcaggaattatagatagaaaccatgttggtaattcagcaagtgcaccatctggtagcatggagacacagccactatacacacagcagcaagtgcaagacattgttcagcaggcagtcactaatgctgtgaacaatgctcatcaagaactagcatcaaggatagaaaggctagagcagacagtggataaggataaggcagaaactcattcccatgatgcaaatggaccatcttcttctgttgtccctgagttccttcatgcacttctcatgaatgggatgaacactactgaagaagcgccacaagctggtcattgtggaagaacttgtgagaatgatgacctctggcgtttctaggatgtgctaatgtcgaattgcaagcatttagagattaggaatctaggatcatgttatcagacctattatagttgctagattaatcagtttgatcaacttaccttctgagactattttatttatgtgttattgtctacagacctgtcttagattaaatgcaaatatattgtctac

SEQ ID NO: 9217 - DNA, 1460 bp, Oryza sativa
  ref <308>: DATABASE ACCESSION NUMBER: AK106565
  ref <309>: DATABASE ENTRY DATE: 2002-08-28
taaaagaaaaatctcccgtctcgtcgtcgcctccgctccttgcgccatctcgcggcgccgatctccttctggcgagccgagcagagcagaccagggcaggggagcggaggggatcctaggtgttgcagtttcttttctcgtggacggtctaaaggtggtgaagaggctgtacagatcacgatcccgcaagtgaggtttgaggatgatgaactaaagggcttgtccgagctactgcggcaggagatctgataaaaccagtcaagaggcgagtctcagaggtgctaggacgagatggatgaagttgctgagattgctgatgctatgggtacggttggcattgataatggggcaagccggaagttgttgtcgaacgagagtttagaggagcgaggagaagagcatgatgtgcaggctgatggggcgcactcgggtgagagtgaggtgatcaaccccgctgaggaggtgggtggagaagccacctcacagccagaagacgtaaagccgcgtgtttccaagggaagccaaagtcattcccctaaggttactaccaaatctcagcgccagagcccacgaagtggagataagagtcaagctaggaaaaacagtcccggttctacttatcccaaggcacccattgcacgagtgtctgacccagatttggttgatagctcttcatgcaatgatggtgctgatattaagaaagtaaaggtcttttccattatgttgtattatatagtgctgaaatgcttagatcctgctatgtgcagtgttaggagacatctttatgcccaataatttaatataacatgaaattgcttttttgatgttttgatccagaaggctgaaaagagcagtttccgtccagttgccagggcgagtcaatcactggaggactcaaagtatgctgtttgtttgttgacagtatttttgtggcttagctgtttctgttttctcaagaaaaaataacttgtttggtgatggtctacatatccaattaagctattctgctttaacccattgattaagaaaaagcagggctttttttttgagtgaaagcgactaagcaagggggccttatgattgttgcatttctgatgttctgccccctcaaattatgccaaaagaattttcttgcttactattctcttatttttgcaaccataagcttttccatcttgtgagacctcagtcagtttaagcttgtttgaatactctttgcttataggcttattttttttgtgaaccattctaccaactaccaattgaagctcatattgatagtgtttcttgcattgacacattcctcatcaaacccagggaaaagaagaaaactcagaaaacatcaaaccaatgttctgtcaaaaatgatgaagaagagccaaactgtgaaaaagtaaagcctcaaagggttggcagcactcctgcgtacggatttgcattcaaatgtgatgagagagctg

SEQ ID NO: 9218 - DNA, 1329 bp, Oryza sativa
  ref <308>: DATABASE ACCESSION NUMBER: AK106566
  ref <309>: DATABASE ENTRY DATE: 2002-08-28
ctactctatcatcttcgacggtcctgccactttcctcacactcatcgccatgccgttcgaggagaaagccggagcgccattgcttggtgcccgcacaccatcatcaagtccgttcgggaagacttcacctcgtctaggcggaatcgtcatcaagttcttccatgacgcctgcacttcgccaagccggagttgtcgtgccgtccatccgtgacatctctctctctacaccacatgatgagacgctatctgtctacaatgctttcacttcatcacgccaagatgagatgccatccgtctgttgtgctctctcctcttaatcacgatcgatgttgtccgtccgtgattccctccctcttcgttgggatcgagatgtcgccgcttgtccgtgtattggagcgtcgctagtctacatcagcataaagtaagaatggtgtcatctgtgatgccagggaaccattcatgcttaatctacaccaacaaatgccctcaacggttccgctgacgaggcatttacttcttccaaggtcgccgtcgttaccggcgccctcatagagccccttttacgggctcgttatcatatcaactggatcaatagtagacccatcatctaaaggaggtgctaagccatgtctatccggctgttgtctgcaccgacttcttcatcaacattttcattacaagtccctgccgtataaggggcatgatgggtcaggaggtgcccagccatgtttattccggctgccatctacaccaaccgtctttgtcaactcttcgtcactttgatctcacctagccaggaggtgcccagccatgtatattcggctgtcgcgtacgccaactgatgtcatcaactcttcttccctttaatactatcccgatgtcgctgctgtgacttctctaccgtccaagctacgcgagttccatgcatgctgaagatcaatctatctacaccaccacgtcgctcaagactgatgaggcggagcgacgagggcgggcgaagccgacgctaaggctacgtcaccaacaccggcgcacggaccgacgaggccgtggatcgctgccggcacccacatttacatcaccatcacaaccatgcatgttgaatgcgaagcaaagacaatgagacgaccactagcagcttaatcggaggttctctgcaggcctaaacctgcagaggtaattaaccaggagcttctcgaggccctgggaatcagaagaccacatcgctgatgtcaagatttgtccaacgacaggcaatggcgcgcgcattttatattatacatggaaaatgtatgttgttaattcaattaataaagatcatgtgtttct

SEQ ID NO: 9219 - DNA, 925 bp, Oryza sativa
  ref <308>: DATABASE ACCESSION NUMBER: AK106567
  ref <309>: DATABASE ENTRY DATE: 2002-08-28
aaaaaaaaaaaaaaaatgtctccccccgccgccgccgccgccgccggcgatccgacccctttccctccgatagctagagtgtggctcagagtcatttctgctgtgtgaatgtgccggctctagaatgggtctcctcagcataatcagaaagatcaagcgaaaggagaagaaggtgatgaggattctcatggttggcctccacaactagggtaagacaacaattgtgctaagaaaaaatggtgatgacaccagcgtcattagccctacactttggcttcaggatcaagaccatcaagtaccacaagttctctttgaacatatgggatgtgggtggacagaagacaatccgatcgtatttgagcaggctaactgcctggtttgggtgattgatagttctgatatccgaatgctgagctccagagtctgttgaaagaagagttgcaagtgattttagccactaactctaattgttaatggcacccagtttccaaatggtttgtgtttattctgcaccaggaaactgtgaagactgcaaagttttaattctcagagcatgttttccccttgctgaatctttcttctgaaagttagtaatccttggagctttgatgtcagagattggccggcgcatcgtttttcgttttggcgaataagcaagacaatcaaggtgcattgaagccggcagaaatcgccaaggcggtgtatttggacatacacgttgtaccgatacatccccgggattaacataggagtagaacacagtacaaatcttaccatcacacattcacactgctaggccgagcttctgtcgcagagacatctcatggtcatgttctctgaattgtattatgaccgggcacaacaagcgtcacctggtcagctgtaactctgctaaaattagagcaaagaaaacatagtttgtggc

SEQ ID NO: 9220 - DNA, 1621 bp, Oryza sativa
  ref <308>: DATABASE ACCESSION NUMBER: AK106568
  ref <309>: DATABASE ENTRY DATE: 2002-08-28
ttaaagcatcagttttccgctcaatttaagggcgaaggcaaaattttttgttatttactgctgttctctatcgaataatctgctctattacagaagaagagggggggggggaaaagccaacaaaaaaaatagaaagaaaaacaaaaaaaataaaaagataaattcagaagaaaagaaaaaaaaactgagtgggcattatggctgtatattacaagttcaagagtgccagagattatgactcgattccgatcgaggggcaattcatctcggttgccaacctgaaggagcggatttttgagtccaagcatcttgggagaggcacagattttgacctcatgatttcaaatgcgcagaccgacgaagaatatgctgatgaagctactatgataccaaagaacacatcggtgttgattcgtcggataccaggaagaccaaggaagcctattgtaacagaaccagaagagacaaaagccatggaaggtagggtagaagaaaccatgccttctggtagtgcttttcttgctgatgcatctatgaaatatcctgaagaatctgagtgggatgacgagtttggcaatgatttatatgtttctgattcagtcccttcacagctcggtagccaggcggttgatgcatctgaaaataaagttgatgaagatagtaaaataaaagcacttattgatacatctgcactcgactatagtcaaattcctgatgggtatggtggtggaagaggctatggaagagggatgggtggaagaatgatgggtggtcgtggttttggacgtggtggtctggaacgtaggacacctcctgcaggctatgcctgtcatagatgtaaagtgcctggtcatttcattcaacattgcccaacaaatggtgatgctagatttgacatgaaaaggatgaaacctccaactggcattccaaaatctatgttgatggcaaccccagatggctcatatgcactaccaagtggggctggtgctgtcttgaagccaaatgaagctgcttttgagaaggagatagagggattacccacaacccgctcacttggtgatcttccaccagagttacgttgcccattgtgtaaagaagtaatgaaggatgctgttctaactagtaaatgctgctttaggagtttctgtgataaatgcattagggactacattataaacaagtcaatgtgtgtctgtggtgccacaagcatattagcagacgatcttctccccaataaaactctaagagaaaccatcagccggatattagaggcaccaccaactagcagtacagaaaatgtgggaagcatggtgcaagtacaggatatggagtcagctattcctgtacagcccaaggttaggtctccagctgtttctgctgcttcaaaggaagaaccaaaaagaacacctgcacctgtagaagagtctccagatgttgagagccatagcgaagtgaaaactacaaatgttgatatgagttcttcagataagaaggtccccgcattaccagatgttgttgaaggaaccatggagtctaaaattctgaaagaaaaaacaccagaagcaacacctgttgtgaaagagtcacaggaaaaaatgcctgttgtgggcgaacaagtcgt

SEQ ID NO: 9221 - DNA, 2537 bp, Oryza sativa
  ref <308>: DATABASE ACCESSION NUMBER: AK106569
  ref <309>: DATABASE ENTRY DATE: 2002-08-28
tggcctaaatactttttttttcctcctctctctgaagttggaagaggagaaggtatgctacaatggtgtcgacacggttagctttatctctatatataacggaagaagaagaagaagaagcagaggcaatggcatctctactctgtagacagcattggaatctcaattacatttaagtaatgtgctgctgcaacggatgccacccatctcctcgacaagctgatgaattttatgtttgttaatcaagtgtgtgtaacagtgcaagtggcatgtctagctcatcttgtgtctatcatgtcctggctattggcagcaaactcattgcacgagcatgtagtttaaatttagatccagatccagatcatgggattgatgagcttgccacgaaagagaacaagagctgttcctttgctcggccaagcaacagttgacttcacctccatgatgtgttcttatctggtacgttcttcgtgcagcatcacatcgctgacctgccttctgcactcacagcattcagcatctgctgcaatctcaagatgattccacgtgctgtccaaatttctgatgcattaggcctaactgagtcacattgtcatgttccagttattggcagcaggaatcagcatggcagcttattctattactgagccttgtcatacgtgtatgctccagcacccatttaatggagattgctaatcaactagtattggtgccatgtgtgctattgcatctgattgctgagcaatttatcaacaactatttagttatatggggagcaaaggatcttgtgcctgttcctgtctcatgtgaatactggtgacatgaccatcccatggctttacgaaggcaaggtgaagcgctccaaatgtccggtgattgtttgagagcagtatgcgtcaagtgaagggggaaattagaggcaaaagagtgaaatattcattgaatgaactcctgtacatttcctcatgtatgatgtaggtgaacatacaaaattgttttggtgatcaacaaatcctctaataggcggacgccaatcacaggtgtcagagttgggaatgttccatcattctatctacatgctgagagcgtttagaagagaaactctgctctggatcgattttctgaacagattctcgattccgctctcaagatcaacaatgtccaactccaacgcctgcaattgctcctcctcgcagataattcttctcttttggaatgtcttggagacgagagaccacttgctataactcggcatcacagtttgcttcgagaggagatgtgatgagatttcaagcattgagaaggctgtctctcttgcttcagccaacagcttgaccaccctgcagctctcctgatcaggtgacagagtcttcttgctaatcttcttgtactgtttctgcgccttcttggcaaggcggatgcatgatggaatattggcttgaacagctgcgtcttctcctctcttgataaccaacatcatgtcttggatgcttgccttgagctcagaaaagttctgttgcatagccttgcagaggtcaagcaagacgagagagcactcgagctcttgctccactgctttcctgttctgtgactggcaaaggagaacttggctgctaggcatgcacatgatctcgtcgatgctatcatagatgctcttaagcctcttcaagccatcgttcatcgtcctgatggttgaagaaggtgaggagattgttgcctttaggctctgcagctgttcttcgacattggtttcgctggaccgtgggctggatggcgcactcgcagatctgagatggaatgccattatatttttctcttgttttcttttctctggagatggataggaagagaaaggaaactgtgctgcaatggtgtcgacctgggcatggtttgcctgtatatataacgaaaggagctcaagcaatggcatttctgattgtgtagacagccatggaattgttgtgctgctgcaacagaagccacccaactcctcgacaagctgatgttttttttcatgtaagaggcatctctagctcagctaatgattgtaccatcatgtcccgattattggcggcaaactcagctgcacgagcgggttgcttagtgttgaattcaagttcaagatggtgagaccaatgaagcatgctatgaaatgggagaatcaatcatgcggtttctgcactagcatgttactcctgcctgccgtgctaaactgcaaaatgttcttatcagttgtgagttgtcatgctgcaaaataaggacacattgtgacattgtcaaccatctctaacaagttgatgcctcatgtcttaggttgtgttggcaaagtggcaaactcatctgcacgagggcgtggttggttcttgcttgtgtgagaggattcgttgttcttataaatgacagtcttggtccattgacatttcagccattatatatcactctgttgtcttcacagcattgctgtcatgtttcagttgtatggtacagcacatttctctgttcaagtgttcattatggatatgatccacatttagtgc

SEQ ID NO: 9222 - DNA, 1705 bp, Oryza sativa
  ref <308>: DATABASE ACCESSION NUMBER: AK106570
  ref <309>: DATABASE ENTRY DATE: 2002-08-28
tggattatggtttgtccgttgctcttgatgccatttggttcttgcggacggagcaggatcttcaaggtctcaaccatctgataggtaagattgtagaatcaggggcgaaggattttgccagggcaatcctcaggacttcattgctcgcatcttgtgtcgttgcctgccaaagcaaggcgcttactttaggtgatagcaaggaaatcatagctcagagattacatgatcgtctacaagattgtcctggcggtgaacgtttacaaattgaggcaggtgccaaagtgcagaagtttatagaatgggcattgcagtgcattcatctgcatcgttgttctgaagatatagagtgttacaaagcaaactgcagcactcaccaagaggtacagttccatctatcagcgtttaaagccttcttggacatagctggtgacaatctcagtggcaagattttcactgaggcattcgatgcggcctgcttcccacttacactattctcaactttatttgaacctggatggtcttctgggagttcagcagttgccatacaagggcttttgtcattgctggtggaaggaggtgctgagaatgtaaatcagtgttttctagaagcttcacgttttggaagtactgagcttgtacgcattctgctaaagattgctcatcagaacagcttggctgtcgatgtcgatcttgctctagtctatgcttctcactactgcaaatttgaaacgatggcatgcttggtggatgaagggcatgccacatctttcctttgtcccttagtaaaagcttctgagcgtggttgcttgcaggttgtccagtggtttgtcaaccggcatgtttcagacattgagatgtgccttgctgtaacaaccgctgcctcttgcggccacttcgcagttgccacctacctgcttgcgcatatcccccggcatgtcctcgaagccctcagcccacagattctcaaagctgcgaggggacagggtagtgggtcttttgaaggtgtttccttccttctccgttcaaacttcctcaacgatgccgccgctacgtatgcagttgcagacagcattgcgaccacgagtacgatggatattccccaagacctggttgattttctgaaagagcagtggtctcaggccgcatttgctgaaggagtagtggctggggaagatcattttgtgaacatcaccagggttctgaggagaggggcgtctccgatccgcctgcatgacctcccggagcccatggcactcgctatcgcgtacctgccgctgtaccgggcatgcgcgagtgcaagagggcagctgctgccgcagagactgaggggggaactggtcgaggcggttggccggctcggcgttccggtcaacatggaaaacaacaggagagatttcctggcggttttggagcattacttcccatcattcataactggagcttgagaaacctcatggaattttacccagaacccaaatggtttagctgttgacacagtagaatggagccaaatgagccttcactgtgttagttcactatgtcagagagaggagtttgttgtcgagattgtatagagcattttgcggttgcgatgtgagaagacataaatgcttggaaacttttttttttttgttttttttttgttgctgtcataggtcagcgttggcactacaactgcaccataaaatgtgatggtatgtttttc

SEQ ID NO: 9223 - DNA, 2650 bp, Oryza sativa
  ref <308>: DATABASE ACCESSION NUMBER: AK106571
  ref <309>: DATABASE ENTRY DATE: 2002-08-28
tgaaagatacaacgcaaaattatgtgaagccccaaagaaattcaaccttaaaggcgagacctatcattggatccagagctatcatctcaactttagactatatgagaaattactttgcatcgtgttcgatattctcgaagatgggcagcttgtggaggaggctgatgaaatactggaaacagtaaagctgacctggactatattgggtatcacccagaaattgcatgacacactctttgcttgggtgcttttcaagaagtttgctgaaactggggaaattcttctacttaagcacacatgccttcaaacacagaagcttcgattacataatgatgctaaagaaatagagttgtatacaaacagctttgtttgttcagcggaagcctgtggcggaaacatggctctaagtttggttgacagtgctattcttaaaataaataagtggtgttttagacaattggagaattatcattcatactttaataaggttggccacctccattgtttggatcacagttttttttcagctgtttttttttcttttccatccaccaagggctcactttttgtgctctggctgcttattgaaaaagctattaatgaatattaaacctcacttgctgccagtaatatgagggccatggtcacatgatgttaattagcggttagtcttctagtacattacctaatcagccatgcaaactgcttaagcttgtggcattaagtcattgttgggtaccacatgaaagatgatcagtcatttgatcactcttgccaggtcctcaaaatttccaagagttgcttgttgacccagggctgtcttatgattgaatcaatattcattccaccctaaaagaagttatatccatgttcagattacaagctttatcactgatcaaacatgcaatacaagtatgattcatcgaattagagccattggtcatcggtttctttttttctttttttggttatgcaaaggtataaggcatatgtgcagaacttgcaagacagttttttgatgtaggtagaatatccttcattatttgtcttatgacctgactatgttagcgacctgctgtgcccatacaagtcatgaactgaaaaaggttaatcgtcaactgtataaatacataaagtgatatgtgacatacgtgtataactagtatgactagtatgcagtctgcataaccaagaaagcatgaaggggaaatttattgtgaactggaaaaagacccatgattgttcttgattgaattaacggtgcaaattattttattaggatcaatttgcaatatttttatttttttttgcaaaaaagttaaattctaccataaagcttttcacataagtttctttgacttgacttctgtaacaggttgacaactcaatctttgagggcatgctaaacttggtagttatttcagaaacaagccgcactgatgatgatgatgatgatgaaaaagccatgctcattgggaccccactagatgctacacaagaatctaagttgattcacattcttgttgtcagatccattcaagctgcatataagcatgccctaatttcatcagattgccaatcaaaggcagaatttaagcatccattaataattcttgcaaacgaattaaagctagtggcggagaaagagtgtactattttcagtccaacactttgtaaacgataccctgaagctggaagagtagctctggttctcttgcacctactgtatgggcaacagctggagctatttttggaaaggatggataattcagaaagtttgaaagagatactggcagcaacaaataattttgagctttgtgtagctaagaagctttacttaatgaatgagggagctgttggttctttgctgtccaaatatttaaagccatacatggtaaggcatgacttatatttgatttttctcgttgtgtttttctatcacaaagacattattcattgttggtaagctacctgtaccttggatgtctttactttttattcaaccacaaaagataattaagaccttgggttgacaatggctaattggctgcaattatctgtggaaagaccctgcagaattttattctgctaccgttttacagtaaaactataataacatgcaatcctgttagtttaggcagcagtcctgctagatgttagggtcacggtaaaatcatactaaccttttttggtgtcatttggcatttccatggatacatttacattgaactaaatgatatttctgtaattccaaaacagatcagtcaattttcttcacctctcattcttcaatggctgcatgttcaacatgagaatgtcttggagtggacaaaacgtaccattgagatagaggtctgttgctacatgcaaagttcactactagctttttctttttattaaataactaattgttcttcaactgcctcaaaattcttatgagcttctgctcatttacactcacatatagcataaggaaaaactatgtatgttttttttggtatgaactggtatatgtatctgtgtttggtgcaaagtagatcggatttaacattgccatccacacggttttatgtagtaattgcaataactagcaatatacgtcttgcaagttaaattgataattgcaatcatgttgaatcttgcaagaaag

SEQ ID NO: 9224 - DNA, 3274 bp, Oryza sativa
  ref <308>: DATABASE ACCESSION NUMBER: AK106572
  ref <309>: DATABASE ENTRY DATE: 2002-08-28
aaaaaaaaaaaaaaaatagggattgaagtcacctctactgttgatggttactatctttctcaacaccgttatattgaggatcttcttgctcagtcaggcctcactgatagtagaacaactactactcctatggagttgcatgtccgacttcgttccacagatggaactcctcttgatgacccctcacggtatcgacatcttgtgggtagccttgtctatcttactgtcactaggccggatattgcttatgctgttcatatcttgagtcagtttgtcagtgctccgatttcagttcactatggtcacttgcttcgtgtcttacgatatttgaggggcactacaactcaatgcttgttctatgcagcatctagcccgcttcagcttcgcgctttctcggactctacttgggcaagtgatcctattgatcgtcgctctgtcactggctattgtatttttcttggcacttctctcctcacttggaagtccaagaaacaaacagcggtatctcgatctagtactgaggctgaacttcgggctcttgccacaaccacttcagagattgtgtggttgcgttggctactagctgattttggtgtctcttgtgatgtcccgacacctcttttatgtgacaacaccggagctatacaaatcgccaatgatccaatcaagcatgaattgacgaagcatattggcgttgatgcatctttcacacgttctcattgtcagcagtcaacaattgctctccactatgtgccctccgagctacaagtcgctgatttcttcaccaaggcccaaactcgagagcatcatcggttacatcttctcaaactcaatgtggtagatccaccttgagtttgaaggggggtgttaaatatatatacaagctaatgtactgtatagttggcccatgtccagcccatcggatgtccagcccattggatcttgtatcttgtatatacttctctattgctaatactattgttaggttgcaagttagttaagactcctttctttgcaggatccacctgattggcatgaaatccttgcgtacttccatgggtctgaacttcagaattacttcaagcgtatggtcgaggataacctcaagcctatcatgaagcctcaggttgagatcatgcacaaaaaccggaattcttttcaagtaagtgtaggccaactacttgaccggaaagatgagaggggtatgaaagatcagctgtgcaacggcctccaattgaacgaagttattgaccgaaaagtggcaaaactttctggtggtgagctccaaagagttggaatagcagcagctgccctgcaaagcgcggatgtttacatgtttgatgagccatcaagttatcttgatgttaagcagaggcttaatgctgcacgagtcataaagtccctgcttagaacaaacagctatgttatcgtggtggaacatgacttgagtgtcttagattacatgtccgactatatttgctgcttatatgggtaacctggagcttatggtgttgttacgctgccattttcggttcgagaaggtatcaatattttcctggctggatttattccaacagaaaatcttcggtttcgagatgaatctcttacattcaacattgcagatgcccaggaggatgctgagattaagacatatcagcggtacaagtaccctaccatgagcaaaacaattggtaacttcaagctcactgtcatggaaggtgaattcactgattctcagatttttgtgatgcttggtgagaacggaacagggaagaccacattcatcaagatgctggccggggtggagaaaccagacactgtggacggaattgatattgaagttcctgaattttgtgtgtcctacaagccacagaagcttgcatcaacttaccagggtacagtgaggcaatttcttcatgagaaaataagggattcatacactcatcctcagtttgtgtccgatgtcatgaagccactaaaaatgcaacaactcatggaccaggaggttcagcatttatcgtgtggacagctccagagagttgcattatgcatttgtcttggaaagcctgcagatatttatttgattgatgaaccaagcgcatctctcgattcagagcagcgtcttgttgcctcaaaggttatcaaaagatttatcatgcatgcaaagaaaactgcgtttattgtcgagcatgatttcattatggcaacctacttagccgacagggttatcgtctacgagggacagcctgctgttgactgtactgccaatgcaccacagtctttgctatccgggatgaataagttcttatcacatcttgagattacttttagaagagatccaaccaactttaggccacggataaacaaactggattctgcaaaagacagggaacagaagtctgcaggatcctactattacctctgaaagtgggcacaattgttgatactttgctactaccactgtatagcattgtgcctatggtgcttgcagttgagggaacaagagcgggttcggaaaatggggcgcagcggaacaggaaggaagccatgtttggaccatttcatggaacaagtaagaagataggacaacacaaacaagagcaggaacatggtaacctcttgtggaatctactgaaatcacacagaggaaatgcaggaactgctgaggtggttaaatcagatcaaggatcctacaccaaaagtagtttggagatggattacacgatggcgcggagcattatgtcggtcttcagactcaaggaattgcagaatgatcagaggtccccagccttttagaatgcctcctagtatgcatgatggtaaaggaattctctactggacttcagcctcagcgatcgcaggacgcgatgagatgtcgtgaagtcatcaatgccacggcggataatgtttgcgggagtttggtcaagaagtgaaagaacttcatgggatttcgtttgttgctggtttttagactttagaatgctatttgggtttatggaatgttttgtgaacttctgagatgttttatcatgtggcgcgccaggttttttgtcccatagattgtattcgagatttgaatacaaacagtgggttttcctggcgccttgaaccagcaatttatttgctatatgctggacttgatttaactaaaaacgagtattgagttgttttatgtggttggtgcgtttgttttgttctgggaatccaggagtggtcaggttcacctgtgaaatctacttcagtaaaatgtgaccaaattgagtattatactatt

SEQ ID NO: 9225 - DNA, 1391 bp, Oryza sativa
  ref <308>: DATABASE ACCESSION NUMBER: AK106573
  ref <309>: DATABASE ENTRY DATE: 2002-08-28
aaaaaaaaaaaaaaaaaaaaaaaaaaaaaaaaaaaaaaaaaaaaaaaaaaaaaaaaaaaaattctgaaacagctcatataatcacctcttcgttgttgccttctgccggttcatcggtttcagagtcagatggagagggtacgcagcttatatctgaatcaaaccaacatgggcaacaaaatttcagaggtgaaaagattaagattgccacgactgaaaatcattatgcacatcaagtgcttacaaaaactgaacgagaatgaatgcataccatcatcttcatctgcaggtgtctcaattgtcagattatccattgcctgcagctgcctagcgaacaccaagtcatactcaatctgttggtcgatttctgaatttctcgaggttgttgcttcaccactgctgttctctccgtgatagtagtaatgtaaaccatcagattgggcaagagcagtgtttcttgcccctctcatgtcatccccgtatttgccatacaatatcgattgatacagaccctcctagaaaaaagttcagaaaaacaaataagtttattctcaaaaaagtttcagagaaacagtggaaagtttactaaacaatgttgaactaaagtaaagaggccatatcaaaggcttagaaacatatgtttgatgctaaagctcatcattctgcaagcctgtaagagcagtatgctaataatgatggaaaggttggatcaaatgcatacctgatcctgaagaacatcaccaatcacataatcaagaacctcgtcgtcgaggccatcgacgtgtgcttctccggcgccggcgatcggcggcggattcacgtagtgaacggtgatccttctcatggcatcaggctgccccacggtggccatgaatggccacccggacaagacaaatgtcagagggcactcaagaacaagcagcggcaatagaagcttccaagaaccaaaaaaaaaaaaggaatccaggcaatataacaagagcagaattgaggtgaagaacaggtctctgcaggagtttgtgatgaggaaaacaagaggagaatcaatgaagggaaaggggaagaagaaagaacatgccaagatcgagatgcttactcagttactctatctctgtctgtctgtctcttgtttctctcctcttctctgcttctcaaggctggacggattctttgttaatgagggtgggtggctccatgagtatttatatatctgcaagtcgttctctctctctctctctctctctgtgtgcaagtgttttactgtccagtagttgtcttgactgaaagggactaggctaggtaggggtccaactgttacatatactgtaatattgtttgttttgtaaaacatatgcaattaatgtaatgctatggtaaattttatttcttct

SEQ ID NO: 9226 - DNA, 1497 bp, Oryza sativa
  ref <308>: DATABASE ACCESSION NUMBER: AK106574
  ref <309>: DATABASE ENTRY DATE: 2002-08-28
atcttggagacggagtggtccaaggaagtgcatttagagggatcatgctgctgctcatcagcgtcttgtggaggactacttcgctgcagaaccactctacactaagagtatgtttcgtacaagattccgtatgaatagacgcctcttcctacgcattgtgaatgcccttggtcagtgttctccctatttcacttatagggtagattgtactggtcgaatagggctttcaccactgcaaaagtgtacagcagccatgcgcatgctggcatatggcactcctgcagatgcccttgatgagtacttgaagattgggaagtgtacttcattagagtgcttggataggtttacacggggggtgattgaggtgttcggtggggagtacttgcgacgccccacatcctcggatgttgagcgtctacttcaggtcaacgagtctcgtggtttttctggaatgttaggaagtatagattgcatgcactggcgttgggagaagtgtcctttagcatggagggggcaattcacccgtggtgattatggagtaccaacaatagtcctagaagctgttgcttcccaggacttgcatatttggcatgctttctttggagttgctgggtcaaacaatgaccttaatgtgctgaaccagtccccattgttttttgatgcattgaaaggagaagccccgcaagttcagttttcagtcaatgggaatgagtatggaacaggttattaccttgctgatggtatatatccagaatgggctgccttcatgaagaccatacctcttccccaaactgagaagcataagttgtttgccaagcaccaagaaggggcaaggaaagatgtggagcgtgcttttggggtgttgcagtcccgatttaccattgtccgtcggcctgcacgattgtggaggcggaagagtgttgggaggatcatgctagcttgtgtgattctccacaacatgatagtcgaagatgagagagaggaagctaccattcatattgacttgaatgagaatccaggggcatcgtttgcgctgcctcctgaagtgaatataggtggtaatctgtgttttgctgatgtgatgcgcaaaaaagctactgtccgttctcgtccacaacacacccaacttaaaaatgatttggtcgagcacatttggcataagtttggagataaccatcataattagtcatggattgtgctgttgctggttgtcgtgggtgctacttacaatgaatgaaggcttttgaggcaaatggtttggatgttgctttctactgaagtttcaactaaactatggcttgttgtttctttctactgaagttccaactaaggctctatgccattatcgttgttcagctcagtaactaatggtttgtctgccagagagcttatttagcagtacttttggttaatgttttcagaaagactcatgtaatgttttaagcgccggtgtcatggtgctcaaatctcatcatatcatgcgtgcaatgttgcttg

SEQ ID NO: 9227 - DNA, 1420 bp, Oryza sativa
  ref <308>: DATABASE ACCESSION NUMBER: AK106575
  ref <309>: DATABASE ENTRY DATE: 2002-08-28
taagcaagggagcggtgactggacctacatataaccaacatgttccttttttgatgagcattaaggtggagttcaccttttggacaactagcttggagtgttatagagaatatggcattcatgtattcatttgtgttattaggagtaggtttctggaatcaaatacatatctaaatatgtgtcaattatagcttgttggttaagcatccatagtggtatgacgtgttattgtcgtcctaaattcctaatgctatttaaatcagtcaatgtctcttataaactgttcacttatttataagttacctcctaaaagatctgtgacaggtgatcaatcgaaaaaaatatttccatgatttgttaggatttagaaaaatgagttgtgattaatctgcatatatccggacaattgtattttgttgatttagatatatggacagaagtatatttctcctgcacctgtgtaaactttggggtcaacatccaatcctacacttgtacctttgcattctttagctgtttacacaggtctcctccccaaagaccaccacgggacttgagctgccttctggtggtcatgtaagctgtcgatactgcacaccaagtggtaagctgtctagcgcttctgtattcattgagatggagatgtcgtatatggtgaatccacaaactgggtatgttaacaagcttaaggaacgggcaaagatttctacaccaagattctcatatttaccccagagcgggattttacatggatgaggctcattgctgataagtgcggtgcggtgctgtgttgtgctcatgtgcgacccggcgcacatcagcaggcttgtcaccacgatggtatcatattcaaactgagtttgaacttagtttatcaaagatcattctgattttcagaataacaaaggtaacattttgaggaatgccgtagtctctttaaccactgcgatgtggttacatcaactaacaagaatctaacaggtcctagaggtggtacaatatttttcaggagaggaaaaaattaaggaagaggactgttcttttttctcaaggggatgaaaatgaattgtgactttcaggacaggataaattttgttgttttccattcaaaacaactatgccaggacgggaggtccccatggtatatattgcttccttggtgataactctgaagcaagttgcaacacctgaatataaagcatagattcaacaagttaagaaaaatgcaaaagttttggcaacagctttgcttagaagaaaatgcagaattgttactattttagatgatggaaaatgattagtacatgccgactgctgggcgatggcacagataaccactactttgggatttaagaacttcaggcctaatcggtataattgtgcctaccattttcttaattaatttattttttaatccgtg

SEQ ID NO: 9228 - DNA, 1798 bp, Oryza sativa
  ref <308>: DATABASE ACCESSION NUMBER: AK106576
  ref <309>: DATABASE ENTRY DATE: 2002-08-28
tgataactcgacggatcgcacggccctcgtgccggcgacgcatcattcaaatttctgccctatcaactttcgatggtaggataggggcctaccatggtggtgacgggtgacggagaattagggttcgattccggagagggagcctgagaaacggctaccacatccaaggaaggcagcaggcgcgcaaattacccaatcctgacacggggaggtagtgacaataaataacaataccgggcgctttagtgtctggtaattggaatgagtacaatctaaatcccttaacgaggatccattggagggctgaacactacatatccccgatatgctatgtagatctcattgagtgccttggctttttggctacaacgcatcttgtactgaatgactatatgttttgcacaaaatctctgttggccaaaatgatgaagtgtcgcactaccaagggttactttgagacatgtatggctcctagcacagatatcgatctgggctatgcaggtcattcagcacggtgtttcatatacctgtcagttaaggatcttttgggaagcaagcgtatgattgtagagtgggttcagaacacctctactccaactagttcttatgttccaatccttctgagattagttatcacactttatcttgtgactgtaaaccaagacgatggagatttgtatgaggttacagctttcctcgagaaaaatcatgtttttacggatttacctcctgagttctctgaaaagattagaaatgctttgaggatgaagtctcgcacagtgaagaacttcatgagggtatttgctgatgcccttgcagcaataggaactcgcacggtagttatgggtgatattaagaaggcaatggcacataaatgccagccagacttgaatgctgatatgattagcagtgtggatttgagtgatgctaagaaggtaatggcacttctttcaacagagaagtcaagtagtttaaagcaggaacctcagctgccagagatcaaatctgtttgtaacaaaatttgcaacgctacttctggtcacttccctttgacaagtgtaggaggtagccagaagagtacaagtaattttaatttgagtgatgtggatcatcctttgttggagaagtttgaggcgtttcaagtcaatatgcctcaaaagaaaaatggaagcttaatttctcaaattcttagaagtcccctttcctggatagagcaaagagctcctcctgtgcaaatgttagagttgagacacatttgcaagcaagtcgaagaacagcatgttagggagaagagagctttgtccgtgaaggatctccattcaaaccgggaacatggtgatggtgaaaaaaatattgggaagatcgtcgacgtgcaaggaagccaatctaaccctgacagagctagcgaatggagtggatgctcagatgacgagcaagagacgggaggaagtaatgtggtgcagtcgaccaaagaagcaccagccgctgccagctccggccccagctccaaaaacaagccgcagaaaaagaagaaatctaagaagtccaagcgtagcggcaggaagtagtctctgttttgttttgctcttctgcctgaccaggcgtcggatggccttttttgcttacaccgttgtaagtccagcagcaaggccagctttgcttaactggatgtactccctccatactgaaatcgtttttgacagcgacacggtctccaaaacacaactttaacttcctgtttctataaaaatatttattgaaaaaaaaaaaaaaaaaaaaaaaaaaaaaaaaaaaaaag

SEQ ID NO: 9229 - DNA, 3150 bp, Oryza sativa
  ref <308>: DATABASE ACCESSION NUMBER: AK106577
  ref <309>: DATABASE ENTRY DATE: 2002-08-28
caaactgtgttttatgctagttagatgttttgtaacaggtcttcggggtcacatgggttgatgtgacgggggagattattgggcctgatgtgtgatgggggagattgttgggtttagtcccacatcggtaattgatgatgggggagcacgacttaaaaggtgggggcggtcctcacccatcagactagtcttttgggttgtgtagggctaggacctaaagttgtggctccgattaggcctgtggtggagcaggtccaatgtgacctaggtggcccacggctggtgggccaggctgcgcactgtaacaaatatgatttgtgctaaaaggttaaaataaaaacatggtgttttgaatttctgaacatgctcactaaacaagtgaaacgtgccttaggtcatgttgagtacatggagaacgttgtagaatctgaagaagtgttctcttactctagatgtcttaagcaaaaaggtattaaggttaattatgaaaattgtgataatttgagtagggaaatgttaacagtgaaattttgcaagatataatcggatttggagatagatgtcttaagcaaaaaggtgttaaggttaattatgaaaattgtgataatttgagtagggaaatgttaacagtgaaatttggcaagatataatcagatttggagatagatatcgaagcggatttgaaggagattgaatcttgccaaaaacagactgcacattggctgggcagcgtatcggctggaaatagagccgggaactaattcggccgatatggaaagtggccaatacagcttgacttgggcttagtttgggcctcgattgaactaaccgacattgccgtatagagatacaacttatttaaggcaatagtatctattaattaggatattaaagtcggtttgaattacacatatggtaagagtctgccatgtggacttgtttgatgtttttatctttaggaaagtttgagcagtgtccataatggacaagttttgtactttgggtataaatataaatccaagattattgtaaaacaggacgacaatccaattaatacaactttcggcgcatcgccaccttttcttttaagttttcgacgagttcttgcttcaagtcagggtcagggccggccctggggtagggcggacagtgcgaccgccctgggcccctaggcgtcaggtggcccaaccggctatacactgctatacgtgcatatatagtgcgtttggttgctttgcgcaggagtattaagttaatctcacctttaaaaccagaccattaatttacagtgtttatcatgttgcccattcttgtgtatgctaaaatagcaccctaaacagaatgattagactgaactcatggtaattagtacctttgtattttttttcctatttaattcactcctcttgtgatcttgcaccaatttattgaagatgtatttgtcgctagtatgtcttgtatgcattctactcttttcactaggcttagatattgcttttaagggtgatgtttaatgacatttaaattcttttacttgaaataaagaaatatgcaatgtttaaaccagtgtttattttgaatgactaatgcttatatatatgcttgagtggattgttattccttaaattactctttgtttgttccaaatgccgcaagtgaaaatattgcttgtatttacttttaagagaggtaacaatgaataccgaatccttggaaacaatcttgacgacaatgacatattcacggtgaggaaaataatgagtacataatccttggaaacagtcttgacgacaaggatgcacttgaaataattgagagattttatgttcaatgtcaaactgagcacaaaaatttcaaataaaagctgaaagttctcttggagttaatttgagactgaataataatgcaattggtatatgtctaggggttttcttttattctctgtacttgtgaatatgttgcgttataaattgtttgaaatcatgaattttgattgttgatttgattttactagtaatatctttggttcatgattgtactctagtgtatgcttgctatctagttgatgactttatcttctattgcgacacatgaccttgaattgctttatgtataattccaagctcttgaaagtaaataagtactaaatgctaatgcttgatgaaatcattgtcaggaggagaaaagatatacaaaatgtgcatattttcaaatgctagggaaatttttttcttttcaagtgagagaaatttgttttttgaattttgagcacttcgatggggagattataaaattgatatgtgtttgatctttatttgatgaacaattggcatatgggatattgtttttgatatttgtaaattattggaaaagtggttttggagatggttgatttttagatgatgaacatgatgtttgtctcacggttgtggtcacagcggctaggctagggcgatcataccagtgctaggtgtgtggtaagaccagtcggcccgatagtctgaccgaccagctctatgacggttgtttctttgaatatgtgtgattaattcatgtttatggcttctatatggatactatacatatgtaatactattgtgtgctaacattgagccaagttggagagaacatgtactcggatatggtttcttggttgatgtatgtgtaggtgagtcttgatgcctcggaagaatgttgccggtgatggatcggaagtcaatttgggagaagatggtgttcggacgagcaggatatcatacgggatacttactccgaagatcaacacacgttgttggtgaagatttcatatatatggcgtatgatagagaaattgtgtgcgtatgggatacggagtagaatttggaaaagagtccaaatttgatgcggttggactttgtaaagtttgtttcttgtaggggaaggttttctaagatcttaagacttattgtacaaattgggtttgtggctttaggctgtcttaccttagatataaataggtatggagggtgaggcctcttggtattgattgggtgagaattaagtttagataaaagttaggatcttgagtttagtcgagatttttgagaggagttttgttgttgcaccttgtaaacagaataaaagtaatgaagtttaatctactttgaaatc

SEQ ID NO: 9230 - DNA, 2042 bp, Oryza sativa
  ref <308>: DATABASE ACCESSION NUMBER: AK106578
  ref <309>: DATABASE ENTRY DATE: 2002-08-28
gagacaccagaggcattatccgcgcgcggcttctcctgccattccttctcccaccttcgttccctcgcgaagcagccgctcctctctctcgccatctctccgactcctccggtccaaatcccccccccccccctccaaatccggttccaccaaccagcaggaccgcacgcgatggcggcgatgggacatctcggcgacccgtacgcgctgcgctccgtcgcggaccttcccccgccattccgctccgttttcggattcaggtatttcaattcgttgcagagcgagtgcttccctgcatgcttcctctcggatgtaaacatggttatctctgcgcctactgggagtggcaaaaccgtgctgttcgagctctgcattctaaggcttctctcaaggttcctctcatcagagtggaggtttaatttgatcaaaggaaccctgaaaacaatctatattgctccaatgaaggcgttggtgcaggagaagttgcgtgactggaacatgaagctgggctcgttggggatcagttgcttggagatgactggtgacaatgaattctataacaccaaatccatacatgatgctgacttaattctcacaactcctgagaagtttgattctgtgagtcgtcatggaataagagatggtggactgggtttcttcagtgacattgctctggtccttattgatgaagttcatctcctcaacgatcctcgtggagctgccctagaagcaattgtcagtagaataaaaatgctttctcgacttggcacaatgaagattgctcctttggcaaatgttcgattcatagcagtttctgccactatccctaatattgaggatatagcggagtggcttgcagtaccgtctgaaggaataaaaagatttggagaagagatgaggccagtgaagttgacaaccaaggtttttggttatgctccagcaagaaatgacttcctgtttgagaggagactccaaagtttcattttcgatatactgatgcaacattcaagaggaaagtctgcacttgttttctgttctactagaaaaggcgcacaagaagcagcacagtgcctttcacaaactgcgagttctctaggctattcaaatccatttatgaaatcgatgcagcagtatgaacatctaaaggaggctgcactaacctgtagcgacaagcagttgcaggcttgtctcgtacatggagttggttatcacaacggtggtctttgcctaaaggataggagtgtcgttgagggacttttcctgaagggtgatattcaaattctttgcacgacgaatactttggcacatgggatcaacttacctgctcacacagtggtgataaagtcaacacaatttttcaacaaagagaagggtctgtatgtagaatatgagagatccatggttcttcagatgtgtggaagggctgggcgtccaccatttgatgatactggaacaattataatcatgacaagaagagagacagtgcatctatatgagaaccttctaaatggatgtgagatggtggagtctcagttacttccatgtgcggttgagcatctaaatgcagagattgttcagctgacggtgtctgatataactttggctattgagtggctcaagtgctcgtatttgtacatcaggataaagaagaatcctcagcattacggaattaagaaagaaattccacgtgaacttcttgaaaagcaaatgaaagatatatgtgttgagaagatccatgagctgggggagtatggtctaatttggacagatgaggatggtttccttctaaaaccattagaacctgggaggctgatgacaaaattctatctgaaatttgatactatgaagcttattgtcaaagcttctgcctgttgcactttggaagatctgttgcatatcatctgccactctgcagagattacttggatccaactacgacgaaatgagaagaagctccttaatgagataaatgctgacaaagagggaaggctttggttccatgttgttggtgcaaatgggaaaaggaagaagcgtattcaaac

SEQ ID NO: 9231 - DNA, 1748 bp, Oryza sativa
  ref <308>: DATABASE ACCESSION NUMBER: AK106579
  ref <309>: DATABASE ENTRY DATE: 2002-08-28
aaatgaacaatatggatggatgcaagccaccaggcttgtctcttgagagaacctctccgctgtttatggagcagagtgtagagaatgacttgtttgatatacttggtcctcagtttcatcacttgtgccacaatgctggtgccgatttggtcccctggactgatgcaaaaccagagagttcagatagagatgtgcctgaatcctctattcatgccgattccgctcctctattcagttcacgagacaacgagctctattctgggatcttctcattaacggatactgaccaactattagatgctgtcatctcaaatgttaatccagctggtaagcagagttccgatgatagtgcttcttgcaagacttcattgacagacattcctgccacttcttatctttgttcaaaagagatgaagcaatgtggatcctctggcgttccctcggtgctaatcaagaatgagtctgcacagtttattaaacaaccatgtctcgctgagaacgccgaggatggttgcctatcccagaataatggaatgcacaaatctcaaatacgtctttggattgagagtggacagagcatgaaatgtgaaagtgcatcagcttctaacagcaaaggtcttgatacaccaagcaaggcgaaccgaaagaggtctcggccaggagagagtcctaaaccaaggccaaaggatcggcagctgatacaggatcgtataaaggagctccgagaaatggtacctaatggggctaagtgtagcatcgatgccttgctggagaagacagttaagcacatgcttttcttgcaaagtgtgacgaagcatgcagacaagctcaaggattctactgaatccaagattcttggcaatgagaatggtcctgtttggaaagactattttgaaggtggtgcaacttgggcatttgatgttggctctcagtctatgacatgtccaatcattgttgaggatcttgaccgacctcgccaaatgcttgttgagatgatttgtgaggatagaggcatattcttggagatagctgacttcatcaagggacttggattgaccatcctaagaggtgcaatggaagcccgtaaaagtaaaatttgggcacggtttactgttgaggcaaacagggacgtgacccgaatggagatctttctctcgcttgtgcgcttactggaacccaattgcgacagcagtggagcagcggaaaatgctaacaatgtcaacatgcctcttggcttggtgcaccaacctgttatcccggcgacaggtcgaatccagtgaccactgacaagtagatgaagcaatcatcatcttcaggaagacatcaagtgctaagagcaggaattcggtttcgttcctgccatgactagcattgccaatttgctggtgcacaccacctgctttcatgtgacatcttgctgtgaaaatgtgccatctttgctgcgagccatctgatcccaaagtctagagctgaacatgagatgcatcagagaagagggtctgttgattgagagaatgttcattaggcagtgtttagcctgtataatcttagtcttctttttttgttcttaattctgtcttgacatatgttagtggattctctactgttatcctgaatgcaaattcttgtgttgttttgttaacattgagaatcgtaaagccccttttatataagtttgttctgatggtcatagaacaaaaaaaaaaaaaaaaaaaaaaaaaaaaaaaaaaaaaaaaaaaaaaaaaatt

SEQ ID NO: 9232 - DNA, 1714 bp, Oryza sativa
  ref <308>: DATABASE ACCESSION NUMBER: AK106580
  ref <309>: DATABASE ENTRY DATE: 2002-08-28
gttcgatgatgtgcaaggtaactgttgtatatagacagagttctacgactgccgatttattttaactgggagatatttttcaattcttacaagttcctgtctttaaacctcacattttacttcatactaatttttgcaagactgcccagtactagcaggtagcatgcagaaatctcaacttggtggagtcaattgaggatagagggaatgccagtggctctcatgaaagattggtacactatatttgatggtgagctggtgatataaggtgagcattgcattctgaccatgtcctgtttggtgtggagataggcttatcaatataattttatgtgcatttaggatctcagtatttctcgtgaaaattggtgatggcctgttcacttgaccttcatgtccattctattttaccttgaaatgcatgattagccctggaaactaaccggacgttagagttacaccctggtgggttttgcttgtgactggtcatatttcttaaaacaagtctcgggtgttggataaaagtttggtaattaactgagcttttgagtctgacacttggcttggaaaggtttgcgacaactttgaaattgtggacagtagtctaaatctcaagatgtgctcaactttgaaatattgtcaactgtgactaaagtccagaatccttgatagcagctgatatatatttaatttacctgaatataccgtaaagtactggctttaaaatcttactggttcccatattactagcagccaccaagctcttggattggagatgtttgttagataaatccttgtgggttttgagcttaaaactatactcaacctgtgtctatcgtttgcgccaggtgagcttgttcttaatatcttacaaaagtcatttcctttatcaaactttagtgatgtgatgattgtattcatctattgcttgtttcttctttctataaaggctcattacttaaaagttatcttctggcaaaaaaaaagactgttatttggtctgataacatcttattggctgctacaatatcttctttgacaaactgagtatttgaaatctgctggaaaatgttttacaactatatttaagcaaggacgagtattttttttaatttatcgttttcatttttgcaattgagtgaaactaccgttgaaggtaatttatcaacatcgagtgtcaacactagtgaaacaaaattagtccggcttgttttgttgattaaagatgaaatcattctataggcaagatagactaaccccagaatgctggtagtttaggctcgttttggacatgcgaaagattttactcatcgaaggtggatttggagagctgctgcttcctactgtgaatggatgagcagctggtaaatgttttactcattgggctacgtgacgtcagcccaaagatcgcctccaaagctgtagcagcgggtcaattgtacaagagcctgtaactctgtaaggtatgatatactaacccttcggaacgggcgccaacgcttccatcgtcatgttacatgagatcgcgttcgaagacggcgagcagcaggtttgatcacaggtttcgaacctggcattctcgtatagtcgtatttgcttcgatcatcatatgttacagagatcgcgtttgtttgaagacggcgagcagcggttttgatcacaggtttcgaaccaacaaccctgtactaatatatactactgcatgtgttctttc

SEQ ID NO: 9233 - DNA, 2550 bp, Oryza sativa
  ref <308>: DATABASE ACCESSION NUMBER: AK106581
  ref <309>: DATABASE ENTRY DATE: 2002-08-28
tagtcaagcctttgggtctgtagacagagaatacaatgatttgaactcaaaatcccaggaagcagcgcaagagctgaaactggtacagatgaaaatacttgatgctaggagccacttgtcaaagcttcaaaaggaattggatgcaaagagaagctatgtggagtccaaacttcaatccattacgaagatgtctgctgacattaacatgtttcccaaacatctgaaagatgccatggatgaaagagagaaaaaaaaacaatttaagttacgcgaagggaatgcggcaaatgtatgagccttttgaaaatttggctcgtgagctccacatgtgcccttgctgtcaacgtgctttcacacctgatgaagaggatgaatttgtaaagaagcaaaggacaacgtgtgaaagtactgcagatcgcatgaacaagatctcattggaatgctcaaatgctgaagactttttccagcaattgaataaactcaatgcaacttatgaggaatttgtgaagctgggaaaagaggctatacctctagcagagaagaacttgaaacaacttttggcggatgaaagtgagaaggcacaaacatttgatgattttgtcagtgttcttgctcaagttaaaatggacaaggatgcagtgcaggtattgctacagccagttgaaacgattgataggcacgtacaagaaatacagcagttaggaccacaagttgaaaatcttgaatataagcttgatgttcgtggccaaggtgttaaatctttggagcaaatccagttggagttgaactctgtgcagaggacaagggacacattgaacaatgaagtggatgatctaagggatcaacaaagaacacttaccgatggtctgactaatgctcagatgcgatggcatgatattagggaagagaagctaaaagcttcaggtgcagtgcacaaatttcaaaaagctgaagaggatttgggacatctagctgaggagaaagaaaaactaacattagaagagaagcatttagaggagtctcttggtccgttgtcaaaagagagagaaagcttgttgcaagagcatgaagctttgaaggaaaagcttgatcaggagtatcatcagctggcagaaagaaaaagggaattccagcaggaaattgatgcactcgagacacacaatgagcgtatcaaagggtacctgaattcaaagaagggcgagaagcttaatgaactacaggaaaaacatactcagttgcagtctgatctacagaaaagtaaggaaagaaaagaagaaaaatcggcggagttaagcaagaacaaagagctattgaagagccaagatcagttgaaaagaaacattgatgacaaccttaactacaggagaacaaaggatgaagtggaacgacttactcatgaaatagaattacttgaggacaaaatactttccattggcagcctgtctactatagaagcggatcttaagcaacattcacaagaaaaagataggcttctttcagagtataataggtgtcaaggaacgcagtccgtttatcaaagtaatatttcaaaacacaagcttgaacttaaacagacgcagtacaaggatattgagaagcgatactttaaccaacttcttcaactaaagacaactgagatggcaaacaaggacttggaccgatactatgctgctttggataaggctcttatgcggttccacaccatgaaaatggaggagataaacaaaataatcaaggaactgtggcaacagacatataggggccaagatatcgactatataagcattaattctgactctgagggtgctggcactcgatcatacagctatcgtgttgtcatgcaaacaggtgatgctgagctggaaatgcgagggcgctgcagtgccggccagaaggtgcttgcgtcgcttataatcagactggcactggcagaaacattctgtctgaactgtggcatattagctctagatgagccgaccaccaatctagatgggcctaatgcagagagccttgctggtgcccttttgagaataatggagagcaggaaagggcaggagaacttccagttgattgtgatcacccatgacgagaggtttgctcagcttattggtcagaggcagctcgccgagaaatactaccgagtctccaaggatgaacaccagcacagcaaaatcgaagcccaggagatctttgactgaagagacgcggttcttggatcatttttaacattactatcgcaaagcctgccttttgctctaccagccaatgtgcttgcagttcatattcggctaggatgcttgccaagtcgagctgaagagaggagttcaacagttgacaagtctgacgtttgcatggtaagtttgtttccatcttggcctgtgccagggatcctgattttgcctatgacctcatcgttgtgtatatgatattaatgtagaggaggcaccgtacacactttatttatgctgttgattacagcatctaagaattgcaactaatgtagcataattcagtggatgtaactatacttattgctgggtcttttgcgtc

SEQ ID NO: 9234 - DNA, 1549 bp, Oryza sativa
  ref <308>: DATABASE ACCESSION NUMBER: AK106582
  ref <309>: DATABASE ENTRY DATE: 2002-08-28
atttttatctatcccgaatcaggcattttggccagtggtattcatagcaattctagcagccataattgctagtcgcacaatgacaactgctatattctcaacaataaagcaggccacagctctcggctgttttccccgcctcaagattattcacacttctagaagcttcatgggtcaaatatatatcccaatgatgaactggtttttgctggtttcttgccttgcatttgttacaatgtttgggagcatcaatgagattggaaatgcatatggcatagctgaacttggggtcatgatgatgactacagtcttggtgaccatcataatgcttttgatatggcagatcaacatcattgtagttctgtgttttctcaccctctccctggggctggagttaattttcttttcttcagtattgggcagtgtagcagatgggagttgggttcttttggtatttgctgctgtactgtatttgataatgtacatatggaactacggaaccaagttgaagtacgaaactgaggttaagcaaaaactttcaatggatttgttgatggagctaggttgtaatctgggtacagtcagagtccctggaattggattactttataacgaacttgcgaggggagttcctggaatctttggtcaattcctcgccacaatgccagccattcattcaatgattatttttgtctgcatcaagtgggttccagttcctgttgtacctcagaatggaagatttctctttcgtcgggtctgtccaaagagctatcatatgtttcgctgcattgctaggtatgggtacaaggacatacgcaaggaggactacatatcatttcagcagcttctgatagagagtctcgagaagttcatgcggcgggaagcccaagagcgctccctagagagtgaccaatacgacggtacagactcagaagaggaggctgcatcagcctcgtcaagagctctcgtcggtcccaatggcagtatcaattctctcggtgttccacctgccgaggcggctggtactaccgagcacccaaccattggatcgagcatgtcgttcgacggatcgctggatgaggcgatcgatgggaggggaagcctcgacgacgagctctcgttcatccacaaggccaaggagtccggcgtggtgtacctcctgggccacggcgacatcagagctcggaaggagtccttctttgtcaagaagctggtgatcaactatttctacgccttcttgaggaggaactgcaggagaggaatcgcggcgctgagcataccgccctcccggatgatgcaggtcgctatgcaatacatggtttaagggccttcagctgttctgcataccattttgtacttcggtggtaagggcactttaactcccattggatagagtggcaagaggttttcaaacaggctgcttaccaccaacagaatcatcaaaacactaacaaagctaatactactgtttaaccgaagccaatgagaaaaaagaactagtccattcagcgacattaacaaaaggtcacttttacctacactcatcttt

SEQ ID NO: 9235 - DNA, 2376 bp, Oryza sativa
  ref <308>: DATABASE ACCESSION NUMBER: AK106583
  ref <309>: DATABASE ENTRY DATE: 2002-08-28
atgacaccagtacatcgaatcatgaagacattcagctttatcagtctctactgggtgcaattagtgatatcacaagacatcagccttttcgagatgtctgcttccgtaacatgcatcttttctatgatcttctggctgcggatgttggtgattcagagtttgctgcaatcgttgaacttcgaagccctgatgaatgtttgaaagctctttcacctcttcgtgcccgggttttcctgaatgctcttcttgattgtgaaataccagtaacaatgagagacgatggtacatatgctttagagcctggttgtgcagaagctagtaccaagaatgatgtaaagtttccagagaggcttatagaaattctgaatgtcctacagcctgcaaagttccattggcaatgggttgagttgaggctgcttttggatgagcaatctcttattgagaaaccaaagaatgtgccatatgtaaaagcacttcgatccctatcccctaatgctgagaattttaccctctctgaaagggaaaaggggcttactgaagttattttgtctaggctactcgtcagacctgatgctgctcctctatactcagaacttattcaccttcttggaaagctacaagagtcattcgtgatgggtatcaaatggttcttacaagggcaagatgttcttttgggaaacaactctgtaagacaacagcttgttaacttgactcagcgcaaaggatttccaatgaagacacagttttggaagccatggggatggtcaaaattagtcggatatgctaatgctaataaaagctccaaaaggaagttagaagttacttcaattgaggaaagagaagttgatggcttgattgattctataaaatccagtaataggaagtcgctaaatgtgggtacaagcccagaagggcatggatctacccaaaaatattttactcaggaagcccttgctgagttggttttgccatgcatagacagaagttctagcgagtttcgctctgtatttgctggtgatttgatcaaacatatgggtgtgatcagtgagcatattaaagcagcagtgtggaacggtattaataaactgaatagttcaaatccttcaggaaatgaaggtttgagtaaacccaatggccgcaaaggaatcttcagtggtagtccgaatatcaggaagcatagccctgtacctaatgattcaactactccttccgcatcagctttacgatcatcaatatggttgcgcctgcaattcatcattaggctacttccagtaattattgcagacagtaacatgaggcaaacgctagcttcctccttattaagcttggttggaacacgtgtggtctatgaagatgcagattcacttgaaccttacatggatgatgtcctgcttgattgtccaagtgaaagcctattcgataggcttttatgtgtcctgcaagctttgcttggcaatagccaaccaagttggctgaagactaagccaagctccaagccagctgttaaatttttgcgtgatctttctgcaattgataaagaggtcactaagagcttgcagtgtgcattagatcgcatggagttgccagcaacaatcaggcggcggattcaagtggctatgccgattctacctacttcccgcctctcctccataacatgtggtcctcctctactgtcctctgctgcactatcaccattccagtgcagtacatctgctgcagggcctcaccaacaatttcccctcaattggattcctaccaatctctcaagaagatgcaaggcagcgttgccttcacaggatcctaacatggaaatagatccttggactttgctggaagacggtacaagctgtccaaataccaacagtggcagcaattctgcaaatggtgttaccggtgaccatgccaatctgaaagcttgcagctttctcaaggattctgtaagggtgaggaggactgacctgacttacattggctctctggatgaagacagctaaccggcgcaattatcacctccccctcataattttgttgcaaacccgtaggttgtaaatacatatgtgcaatgcatcgagcattcttctgtactttaaaaacatggtgtggaagagtgctatagcattttccaatcaagatggactcagtttaaccctggagtggatagttcctagatgtaatttattgaaactatctcctttgttcttaagggttgcgcttagtaggctgcattgcaaggtagctcaaatttagctttatgacatagataattatatagttagtcggagttctccttgggggtgtttgtatactagtaagatttgggtctcccataatccattggtaatatgaatcagggtggcctccttttgccatgtattc

SEQ ID NO: 9236 - DNA, 2206 bp, Oryza sativa
  ref <308>: DATABASE ACCESSION NUMBER: AK106584
  ref <309>: DATABASE ENTRY DATE: 2002-08-28
atcgttgtaaatattcacatatgttgtcactgcaggtgaaacgagtgatagaattaatgatgcttttcctgtgcatcatagatttgaagttggtaaaggtgctctgctgtaagccatacgatggttgtaaactcaccatcgttgttgagcctcttggcatgggactccctgctgcatcggttggacgcatatataagaaaatctacccagatcccatagaccagcttcatcgtgtcatctctttcaagcagtcgttttgctagctgggtggcgaaaaataaacggttagatatcagatcttgtgtgacctccttgtcatgtagcatgttggcaagtttctgacttggatggagcccagaaacatatgcgggtacaccagcttcctcccactctttggccagactttctttggtccattggtacatcttgttttgagcaaggccaggtagcatgtctggttgtttgacaaggaggaacatcatgtagtttgataatgctttgacagcttccttcacagcatcttgatcgtcggccttgcgctgagcaataaagatgtcagtggcgatgtgccagacgataataccctcgtggagctcagcaccaagcctcttctcgaggtattccttgtactcgtcatcaacttgtttatcctccaaccaacgctttattgccacctttccccattgctccctaaaaattcctagtgtattcacggtcctgtccttgatcatgaattttatatactcaattaccatgtccttgagtccctttggaatgtcagctgtcaccacgttgtagctcaattcttctgccagtcttccgaagcccaacatctctgccaatctgctgaagcctagcttcttggacagtctgctgaagactagcctcactaccagtttgccaagtagaggaggcctggcagtgcaggcatccaacatgttgtattgccccagggtacctgaccacctccttgacaagctcaagtaactccaaatccctgtgctacaggcaagccggcgaaaggagaggaccatattgcgaaggcagtgccacttcttagagcacaaggctgcatgtcgaaggctggtccaccgcgttgcacataggaaggagaacgtccaggtggaccagagcgcgctcaaaagtgatgccatctccatgagcaaggaagaactcagtaaaacataggtgatggtaatgtcagctctgctactttgcccctccttaccatataattggaacagcaggaaggaggcagccacggtgagcgatgagacgatgcggatgcagtagccggtccaggtgtggatgacggctgccttggtgtagagaatgtcatacatgagggagagctccatctccatcagcgtccacaaatccaccctgttctccctaaggtacgcaagtattctgagaaagtatctatctggatcatacattgaagagtcaaccatggcagacttgcagacgaggaacacggcgtgggcacgccgcatgaggaattcctcctcgtcgacttccttccccttgaatcccccccgaggtagttcgtcttcctcaaggtaaacccggtacaattgccgcggttcctcctcaccgtcttctcgttccaccgacgacaggatgaccttaaagttggcgatccagagagcccaagtcttctcaaacatcttgaacacggccacggtggtgaccatgatggcacccggcaacagcaaggtcctgctgctaccgacatgcttgacgaggacaaacacagcacctaggccctgcacaaagagagtcagggcatggcgccctgcgatcttgctgtcctcgagcgagtaggcagtgatgttgtccggaccagcgagatgcagcagcaagaagggagcccagaaggggacgagccggtggctgcgctgcgcggcgctgagggagagcctgccgagggcgtacgtcgcggtgatgttggcgaacttgtacgccagccagaggacagccctccgtttgtttctgccttggcgccgccggatgccggagaagaagagcgggaagaactgctggatgaggctgaggactacaaggatctgggttgcccattcgctccaaaagcccagcagcagccgggcgatttctctcggctgcatcactgaccaatgcaatgcagatcatcatttcacatttcacacttgaatataattgccggcatgcatgatgcagatcc

SEQ ID NO: 9237 - DNA, 1583 bp, Oryza sativa
  ref <308>: DATABASE ACCESSION NUMBER: AK106585
  ref <309>: DATABASE ENTRY DATE: 2002-08-28
catctttttaagtgcagataatccaaatcactgatagagaagaggctcgatggaagcttataattattcccattgtaaaacttaattctaatagaccttgatttttttcttgacagcatgtacatgcacctatcaaatacatcatgatatgttctgcaacatgccattgaaaacaaagctagaggtccattatggaacagcaatgccagatcaacgagagttataaatttggatcatgttctttcagaggaatcccaattgtgatacaaatcagacagaagtatttcgggcgggacctgtgctttggaagagcgtgtgtggagctgattagtatattgggtatttagatgttctaattctttgactcttttggttcgatctcccttggttataacgaaacattctttttttacttttggcataaaaagctaatttgtgcaaaaattgaaggatacaacattatgactactcccaaggatgtggttaatgttgaaaaggttgattttattggttattcatgagaacatgaaagatttatattttatttatgtagcctaaaaagttaatacaagcatatgcaaatatgctgggatggagtgagcataatggaagaacggcctttatttgatggcttttagctttaagatgctcaatgaggagggccaaggagattttgttcttttatttgccattgattggcctttggttgatatatctgagttcatgtactccacaggcaaaaaaaaaaaaaaaggtaatatccatatatgcaagattatttctttactttaggttttttactattttactatgaatagacaaggataaatggatatattttcatagtatgaacctattagatattagataagctcagcttagtgtatgtagaggtacaaacaactgattctgaataggaattgctactctccttttctggtctacgaatttgagtgtgtaccttttcattagcaaggcttaaatgctcccaattagcagttgttggtgaattgatagaattttggtaatttttggtgaaatatattttccaaagagataaaccttattttagataaagaagatattttattttgaagcagaggatgtgctatatccccaacctctgccccaggggcatgcgacgcgaccaaaacgcattccatgatgctctataagtctagaactactacaacatatataatttcatttttatatcgagcactactacagcatacataattttcatttttatatcggcattgatctgggattatcctgccattgctcgcaagttgctaataggtagtccttttattttcttctttgcaagaggagacaaccttaatatatacctggtggcacctctgaccacaggtttggaggatggaattaggcacaatgtgatgcatatgacttcagtggagcaattttatcaggattgcaggtttggtggatggcattaggcaaggtgatgggcatgacttaagtggagcaagttaatcacgattgtaagcttggaggacaccattacttaagcatatttccctgtcagaataatatttgatattcacatgtttgtactt

SEQ ID NO: 9238 - DNA, 1783 bp, Oryza sativa
  ref <308>: DATABASE ACCESSION NUMBER: AK106586
  ref <309>: DATABASE ENTRY DATE: 2002-08-28
atctcatcgatcctgctcacccttcctctctctcctcctcctccccaccccaacgccatggctgccgcggtcgcctcccatcggttcctctccgtcgccgaggcgggcgccgccttccgctggaccccgtcccagctcgaccccaaggtattcttctcttccttcgctgtacctggcagcctgagccgccgtagattggagatccttcccgacttttggaactccctttttttcggtttgtcgtctagttgctgatttatttatttattttctttttcgagaaattaagccatattctctgtgttggatctctttcacgcactgtggtgacacaaatttgaggttatctgttgagttgaagtgtttaacttgatgggtagatttagcttgctagagaaactgttggtagttgttggtggggaatttggaattcggttcatactttccagattttattgtgttgcattgtgctatttgtaggattaaggagtcaattaactcacgactaggggcactagggggaattcttggcagtttgttcatagagatttaattcgcccttttcagtttgcttatgttgcattgtgttgtactccctccgtttcacaatgtaagtcattctagcatttcccacattcatattgatgttaatgaatctagacatatatatctatctagattcattaacattaatatgaatgtagaaaatgctagaatgacttacattgtgaaacggaggaagtatctaggattaaggagttacttttgtgtactgttcttacgaataggataacgtaatgtgcacagaggaatttggagaagtttccgcatctggtgctctattgttatatgatagtaaattacttggtggttcatgggggtctcattgatgttgtgcgtgcccttgctggatttatcatgtctatgttcagagcaccattcactgaaaacctatggtccagaaatttcgtgcttgttaggaacctttatatttcgagtgttgtccagaataaggcctaaaagtgcatggtgtatacatgtatttacatggtttctgtgccaatagtgtcttctgcaaggtattactgggattgtttttctccttaactgaagagaaaaccaggtgaactggtgtttcagaccagcaagtaaagtgtgtttactctattgtactgtattggctgctatgttctttgttttatgaccaatcatccatcactatataaactccctccatcccaaataggcttccatttgtcccacaaagattttatttctaacttctgagttatacctactcccaatgtacatttatttggagcatagaaattgcaaccgtgattattaatgaggggcaccttggccttttcaccacacttctaatttgccctataattgctggattaaagtctttgtggaacggagagattgccttgtataattctttaactgggatattcaagtggtttccatgtttctaatgatttcactgtttggtgcatttagcagccccccgcatggcaacaatggcctgtcatgcgccctatggcctttccatattaccactgtctactatgtcagtcatatgttctattcggtaaatgtaaatgaaattagtacccatataaggagtaacattagctattgctgtaggataattttatggctaggggatgtggattagaccgagttttgtctgactattcacatacaaaattacaaatgtattgtgttagagctattgatgtgtaagtttgttgcaagagtttcagagtttggcact

SEQ ID NO: 9239 - DNA, 1483 bp, Oryza sativa
  ref <308>: DATABASE ACCESSION NUMBER: AK106587
  ref <309>: DATABASE ENTRY DATE: 2002-08-28
ggacgccggcccaacaactagcagcacgcaacaaccaagcacagcatccatctggcgcgcaggttgggctccgctaggcggaggcgtgcggcaggtccgccatcgagggcagcagccagggccatcgatttggaaagcaatgccatcgaaaggctcttctcagatgaccatgacaaatcaacgcaatttgtccgatcgacgagcccagcaacctctatcacaggtttatgttgatgttgacagtgagcatgggactgcagagcgtcaagaaatagggacgacaaagagagccagatggagtcaccagatgaagatgttccttattgagctcctaacagatcatgacgtgccaggttttcgaacacaaaatgcttggagtaaggaagcatggacaaatattgtttgccgcctgaatacaaaattcggtacatcatttacgaccaaccaagtcaagcaaaaggagcaggatttgaagaaagattatcgcagtgttaaagatttgttggatcaaagtggttttgggtgggatagtgacagaatgatggtgagtgcaccacaaagtgtttgggacacttttgctgatcgcaagaacaaagatgcaattcattggcgagataagtcgttcccatattttgatgatttagctccactttatgatggtcgttatgctgaagggagaactcgccatggtatggaccattatgcaaggaagacaaagaatgcaccagctcattcaacacaagaagcaaatgcggttgatacatatcagtcaccatcccctaattcaaatgctccaggtgaatcaggtttgcaatttccttttggtgaagaggttgagacagccaatttggacttttcacagcattcacctacccctgtccatctcacaaaagtcccacctagctcggcacaaacaccttcagaggttcctgaatctcgacctgggaagaaacaaaagatcaaatctgttagtcctgatgatggatttcatgagagatacctaaaacttaaaaaagaagaaatagatcgatttgctgcaattgaggagaagaaattggaggatccttacagcatcaacaagtgtatcacagtgcttgaaggtttacatggtctacaaataggagatatattggtggcagctgatatcttcaaaggtaaggataatagggaagttttcttgtccttttcaagtgatgcattacgcctggcttggattagaaaggaaatcgcagcattagagtgagtacttttgtgaaacatatggcatgcaagtagtaggatagtacttttgtgaaatagatggcatgcaaatagaaggatagtacttttgtgaaacaaaggggtacttttgtgaagcagatagtagtaggatatacttttgcttagagggagtgcatgcaagtagttacttcattaagtagaatgtgacaaacttggagtacaagactagtaattgaccttgaatgccatggtggtcaaatgc

SEQ ID NO: 9240 - DNA, 1623 bp, Oryza sativa
  ref <308>: DATABASE ACCESSION NUMBER: AK106588
  ref <309>: DATABASE ENTRY DATE: 2002-08-28
agaaacagtgtgatatcatagcagagggtgatagaggaggggtgctgacagttgatacttgcaatgctgaggaagatggggaagtgactggtgcggtagtgagcgatgctgtggttgaggcagttaggtgttccgcaaataatgtggaaagtttgggtcttgctgaggttgaaattgctgaagggaacgggttggacgctgacattcaggaatctgatggtgagatggataaggcagatgacaaactgtctacaccttctgaggagcagaatgaatctggaggtggaacaagtgttgggggcatcaatgactcccaggaaaacaagggggttaatgggctttgccagggagaggtcatagacccattggctacagcaaatggagatgaattgagcatgggtttaagcagaagcgcaagtggacgagaatctattgagcaagaggataccgttatgtgcgctagtgatgatcagaaagttgagaaccattgccagtttgacgataagcataaagaagctgaaatttctcagattgagctcgcagttgataaccacattatgctaactgattgcactaaccaaaaaaaggggatcgacagtcctgtgaatgaaaccaagggggattcaactcctgacattgtttttataaggagaaaatcaataactagaaaaacatgtgaagcgaagcaggtgaaatctgaagatgaggttcgatttgagaagcgagttacaaggtctgctactgttagacagagagaggtttctgctagcatgtgcgtaggtgctacaaacgatgctaacttggaaagcaaagaaaggaaggaagatgttcatcattatacaaggaaagtgggcagcaccgtgcgctcaaaagttcatcacacaggggtggcagaatgcgacactgatacaaagaagaaactaaaaggaactgttaccactcgaagaaactcagatgccattgctaatgatgatcctccaagtatcacgcagaacaaggaatcaaaaactcagatgaagatcgatatcaagtctcaacctctcacaagaaggggcagcatagtaaataaaacagaagacgcagtttctgggttagaccagaatatctgtagttcagccatcactgataaaaatgatatagagctcacagattctgaaggagttaaatctgagaacaaggccgctgtgaggaagtcaatattatcagttggcgctaagattgttgccagtaagaagaggatattggaatcaggacttgataaagctagtggagagtcaccagttgcaataccatccctaagaaggcaagagatacatcctcagacactgagctagagcaaccaaaaatgtcttctggaaagaaacttaccagaaataactgtggctcaagtaagaaaggtatgtcgacaagacggcaacatcagagtcaaacagctaagttgagtacatctgtgaattgctccaataaaaacgaatctaagctatcacagaatgaatccgatgatgatggaactggcagtgatacttccttgaagaacacttgtgtaagacgtactcgaagtggtggtgttgtccccaaaaaacaagaggattctagtgaatctgaggaaccgatcatactgag

SEQ ID NO: 9241 - DNA, 1239 bp, Oryza sativa
  ref <308>: DATABASE ACCESSION NUMBER: AK106589
  ref <309>: DATABASE ENTRY DATE: 2002-08-28
tgtaacaaaaaaatggcatcatttctaacacgatgatggtgtttagttttgaagttatggagtgtatttctttcgtgcaatagcgcgtgtgcttgcgtcgactaacatgagtcaggtcataagaaatcttggtatggtagtctattgatttgtaggaagcttggaataaatcttagtcaatagtgaggacttggactaccactaagggaagagctgaaagacacatggtagattgacattggcatcgtttgattgacatcgtgtagaaggattgatgtgacatgtgactcattagtgttatgttgctcgaaattatggtagcagaattatggacttacaagaatgttgaccttgccgtcgaacaaagtacgtaccttgccggcaatctcctctttgtcggtgcgcaccaacacgttgcagacggagacgatgatagtgaggcttttgatcatccactcctcatggtatatactcagctccgcgtcaattggtgcaggcgtgcattgttgcgccgaagcccacgagctcctccacgatgaagcggctgcacgcgtggttgattctataatggacaatttggtagatagatgttatgtagcgtgttggtgaataaccacttaggggctgttcagattgatgccattttcaaccataccattttttgacaaagttgccaaaaaatgtctacgtttagtttgttgccaaatttgataaatacaaaagaaatcctgccaaaattttggcattgccaaaatttagtaaggtttattttggctacaatctgaacatgcccttagatttggatgactaacctgtgcttttgctgtcgccggtgacaagcacagtggcgccagtgagctagagcagagctagaacaaaatggagaaggttccagtctagggctgcagtgctaggtcactaggtttgttttgcttcttgtggacgtgtggtgttggtgttgtacttccgggtgggtgggtgtcggagtttatctctaacaccgtccaccttttttcctctatcgtaatgaaatgtacgcagatctcctgcgcgttctaaaaatattcttaacagaactgatgcagaaaagaacactgttttatctttttctcaaaagtgcacccatttggctatgaatcaactgaaattccattggatagtccttttgggtagatctgtgaggctagaaataaatgtaggatgaatggaattaactagctactgttcgtttcgatcctc

SEQ ID NO: 9242 - DNA, 1953 bp, Oryza sativa
  ref <308>: DATABASE ACCESSION NUMBER: AK106590
  ref <309>: DATABASE ENTRY DATE: 2002-08-28
aacaaaccaaatcatttcgttaacctcgtcgccgtcgccgtcaaccggctgctccgaccaccggggagagctcctcctcctcctctccacgactccacctcgtctccacgctcccccctcgccggcgggcgcccgtcgattccgcttccccgctctcttctgcaagcgcgcaataatcaacaggcgaaaaccccgcaggagggatccagcttcctgaattttttggcaaatttttgaggtgtgagctctttttttgttgggaattttgaggcaccgcatccaccagagccggccgccatactgaattcaggatgtctacgcagctagtgtttcccagtgcttccaatggcggatgcccattgggcgtttcgcggaacaattttaggaaagtggttctgggcgtcggtgcggggcatctccagggaaagaagtgcttttctggtggctcttcccgccctagcaaactcgagtgctctgcaaactcgcggcgagttgggccacggcgcaccaaggatgccctgtatgacctccaccctgagatctcgatgctgtatggagaggataatggtgcagttgctgccccgggcaaggaacaggatattgtcaagaccaccgagaggctggaagatgtatctgcgtcgcaccgctacagtgagccgaggatcaaagtcattggcgttggaggtggtggatccaatgctgtgaacaggatgattgagagcgacatgaagggggtggaattctggatcgtgaatactgattttcaggctatgagaatgtcacccattgatccggataataagttgcagatcggccaggagctaacacgaggtcttggtgctggtgggaacccggaaatcggcatgaatgcagccaaggaaagccaggagttggtagaacaagcagtttctggtgctgatatgatttttgtgactgctggaatgggaggagggacaggcacaggcggggccccagttatagcagggattgcaaagtccatgggtatattaactgttggaattgtgacaaccccgtttgcatttgagggaaggaggcgtgcactacaggcgcaagaaggaattgcgtccttaagaagcaatgttgatacactgattgtaattccaaatgacaaattgttgactgctgtttctccaaatactcctgtgacagaagcatttaatttggcagatgatatacttcggcaaggtgtccgtggaatctcagatataatcactgtgccaggtttggtcaatgttgactttgctgatgtccgatcagttatgtcggatgcagggtcatctttgatgggcattggaactgcaacaggtaagacacgtgccagggatgctgcgcttaatgctatacagtctcctcttcttgatattggcattgaaagagcaacaggaattgtatggaatatcactggagggaatgatctaaccttgacggaggtgaatgcagcagctgaagtgatatacgatcttgttgatcctggtgcaaatctcatttttggctctgttattgatccatcgtatactggtcaagtgagcataaccctgattgcaactggattcaagcgtcaggaggaggctgagagtcgacaggctggtggagataacagccggagccacagcagttggttttcttcatcatcccaggaagaaggtccaacattgcagatcccagagtttttgcagaggaaagggcgttcagggttttccagaggctgaaacttcggcttgaagaaaaaaaaaaacttagaactctcactagtttagcgcaccagctttctttctcgtgctttcctcttcttctttttttaattttgttaggagttcgatatgtttcaagtttatttttgctgctcagatttagatgataatgttatgagcagatatttgattcctgaaccgtactgtgcttcctgaatggataaactggaattcttctctc

SEQ ID NO: 9243 - DNA, 2630 bp, Oryza sativa
  ref <308>: DATABASE ACCESSION NUMBER: AK106591
  ref <309>: DATABASE ENTRY DATE: 2002-08-28
ttaatagcattgagcaattcaagtctgtatataggcaacctaaagggtgcaaggagcgttataaggttctcgtggataaaaattctggtgatggtgccgatagtgcagaggactctggttcatctcaacactatcattttacgttgccaggcattccaaagggaagtgctaggcagttattccaacgacttcaaggaccaatagaggaagaaaatctcaaggcacattttgaaaaaatgattctactcatgcggcaactgcacgccagacgtagaaagggtaatagccaggaactcaagtcgatcatacagccacatagttctcatgttgccgctctaacacaagcatgcccaaataacttatccggaggcgctttgacgccacttgatctttgcgacgctgtaagttcaaacctagatgcaagtacgcctggtagtggttaccagagttcttatacaattgggttaacaccaccaaaccatcatggttccaatggccctacaactcccaattcaactctgaattccaggttatcagggtcacctggtacggttctgagcaacaattttttgccgccttcaacatttagtgcctcttcaagggatgctcagaaatatggtgttcctagatgtacctctttacaaagtgatgagcaacagaagattcactataaccagattcttagtggtagaaatcttcagcagactggaggttctgttccaggagcatttcctcctggggttgatcgtggtgcacgtgtgatgcctggtacccatggtatgggcatggtgtcaggactaaatcgagccaacagtgggcaaggagcgccaaacgcagtaaatgtccatcctggagctatgtctgcccctggaaatccaaccttacggccacataatcctatgcaggcgcttcatgtttcacagggaaatactcaagccatcagcagcatgaatcattcactctccaatgcggcatcttcttcacctgttcagtcttttcctattcagcaacatcaacagaaacatcaaatttcaccgccatcacacatgtttggaaatccgcagcatcctcagatccaagggatgagccattcgaatccacagcagcaaacatatgctatgcgcttggctaaagaaaggaacatccaacaacgtatggtgcctcagcaacagaatgatcttcctggagcaagtgcagtacccagtgtacagaatggttcgcatggtcagcagcagaagcaatcacctgcagccttgtcagccccatcttcacaaccacagcatcagcggcagcaagctgcacaaaatccaccagatagctgtgcacatcccaatcaaccaaccaatgctacacaacataagccaaagaagagtcaacagcagcctagacagaatcagcaacaaaggaatcaaggtagtcaacaggctaagcttatgaagagcttaggacgagggaacatgctgatacctcagactacagttgacaccactccaaccaatgctgtttctgcgtcttccaaaaagcaaattactgagaacaaactgattcaacatggccaaggaactttacccggaaataaagcatcaaatccgtcaatccctcatcctggaaatcaacataaactatacagttctccattgcctcaatcaccaaaacagttgccagatattggtaaccaaggtgtattgcagggttctcctagtcaggccctcttaacttcacaacagcttccactccatcctaaatcttcactgaccacacaacagcaacaacagcatgtccattcatcgcagaatagcatccaaagaatgatgatgcaccaaaacctccaaagtaattctgattgtaggccagactcacaggtcgttcaagtccaaaacaatcagatagttccaacaccacctattcctcagagtacagagaaaggcagcgctggactttcatccataagccagcagaagcacgaggtgtcgaatgattcaaatgcagttaattcaacatctatgatgcttagctctcctcaagatacatttgctgggggtgagagactattgccatcatctagccatgatgtgctggaaaggcagatgccaggtggtttgcctatgtatggtggccagtggcaccaggagcaatctaagcagcaactgcagtccccaaaccagcagagaccagttgttcaaggcagtgtatatgctccattaaatcctgggcctggctgatgataaattaatctgggttggtcacttttacagagcaaccctttttttgaaatctaaagttattgtacaggtgtcagtgactccgtaacatggaagctgcggatgatagtgatgttaattcaacttggagctaatcgtaatcaccttagtgtcaggtagatagttgtttccgtgccattttaagtccacctttagaaggtgaaatatgttttatgcagtctagataactggatggaggtggctgttgcagcggcaaacttcgtttctttttggtggattctgacccaaatcctgggcccggctgtatattttcgatgcgaggtccatgccttctagaatcaggaggataaagtgtaaccctgtaattgcttcaactacaacttggtgaatgcaaaagtgcttatttgc

SEQ ID NO: 9244 - DNA, 2566 bp, Oryza sativa
  ref <308>: DATABASE ACCESSION NUMBER: AK106592
  ref <309>: DATABASE ENTRY DATE: 2002-08-28
tccacccaatctagggtactttgttgacgcagggagtgtacagagtattgaagaactgaccaatttgcaggatcttcaactcgcatgtcctcagatagccacttctgaccatattaagcacaacatgaaactgttgggctcaattattgggatacttaagagcctcaaatctctaacagttgttcctgtctgcttctctgaagattctaatgataacgaaaattcaagcattgccattttcttggatttcttagataaagttccccccccttgtagccttctgcagaggcttgagttgtttccacgtgtttgcgtcttccatagacttcccagttggatcataactattgagaaactctgtattttgaaagtagcagtcatggaactcctgaggaaagacattgagactctctcaatgctgaatgccctcactgttttctcactgtatgtccggacaacccctgcagaacctatcatatttgacaagtcaggattccatgttttgaagtacttcaaattcaagtgtagtactgtatcaagtctgagatttgatgaaggagctatgcccaacctccaaaggttaaagatggaattcaatggtagcacagtggagcaatacaaccttgaaaatgtgggcttcaagcacttgtcaggtgtcaaggtcagcgcaaaaatttgcattgccggtactagtgaagctaacagaatggctatagcctctgtactgaacaatgccatcaggcaaaatacaagaatatcaagtgtaatcatacggttcatcaacagggttataaaagatcttccgattgtccccacccctcacacggatcatatgcatgaaaatctgaggctggataagagtgtcaggtcctggcctacccagtgtgatggctgcaaggagcttggtgccggccacaggttcaagtgcgagcaatgcaactccaaggtgtactatgatatgtgctgcgcaacagcgcctcacaccctgaaacaccctctgttcccaggctccgtttttcggttcctccgaaagcctctggcctctgaatgcggtagggcctgtgatgcatgtggtgacctcatgcacggcttcgtctaccactgctttgagcgtggcctcgacctccacccacgctgtgcgaggctgcctgttcgcactgcaaacgtaaagggctatgtcatggagcttcgcagggtgtcggcttgcagcagatgttgcatttgcatgtgtggcaaggagggttatcgcaacaagttttggtcctaccgctccagtcaggaaggccaggacattaacgtgcatatggcgtgtttaaaagacttggcatcaaaatcacatgaaaccctaactaaactgtatgagatcctaatgggtgaatcacagtggacgccaacagaggttttaggcgaagatacatccgaccaattagttgtcagcaggatggtgatcgtacgccactgagacaagatgaaattacagaggagtttcagcacaaggatgaagtatgtaatgttctagagcatggacgggaggaactccggaagaaagaaaccaataccaggtctcaaacggtgacggagcctttgttctcaccagttcaagcaccggaggaggaacctgtggcagagccagagatgatcacccaccacgaccacccgcagcacaagcttcgcctggtgaccacgacttgtgacatgccgttccgctgtgacggctgcttggagccaggatacgctcccagataccgctgcgacgcctgcaactttgacatgcacacgttctgctccaacctctgccggccattctacagcaccctatgtacaaaggccgcatattcaggttttgtcccaagcctctgcctccctcgggccgcagggtctgtgacgcctgcggcgatcccgtgcgcgggttcatctaccactgcttcggcgccaacctcgacctccacccgtgctgcgccagcctgcacgggccgatcatcctcgacgggcttgccttcgacatcggggcaccaaggaagtgctgcctttgcatgcaggaaaagggcccagaacgcgatctgtggtgctatcactccaacatcaatggcgagggtgtgtatctccacgtagcttgcatcaagcacttcgccggaaggagatggcaggcaggccgtgaaaagaaatatggagggcagatcatgctggcaagcgaggagctcatgatggagggtcccctcaagagcatttcatcggaaaaagaccgcattattgttggtggcgtcatgcgcatcatcatctcagtgatatttggagacccgactgccaacaagggagacaacgctagggtcgctttatccctccaggggctggcagatttatttagcattcagagctaaactggtgtgtgatcactctccttgaaaagaacaaaagacctatcggtgtgcattggcttgttttgtttgtacttttgtttatttcctggaattggcaaggacttttatttccttcggtgtaaaataattcgtgtgtgtatatatattggcatgcagtttgctactgagtactgattaaataatttgat

SEQ ID NO: 9245 - DNA, 1880 bp, Oryza sativa
  ref <308>: DATABASE ACCESSION NUMBER: AK106593
  ref <309>: DATABASE ENTRY DATE: 2002-08-28
aaaattgagaaaggtgccttttgagtcgttgggtttagccacgaaagagataataattaagtggtgtgatccatatgatgatacgttctcgaggtatttgcaagggctaaacggtctgacacgtttagaggtaggtggtagccggaggtgcaaattaatcattccatgtaaacaattgatgtccttggagtacctacatatccaaggttttggagatgtgtgcattaaaagtggactgtggtatatcaaaaacctgaagaatatactgattattgattgttctacagtagttacagattcaaatgaagagtcagcacaagaagacaagcaatccccaactcaaatcgatcgcactatgcattctctcacccaccttaccttgggtggcgatacaatgcaaaaagtaggtctggaatttgttattccccaaactccctccctccgaaacctgcgccttgacatagtacagggccatacaagcattactaagaagtggcttcagtatctcacatctctacaggagctggagatttattcgtgccatgcactcccatcgagcttgtcctctctgtcatccttgaggaggtgcactctgaagtactgccactggatgtattcaataccacccaacagcctgccaggtaacctaaaagagttgcaaatagaggagtgctcatttgaactagaggcacgatgccagaatccaacaggagatgcgcggccagaggggcgtaagattgagttgtggcagaagaggaagatgggcgagtggcgagagaggaagctggagcatgggcggacgaagcttattgaaatgcagcaaaagaacgagtcactaggaataccgatgagctggagggaaaaatcgccgaagagttctaaaggggagtcgttgtatcaaagtgataaatattggtcgcgtgggcagaggatgcaggagggacacgagtggccgaggaagcagcacatggaagaacagtcgtttatagaaaaggagaagtcgtcgagtctgaacgagcaagcagaggaagacgaatccaagaaggaaccactagaagagtggctgcagcagagtgaaggagatcaatggcctgagcgagagtgggagctgtactcatgggtggagaggaagctgaagaaagaattggacagaaacaaagatgatccgtctagtctgatgaaagagagagaagaatggctgaaggaagaggagcgcaaattccacagtgagacattgggaaaggactggcccaacatttgtcacgttccatatctgtgtggagggagagattgtacagaatctttatacctgaagctgcagattctccagacgtggactcattttctgtttcacgattcacatgctctggtaaaggaaattttgcatctaaatcaagagtcaagacaatgcttttgctttcggcatcatctatctgcccagcgcacttgagcatgtccttgtaaacgcatggtaacacttaatttgatggagctgtttcctccatgaagaagctgttattttcctatgaatatctcatcaggttaacaggtttcttgcaagttcagaacaagaaagttgcctgagatgatgcaaactgactgcacaaacagaaaggcaaccagttggttacttcatcgatattacaggctagatcgatgtagcctggagactctgcaagtatgcatagaaacagagtggtctttactcttgttcattaatcaggatagccttgctgatgctgaagcagcaaaacggaagccggttagagattgcagcataaattggattcagtaatgctttgcacttctttcgtgggaccgcactttaatctgtactacttcctccgtttcacaatataagtcattctagcatttccccc

SEQ ID NO: 9246 - DNA, 1444 bp, Oryza sativa
  ref <308>: DATABASE ACCESSION NUMBER: AK106594
  ref <309>: DATABASE ENTRY DATE: 2002-08-28
ttagtccagagcttgcattagttaccattggaggaggaaaggaactagaggaaaagcttgtgggctttgtaggtaagaccaactagtgagaccatcgtaaaccacatgttcaccaaatggatacagagctaccgcgatcttcctctcatgattaaccagtgggctaatgtcacaagatgggaaatgaggactaagccattcatcagaactcttgaatttctatggcaagaaggtcatacagctcatgccacccttgaagaggcagaaaaggaggcaatgcaaatgattgatgtatatacaaaatttgcatacgagcaagctgcaatccctgttattccgggtcgaaaatcaagagtggaaacgtttgctggtgctaatcggacctacactatagaagctatgatgggtgacaggaaggctttacaggctggaaccagccacaaccttggacagaacttctcccgtgcctttggaacacagtttatggatgaaaatagccaaatcgaacatgtttggcagacttcttgggctattagcactcggtttgttggtgggatcatcatgacccatggtgatgatgctggcttaatgcttccgccaaatattgcacccatccaggtggtaatagtgcctatatggaaaaagggagatgaaaagagtgctgttatggaagctgtgtcttcagttcaaaacacactcaaagaagcaggaattagagtcaaagtggatgactcggagttgcggacaccaggatggaagttcaatttttacgagatgaagggagttcctataagactagaaattggtccccgtgatgtcacaaacaaaagtgttgttatttctaggcgagatatccctggaaaacaaggaaaggagtttggagtgtctatggatccatcaatactggtggaccatataaaaggtcgtctagtggaaatccaagcatcccttctacagaaggccattgcattccgtgatagtaacatagttgatgtaagctcatatggagaactgaaggaggccattgccgagggtaaatgggcgagagggccatggtcagctagcgatgctgatgagctgaaggtgaaagaagagaccagcgccaccatcagatgcttcccgttcgagcagccagagggcgctaagaaatgcttcatgactggcaatccagccgaggaagttgcaatttttgcgaagtcgtattagttcatgctttctctaatagtctggttccaaggatcaaagcattttttttccagctatattttctccatttcccagattctctgggatcttttctgatcataaattacccattggatgcttgtgcttctgatatttctagtgtaaattagcgatcgagtagttaaatctctgtcctgcttgtcgtattaggacaaaactcacaacacggtgcaattgtataatcaaagttctcttactg

SEQ ID NO: 9247 - DNA, 1035 bp, Oryza sativa
  ref <308>: DATABASE ACCESSION NUMBER: AK106595
  ref <309>: DATABASE ENTRY DATE: 2002-08-28
tactactactactacccgtgctcatccatcatcgtcctcgactcctcgccgtcgcctccctcctctttgccgtcgcaggacggcggcagcggcagcggcgggcatcaacggcgatccattaagcaaccaatcaactcccaagaaatttatagaattttgatagaagggggaaaatcatggcagccatcagattatcgatgaagctcttgattgataccaaggctcagaaagtctgctttgccgaggctggtagtgatgtcattgagtttatctcctgcctcctttgcctcccaatgagcaccatcatcaacatgcttaccaaggagcgtatggttggtagcatgggcaatgtgcttgacagcgtggagaagctggattccaagtatgtaatctcaagccaaagcaaggaacgcttcctcagcccgacggttgcccccaccgtgctctgtccattgcagcagctgctgctggatgcaaagttaaatgtcaatgccagcttcttcacatgtgaagggaaatcgaccgtcgtaagctacagtaccactaaagttccttgtggatatttttctgttagcaaaggcgctgtatgccctgtctgctccactcaaatgcacagggcaattccacatgtcaaaaccgttggatttgtggttgggacagccacatacactgtcagggatgatctctcaatgactccagcgtccagtgtgtcaagcgtcagcttacttgcacagtgtggtgtcaaggacttgagcgcgctgcaggaacggaccgtgaagattggcaaggaagaggtactggagatactccttgcttccctgaagtctaagactgtgctgactgatgtgtttctcccgaagagaaaagttagctgcaagagggaagcctctggtttgttataatgcagttttaccaggaacgacacctgaaaattaccacagcttgctataattctgaaagtagaattcagtaggtctttagtgtaaagcgtcactttgcattgctttttttatcaatttagtaaaagtagcctag

SEQ ID NO: 9248 - DNA, 2071 bp, Oryza sativa
  ref <308>: DATABASE ACCESSION NUMBER: AK106596
  ref <309>: DATABASE ENTRY DATE: 2002-08-28
tagggcatggaggatgctcagcaagcctctgaagaagggtcacactgaaaattttggggaagtgcttgaacgacgaaacccactcgcttttggtcactttgcaaaccatccaccaaaagggtcaactcccaatgtcatgatctgcccatatgattttccattgacagagaaggacatgagagtctacatccctaacattacttttggtggtgaagaagagcccgttacaatgaaacgatttggttcattctggttcaagtctggacgttctggtaatcaggaaggggagtctccagttctgaagactctagtgctggtgagtacaaggtccatatgtgatgaagagctcttcctgaactaccggtacagcaactcgaagaagcgaccagagtggtatatcccagttgatgaagaagaggataagagacgatggagctagttttgcacatcttagctgtgagcctgtaacaattcttcctgcattgctttctaacaattatttttgtcccggtgtcgatcggcaaattgcaactgggagtgatttagcttctgaagtgagatggcaattttattatgctcatctggagtccttgatcttaattaccattttggtagagtgcctgttctatactcttctcacaaggcttttgtaatgcataaaaaatatgagtaccaaactaccagttacatggtcattagtcctgggaactatgtgttcttaatcccaatattcttacggggaaataattcatcaatggttatggatatatcattacggttgctaaataagtactatcatatggttgtgcatagaaaagggaatcctgacatttttgctgcctgcctttcgttgttttcttatatgtaacaagtacaaaacttatttccttattgaattgatttaccttttaatctgactgtcaagtactagagttgtcctagaatgttcgccagctagttttggcatttcaagattagaatatcatggcatagagtccaatagtagtttgatagtttgattttcttgatcatttgccaagcaaatattagttcattggtgcagtggtgctatagccatccatacatctgaaacatgaaagatgagcaaatacagcttttatttcttatctagtgatttcctttgagatgatcgtcatatagagtagtagtagtagtagtagtgctggtagggctgcttcaagttgctcaatatcatgatgggtatccagtattgtggtgctcatctgtcctgaactgaactcatgctatagtgcatggccaaagtttatctaattgtgccttctttgccgcattacccgttcttccgtgaaattcccgcttcactgaatgtcatgtatgcaagttgactgctgactatgcactccattgaaccatgctgtactgctgtctgcagatggacgtgtttctgctcatctccttggaatatgcttgcctggtgactggtgctatctcaatcgattctgaaagaacacactgttctttgctaagatgataagaaatgtactttggtcaaatggttactccgggaagccttaagattttgattttgctcggaggaagactatccaccaagttagctggccaatgtattttatgatctccaggattaaatcttgtgttgttccccggtattttggggttgcaattgtgccttcgctttcacatcgagcatcacttgttcagattggtggcaacatgctgaatagtgaatattcattttctgttggagctgaatattcaattgatgaagagcatcaaatcaagtttatcattacaggaagtatctatcctcctgcgagttaattaagttgccaactcatttgggaatggaacaaaaaaccaaattattgagagaacaagcaagcttgctgtcagtttgtcgcaacgtgttgacataaaataggttagcaacagcacaacgagacacattattgtactaaagctagtgtttggggattagtttcggtcggagtttgtctccacctgatcaaagcttgatattgcaatatactgacaacaactaatgagatttcttgaggggatgacgatc

SEQ ID NO: 9249 - DNA, 1696 bp, Oryza sativa
  ref <308>: DATABASE ACCESSION NUMBER: AK106597
  ref <309>: DATABASE ENTRY DATE: 2002-08-28
ggtttgcgaccaaagtacacatgctccatggaaaatggttcttggttgctacaactcaaaggattacccgagagaatcttgttctagtgcattcatgttagaactggagtctgtaagacctgaaccacaggctcctttggaagattacaggttacatcttgagattttgcctctacagttgcatcttgatcaagggcaacttaacttccttatcagtttcttccagaatgacttgtgcaacaaccctaatttggcttgcgaaaatgagaatattgacgcgcagagtacaatgtatcgaagcgatacaattgctgatgaggcattacttcctttctttcagaaatttgatgtgaagcctcttgttctgcacattaattatattcctcggcattttgatcctgttgcacttagcaaaggaaattatgcagaacttctcaacatttttccatggaagggaattgatttgaagctgaagcaggtttctgccatgggtgtttatggtttcaataatatatgtgaaatagtagctgcagaatggttagaggacatctcaaaaaatcaggtccataaattgttaaaagggcttccacctataaaatcattagttgctgtgagttcaggcactaagaaattggtctctttacccataaagagctataagaaggatcggaagttgctcaagggaatgcaaagaggtgcggttgctttcattagaagtgtttccattgaagctgtggggcttggtgtacatttggcggcaggagctcatgatatgcttctaaagacagaaagtgcccttacagcaattccaccacctttagcctcacgtgaagcaaaaagaaccaaagacaatgtaagagctaaccagcctgaaagtgcgcaagaagggctgaagaaggcatatgaaagcttgaccgatgggtttggaaggactgcctctgctttgattggaaatcctattaaagtttataatcgtggggctggtgccggatcagctttggctactgcaatctgtggagctccaggtgctgcagtggctccattatcagcgtcttttcgtgctgcacattatacacttcttggtataaggaatagccttgatcctgaacgcaagaaagaatctatgtacaaataccacgggcctcctcaattgtagacttccattgagaagaggtggtctgttcattcttttgcgagatctcgtatttacctggaagaactggttcaagagcacatgtgtgcaatctcatcaaagggtggtgggcaaacttgtacaggataagtcagatttccacactagcaatccaaccatttgtgaatcagtgccatctccgatgttcttgttggagttcataatccatctcctctgcaggtgtacagtttcagatgccacgtcgaaaaccttcatactgtaaattactagcacacgatcacggttgtaatcacaaacgtggccacccggagcgggtggaagttttgttgactccttgcttaggatttggctagagagagagggtcacagggagcttggctcggtggctcttgtacataaatttggtggtgattactgagtagtgcaaatgtaaatatctctcttgtttctcggttttccatttacgtttttgttggtttgagaaactgctcactgtaactctcactctacaagtgtaaatatcatcaggttttgtgctgctgc

SEQ ID NO: 9250 - DNA, 2111 bp, Oryza sativa
  ref <308>: DATABASE ACCESSION NUMBER: AK106598
  ref <309>: DATABASE ENTRY DATE: 2002-08-28
tcaagtaccgctaaagtcatcttggtttcctcagccctactgctgggtgaagagatggagcatttaatggaaggcttaatttcagttccagtaatttagctgtttgtttggtactctgcagactaaagtggtttatgtttctgatgctatttgaatgatgtggatgctaagtatgaattaatcgcgcatcaaaaaaaatcctttaatactattatatatgtgctcctgtgagggatcgtatgattttttgctgttgaatggagatgttcaggttagcagtcagctgctgcattttggacaggcacattttcagtttggtggtttaaacgcagttttagcagttaaaaaaaaaaaaaaaaaaaaaacatcgaaccccttttcacaacagcaatttcacaagcagtagtcaaacaaaactacgctaggaatcacctcacatccgcccatgaccgtgggcacggctgttcgaacagttggttaacctctgcagagggggtacactttacccacacgacattactaacccgggtcacccagcccgtggggatcaaccacgtcgggagacctccaagctttcatgacaaggcatttcgaaagccgacacaggtttaccatatgccgacgagaggggtcccagaccaacaacaggttaggtcccagaccatactgtgctaggaagcccaggggtcctccccgacaccaccccagcgagtccacatgtctctcggcattaaggctcccctgataagctagttacttagccaggggtgtcccattccacccatgtggtcgtacttgtcttatgtttggatgaaattccaaggaatcggtccttaagtgcgagagcgggaaaccgtacacccggtacgttccccggtccgcggttttggaaattcatttagttcgcaagcaccgacccaggtgtcgggttttccaagtcttttgtaaaactccagttttacccaagttgttactcagattttaagtttgaaggcgaccgtcgatacttgcacaaagtgcacgagtatcgaggcgcaactgggtggctacaaggggacatggtatagcaattaacaaaggaaggatcaaatgcgacaaattaggtaggtccgccaatctgccttgcagacgggacaaacattttaagtgtgatcctatcaatgcataatatttcacaagcaatataattaaatttcaaatataggctcaagatgttcaaaggtggcttgccttgctcgagatctggagcttgatcctcgaaatcctcgcactgcgggtcttcgggcttcgaaactacacgcgaaacgggacaactcaacaaacggcgaaaataaagccctattaatgacctctaagcgtgccactagatagatctcgagatttgggaaattttggaagttgaacggggtcaaacggatttacggttgggaagattttgaatttctaagattattggatttttggtctaaaggaaaaggatttaattaaatccctttttggaaaagaaaaagattcctgtgtttttcctgcgctccaatcaaacgatcattcctgtgtttttcctgtgtattgcaatcctctgttttacacttcaattcctgttagaatcctgtgtttttcctattcctccgttttttctaccctgcgattcaaaggggcccttagaggatttcattcctatagaaatttttcctatatagccttttgaatcaaagaaatggatcttatgaaatcctatgaaaatcctatggattgcctaatgccatacaagttttggaggaattctaacatgaggtaaaacctcttggaaactttcctttgagtctttatctgtcctctaattctgcggtccaatcaaacggccattcctctgtgtttttctgtgttttgcaatcctctgttttacacttgcattcttatcaaaatcctgcgtttttcctattcctatgttttctcattactacgatttaaaggggccctaaacgtggacaagctaatacaatactatagtttttcatgagaaatctgatatagtacatccatcctgttttaagtgcaattgtgagtttccgtgtttaatgtttgattgtccgtcttatttcaaaaattgt

SEQ ID NO: 9251 - DNA, 1497 bp, Oryza sativa
  ref <308>: DATABASE ACCESSION NUMBER: AK106599
  ref <309>: DATABASE ENTRY DATE: 2002-08-28
atgcctgtatagcttgagcaagtatttggcagtttgctgccaactgctaccctatttcaaatctaggtaagatctagctgcaggttatacagagaaggcaatggccgactgcactacgatgcgtttggcttcatctgtgaccatcatcttgctgctgctcgtagctagccaagctctagtagtctctggcgagtcatcttcctccgcgatgcagtccaagacgttgaacatgaacaagcttctcaacatcagtgaagatcactctcctaatggcggacgccactggatgcagcggatgcagccggacagctgctcggagcagaacgtggtggtgtaccagaacaacgcggagcacctccccagcggcatcccgacctacagcgtggaaatcatcaacgtctgcacggcgtgcacggtgtacgacgtccacatctcctgcggcgagtttgcctccgcggagctcgtcgaccccagccagttccagcgtatcggcttcaacgactgtctggtgaagggcggaggccggttgggtcctagcgaggccgtctccttccagtactccaactccttcgcctacccgctcgccgtagctaatgtcgcgtgtgagtaggttttttcagtggaaatgcgtgcgcatgtgttgtacgtagtcgactggcctattagctacgtactgtcttcgatgtttcagacattcagttgatcgagcttatttatctatgggtgaaaaaaaaaaaaaaaaaaaaaaaaaaaaaaaaaaaaaaaaaattgtcttcttcttctacttctcatcacccccttacactaaactttgcaaagtgagacctcctttcgtctcatggaaatgcctcatcttgctgcttttcttcctgccccaatggagctcggcgccggtgcagccactgctgctgctgctacgacctcctggctagcatctgagaatccaagagaggaaacgttggagggaaatgagcctcacagataggagaagagctggcgagcatcttgtattcgagctctcaccacgatctctccttctgctctagctacatttggagcatgatgggggcaaacggccggtgtgagcgtgtggggaattgaggcgtcatggtccgagatatataaatatctctaggtatcttaattaattagcttattattattagttctagattactctcgatgttttcttttgtttctgttttttttctggtgtattgagaggctgtaagtgacgcattcttggtatggagcttgtttgtgatgttcagacatcttaacagccttcttgagtaacatagtgtgaagagttggagagagtctttaagcctagaatgcatcatttacactttgtaatgcatgtaatcttccttttttcccccgatttcctcgtttctgtctctgcctattgtattctactagtattgttacttagtaggaacttgaatctgtatctatatatgccgattttatatttgaacttactgaataataccc

SEQ ID NO: 9252 - DNA, 1475 bp, Oryza sativa
  ref <308>: DATABASE ACCESSION NUMBER: AK106600
  ref <309>: DATABASE ENTRY DATE: 2002-08-28
aaaaaaaaaaaaaaaaaaaaaaaaaaaaaaaaaagacgtatggaagcagaacaccacatgtacgcactgtgaaagaattttactagatcatccatctgtggcgaccatcgtttacaccagcgttgggcgctccggtggatcacgtgatcacaacgcgattgagcttcgcgtgaaggatcacagtttctccatatctcggatcgatcgatcagatcccatggcgacgacggtggcgcggtggcggtgatggcaatcatccgatgaagatggcgtccatccatcgattcgccaccggctgatcccgacgccattgaagctggttccggcagaaaattgcctttgatttggtcagctaggcagccgtggcccgtggtgccactgtcttatcatcgttttaccatagtagtatcatcttgtcctggccaccaaggttaagacgcatggagtggtgttgctgcatatgaaggtcgcgcatttggtggtgacctgcttgagcgcggccgcgtcaatgatgggaatggtaggagggtggtgcatcctacatcgcactgtactcgctagatcggccaagatggttgtgttgatggcaagatctagccgagcgactctcagtttactatctgatgttatctttcgttttggtttggtgattgccactggcaatgacgtgagaaaaattagatcggcacaataatcggttgctgatttctgatattctattttctggttcgagatagacaagaaatgtatatagcttgaaagccgccaagccaatggtggtacttgtcaaccatagataagtgataactttatctttaggcggctattgagagaagttttcttattattttgagagaatagctaatatggtctctaaaatttcgctcatgggtcattttagtccttaatctttcatattatccaaacaagtcctttaaatttatcatgtgggctaatatagtctttggtcccaccaaaatcgccacatagacatgccatgtcaccttcatatgcaaaatctatatgatttgtccaatttacctttatgcataggaagataaaaaacaaaaggaaaaagttaaaaaatatatggtatatgtaagagcaaacatatacttcaaaagggtaaaaaaacaagtattttttttcctatggttatgtctaatttacccttatatttatttttctatgatatacgtaagggtaaattagacaattcatcatagattttgcatgaatgatgacatggcatatccatatgatgattttggtggacccaaggactattctaggccttatgacataggttaaggatttctttggaccatttaaaaggttaaggactaaactgatcctacagagaaactttagggactaaagtagctattctccctattatttttaattaaggtgtgattttgtaattcacggttgtggcttctttaaagtaaatgccgcaatgaattttattatgt

SEQ ID NO: 9253 - DNA, 1787 bp, Oryza sativa
  ref <308>: DATABASE ACCESSION NUMBER: AK106601
  ref <309>: DATABASE ENTRY DATE: 2002-08-28
ttcaaaattagcttatctatacccaaataaaatgggtgttacccaatgggtaagacaagaaacatatgtggacccccacatacataaatggcccataagttgcacaaggttgctcttctatataataatagatcacccctacgaaattcatcctaatttgtcaaccttttataatgtgaatgtgagcttaaaaaatttgggaacgtagttctacttctactcagattgaatgggtacggttaaagtgggaaaagcggggtattactctccccatacccaaaactcaaatgggtgtaattcctccttgcccatatcctccccagtagtagccctacttataatcatcttgctccaaataatcctcttccaccttgaactggttaggtaaagctgttgttgaccttatattgaaaaggatcagattggactttaccacaattaacggtggacatccaaacaattgaaatccaaaaattctgagatattctgcatgcaaaatcttgtgaactttaaaccacagtaaagtgcatatcaaaatgtctataaacaatgtttcaatccaaccatgaagcacacagtccatcatctaagttcatacagaattcactgcttttcagcctaaggataaaattacaatgaagaaaatatcttgtagcaacagacccaaagatagtggttggctaattttgtctccattatgcttgaggaaatagtaaacaaatttccacagggagaatgttcatgtaactttgctataagagcaagtttaatagtatagcctactactagctccaaattatttgtagccaatgtaatagctaattcatagtacaacagttgcttactatactattaatacctggtcccacctgccatacacacattacgtcttggagtctgtgctgcagctggctacagatctgtagcccgctgctcttctctctcttcctttaactctttaaaatatgtttatagttggcttatagcctgctattgtacctgctctaagcacattttctataaagatgccattaatttcattatcttcgttggttgctgaaatatctttttgttaattggtgccctttggcctgttcctcatagttttttttatgtatagcttgaattgtagctagggtgacatattattagtagttaagactgttgactactcccgtgttcttaaatgctgccttttgtgcagttctagcatgctgtactcctacaatcctacatttcctggtgtcactttcccagtaagctgtgccgaattaatgaactaggccttatttgcgcttgtatttagggtcaagttgaattgagatgccttttatatctatttaatagcccggaggatccaaacatggccattgaggcaaaaaaaaaaaacaagaagaagaagaagcaggagcagcaattatgcggttgcttcgctcatcatgctgatagtgttcatacgctactattagtagctacttcttgcgtttcaagctgtctagtacataaatgttggtgattggcaatacgattggaggaattaaggcaaaagagcacctaaccatgttatatgtttcatgcatttgttcattaatgcagcttgatccggcgttaaaattggcttgatcggactgccgtggtctgtcatcatccctgaacaggtcggtcgacatcagatcttcacctatattggaggctaagttgttcaccaactcattgtgtttatggctagtatattcgatcccctttagacatgctatccaatcaaacgaagccttgctactgtgcgg

SEQ ID NO: 9254 - DNA, 1466 bp, Oryza sativa
  ref <308>: DATABASE ACCESSION NUMBER: AK106602
  ref <309>: DATABASE ENTRY DATE: 2002-08-28
gtgctgctgttgggagctgttggctcttcttgctttcttcttcttcttcttcttgcagacgacgagacgagatagagattatttgagactctctcacacacacacacaaagagaaagagagcagagagagagagagagagtgtgtgtgtgtcgtcaatggcgacgacgtccagatagcatagctagggtttcgtttgcaggtgggccgggggagatggccgccgattcgagcacggccatgaccttgtaccagggcgtccccttccaccagcagcagaaccagattgagatagagtccatgctctccttccaatcctcctccatccccccacctcccacacccgccaccatgcttcttgccccatcctcctcttcctccgacttccgcaactacaagttcgtcacctgttcccccgccgattggccccaccacgacctcgctatcttgaacgacggcctcctcagatatgctcatgaacccaatattatcaagtacaccaagattgccgcaatgctgcctactaggactatcagggatgtcgctttaagatgccgatggactaaagacaacgaaagtaggcgtggaaaacttgaccaagtctacacggggaaaatgataaggggcttgaaggacaacatggtttcgtctaccttggcagctaatattcaaatccaaaatccaaacaatatggtaccattctcaatatcaatgcattatcagggtcaaaacagcctgcttcataaggaagtccctgttttagatagtgcaactcagcatcttttggaggaaaataaccagttactaagccagattgccgaaaatatcgaaactttcaagacggtggagaatatggatctctttctgcggacgaataataatatcagaacagttcttaaaagaatgagtgagacgcctggtatcatgggtcagatgcctcccttgccagtacctgtaaatgaaggcagcctgaatacacttctccaaatggacagaatggttggtgcctatggtataccatgaaactcccatatggacgcgggactgatgtaaaagatcctgtttggaaagggggagagatgtattgcatagcatcctatcggggaagttgacagagaggagcctttgcctgatttgtactaatggcatgaagacaaccaaaggatgctagagcttagactaaccaaggtgccacgggataagtaatgttttttgaggattttctttttctttttcctttgaattgttttagctgccgtgtgtctatccttgattattggggaagaacatgccatcagtcaggcgggtatgcgggtactttcttggttgctgcaagaaagtggagtacatgctgccgctgcactttattcaatagaaagggaatgtctgtaaatattgggtcaggtgtggtggtggttggtattctaaggccgctgttaatgtaaaagaacgtctgttctctcggtac

SEQ ID NO: 9255 - DNA, 2314 bp, Oryza sativa
  ref <308>: DATABASE ACCESSION NUMBER: AK106603
  ref <309>: DATABASE ENTRY DATE: 2002-08-28
atatttactgaagctaagtggtattggattgggtttggtgctttgattggatatacactcttgttcaacctcctttacactgtggcactttcatttttgaaaccacttggtgactcttacccatcagtgcctgaagatgcactgaaggaaaagcgtgccaaccaaactggtgaaattctagatagctgtgaggaaaagaaatctagaaagaaggaacagtcccaaagtgtcaaccaaaagcattggaataacactgcagaatctagtcagatcaggcagggaatactcccctttgcacaactgtcacttagttttaatgacataaaatactcagtggacatgcctgaggcaatgacagcacaaggagtaacagaagagcgcttgttacttttaaagggtgttagtggttcgtttaggccaggagtacttaccgcactgatgggtgtgagtggtgctggaaagactactctgatggatgtattagcagggaggaaaactggaggatacatagagggagacatcaccatctcaggctatccaaagaaacaagagacctttgcgcgtatatcaggatactgtgaacaaaatgatattcattctccacatgtaacagtttatgagtcactcgtattttctgcttggatgcggcttccttcagaggttgattcagaaacaagaaagatgttcatagaggaggtcatggagcttgtagagctcacatcactgaggggtgcactcgttgggcttcctggagtgaatggcttgtcaactgagcaacggaagaggctaactgttgctgtggagcttgttgctaacccttcgatcatttttatggatgagcctacatctggtcttgatgctcgggccgctgcaattgtgatgaggaccgtaaggaagaccgttgacactggtaggactgttgtttgcacaattcaccagccaagtattgacatatttgaagcatttgatgagcttttcctaatgaaaagaggaggagaagagatatatgttggtccattgggccagaattcctcaaaactgattgagtactttgagggaattgaaggcattagtaagataaaagatggctacaatccagcaacatggatgttggaagtaacctctactacacaagaggagatgcttgggattgatttcagtgaaatctacaaacgatcagaactatatcaaaggaacaaggaacttatacaagacctaagcacacctactcctggttctactgatctccatttccctacacagtactctaggtcgttcttcacacaatgcatagcttgcttgtggaagcacaagttatcatattggaggaatccatcctacacagcagtgaggttactcttcaccatcatcattgcactactgtttggaacaatgttttgggacctcggaaggaaaacaaaaaaagaacaggatctattcaatgctgtgggatcaatgtatgctgcagttctttacattgggatacaaaattctggttgtgttcaacctgtagtggtggtggagagaacagtcttttaccgagaaagagctgccggcatgtattcaggtttcccgtatgcatttggacaggttgcgatcgaattgccatacatcctagttcagacactggtatatggtgtactagtctactcaatgattgggtttgaatggactgttgctaagttcatttggtacctgttcttcatgtacttcacattgctgtatttcacgttcttcggaatgatggcagtaggattgacaccaaacgagagcattgcagctatcatttcaccagcaatctacaatgcatggaacctcttctcaggatatcttatacctcgacctaaaattcctgtctggtggaggtggtactgttggatttgccctgttgcatggacattgtatggattggttgcctcccagtttggaaatatccaaactaaacttgatggcaaagaccaaaccgtggctcagttcattacggaatactatggtttccatcatgacttactatggcttgttgccgttgtgcatgttgttttcactgtgatgttcgctttcctgttcagttttgcaatcatgaagttcaacttccagaggagatgaagaagatgccattcttagatgtagtcgtagaagatggtgtagtctcatatatagagtttattttcattcggtacatagaaaatgtaacaagttccttgtaagttgtaaccagctcatactaggcagagcagaggcaataacttcatctcaagaaatgctgctgtatttgacaattaaataaatgcagatttttttgttcattcaatct

SEQ ID NO: 9256 - DNA, 2166 bp, Oryza sativa
  ref <308>: DATABASE ACCESSION NUMBER: AK106604
  ref <309>: DATABASE ENTRY DATE: 2002-08-28
gttatttggtggtgatgataagagtggcgcttgattgttttgtggctattactttttcctttcctcgtttgactattcatctgccggttttagactctactccgattctgtcttctctaggagacttagtcaggctcggtgttgatgtaggttttctttatcatgttggtatccaaagtacctgttgtttattgggtagtgattcttaattgatgttactcattcaggattgactacgatttagtttgtgactgtttcttgattcccccctgttctggttaaacttttcaattgttcatacttttcagaaagttcaaacataattgatgacattgcaatccttgaggtgcagaattggttgtcttattttttttatatgcacaaattccttcaatgtgttgactcagcttggttagtgtgatttttctttacattgcttatagtttctggggatggtacatgattaattaggatggtatctgatgtcttgatatcatgctggaactaatatttgcattttaagttatagccatatagttgaatactaatgttttcatcattactgttgtgactcctgctaatcatgatactggtacttagacttgaggatagaaaacttatctcacaccatctttacttatttgctaagcagggaacagaggttctggccgtacaccgcttaactgggagacgagatcaagcattgcgctggctgcagcccgtggcgtcgagtacattcactcaacaagctcatcagcatcccatggcaacatcaagtcatccaatgtcctcctgaacaagtcgtatcaagcacgtttatcagacaacggactttctgctcttgttggtccatcgtccgcaccatcccgtgccagtggataccgtgctcctgaggttactgatccccggagggtgtcccagaaggcagatgtgtacagctttggtgttctcttgcttgagctgctcacaggcaaggcccccagtcaggccgctcttaacgatgagggtgttgacctgcccaggtgggtgcagtcagttgtccgctcggaatggactgcagaggtgtttgatatggagctcctgaggtatcagaatgttgaggaacagatggttcagctactacagcttgctatagactgcgttgcacaagtcccagatgcccgaccttcaatgccacatgttgttttgcggatcgaggagatcaaaaagtcaagcgaaagattagaaggtagagatccgcagcagcaggcctcaaatctcgaagcgggcgatgatcagacttctaagccagaatccgctgaggggctcaatccttttgccccttgatattgaataacatgatggaggaatcggctaactgctgtagcccacatttggttcatggatttgatgaatcctatcttcaattgagtggactactttcatcttttggcaatattgaatttaccattggtgtcaaccatatggttgtctttcgattgcgcatgatgcttggcaccctctgtgctgtggtaggtattctggtggtgtttagggatcaccaccccaagtttgtgattgctttaatcgatctgcttattctagctgatgattaggttggttctttagctatccatgtaattacaccgcaatctagtgcttggaatttcttgcctgagaatcatatttcatgagttcgctccctgatggagttgttgccgattggcatggccgatgtgattgattgctgggtctttctttggatggtttggtgatctgtaaaacatgcatctcctgtggccgcatctggttgacgccttcggttcgtgaaagcaacgtgctctcgatccggtggcacgggtcttgttttcggcgagatgttttttgaatcgcccctgtttgttggtttcgtcctttgaattcaatctgcctgatacgaatagaaatgtgactgttgggctatcattattgatcatggtccataaatagatgccactgttaccctgtacgtagggtggtccaaaggaaaaatatgtacaggaaacgtactggttgagtgatccaaatgggtcgtgccgtttttggcttgggctacatctcatcaaaccacgatctatagcagtgtttccctagctccgtgccttcgttgcatcagcatccataacaaactctggccatattcgtctc

SEQ ID NO: 9257 - DNA, 2092 bp, Oryza sativa
  ref <308>: DATABASE ACCESSION NUMBER: AK106605
  ref <309>: DATABASE ENTRY DATE: 2002-08-28
aacaaagggaataattcagcctagttctagtcctttttcatcaccagttttgttagtgaagaaaaaggatggtacatggcgtttttgtgccgactaccgacatatcaatgctataactataaagaacaaatatcctcttccaattatcgatgagttactcgatgagttgtcaggagctcagtggtttaccaaacttgatctccgagctgggtatcatcagattcgaatgcagtcagttgatgaacacaaaacagcgtttaaaactcatcatggccattttgaattcagagtcatgccctttggtctcactagtgcaccagccacatttcagagttgcatgaacagcattctgtctcctttgttgagaagatttgttcttgtttttgttgatgatattttgatttatagcaagactcttcctgagcatgtcaagcatcttcagatagtcttgcagatcttgactacacatcagctcaaagtcaagaagagcaaatgctcctttgctcaacaaagattggcttacttgggtcacattatgagtcctaatggagtttcgactgatgaagataaaattcaggctgtcagcaattggcctacccctacctctgttaaggagttacgtggttttctgggtttagctggttattaccagaaatttgtgcgacattatggacttctcagtaaaccattaactaatctgttgaggaagggccaactgtacatttggactgctgaaactgaacaggcttttcaagctctgaagcatgccttaatcactgctccagtattatcgatgccagatttcaatgaaccttttattgtagaaacagatgcctctgataaagggattggagcagtattaatgcagaaaaatcatcctgttgcctttttgagtagagctttgggtccccgccatcaagggttgtctacttatgagaaagaaagcttggctatcatgttagctgtggatcattggcgcccatgcagagttttttatcagaacagatcatcgcagtctatcttttttggatgatcaacgactcactactccgtggcaacataaagcgttaactaaactgcttggcttgcggtataaaatcatttacaagaaaggcactgaaaatggagctgctgatgctttatcgcgctgtccatctgctgataaagtgtttgaacttactgctatatcctcagttattcctaactggattcaagaggtggttgatggctatatgtctgatcctgaggcttctagtaaggttcaaacattgtgtattagtccagctgctgttccagacttcactctgaaggatggtgttctttactttaagaacataatgtggattggtaacaatgttcaggttcaacaaaagattttggccaaccttcacactgcaccagtagggggtcattctggtatacatgtcacttatcaacgggttaaacagttgtttgcttggcctcacttacgttctactgtgatgcagtttgtgaattcttgttctatctgtcagcaagcaaagtcagaacatgtcaaataccctggaatgttacaaccattacctgttccagaacatgcctggttctggccaaagttggagaagtggcttataaattggctttgccggccactagtctgattcatcctgtcatccatgtttcccaactcaagaaagctttggcgcccagtgaatcactgtatccttctttgcccaggattcagtcaagggatgatcctcatgttgtcacatgggagaatgctcaagagctgcgtcttcgttttcctcaatctgaagcttggggacaagcttcatctcaaggtggagggaatgtcacggcggcaagttctctgaagctggattcaaatcaaactgcagcggcccagcctgttaggcgatccaagcgtgaggcacaacccagtatccgttttcctaagagtgtgtggacccagtagatagaggctgggccactgtcagggagagaggcttgttagtgcattactatataagccggcaggttagagagaaaaggggatcgaatcatgtaaacaatacaattcaatctaattccaatctctctgcttgttcttttc

SEQ ID NO: 9258 - DNA, 1757 bp, Oryza sativa
  ref <308>: DATABASE ACCESSION NUMBER: AK106606
  ref <309>: DATABASE ENTRY DATE: 2002-08-28
tatgatttgccagcattctcagctgctgattctcaggctgattctacttggttggtagaaaatctacttatccaggaacaggcgacggaacatacgaaggacacacgtcctacgaagcaatatgagattctcaaaacagggaaggctacggatacacatggggctaggctaacaagtatcttcgtttgaccctggattgtttcattccacccttccctcttctaactagtcttctcttatccacgaacggatagaactctgatcctctttagccccgagaaaggaagatgagctagggcaaagagacggcaatacttacctaataggtattatgaagggggaaatcaagctttatttctctttatagtgaagctagcctcttaggcgcagtgtcagacatcttagctatgtagggaatagcggtcagtgctgcttgattgagtctttgtcttgcagttgcaggagtgatgtcaaacctcttgcttgagttgtctgtattggaagtcgtgtaagcggcttcttccgccttccgggtctagtacgtatgaaaagatgtcagcgtcgtggcgattgcctttcctggtggtgaaggattctattcccgagcggctaaggtccaatccggtattctatttcgtctgtgcgagcattaaaaccaaccatttccgacgtcaagatcaataggaagaaaagggagtctttttctgtcttgagggttttattttaaatccaaatcgaaatgcctcaacttgataaattgacttatttctcacaattcttctggttctgccttctcctagtaagtagctcacgaggaatggggggacagattccctcaatctcgagatacgaacgtatcgtgtcaaaatttattggaaaatttttcttcagtggtttgtggaccgatagaccttaccttatttttatttttatttccctcatttttttgggactttatattgtcagaaggaggagggaggctttttcctctactctaattggttccttctctggtttgttttcgtttttttttgtggaaggcccagaggttgcttccgctatggagaacccaccagggcctgggcctagtgaagcgggtccttccggatccgctgcgggcaagtcagctgaagcctctactccgtcgtcctcttttttcaatgggctttcgggccagatacccgcaccggattcccccggggaagaggtgccgcaaggggaacagccccgttttgacccttattcaattccggaagttcccctggaacacgtattcggggctgttccagatcggggagagccatccacaagccacaccccgccgaaccctgaacctcaacttggagaagaaaatgccgggccatcaaaccaccaaattcaacatgatgttataagaagcagacttgaaacttgaactccccaaagggaagtaagcgacgatgagatagactcaatcatttttattaagaaagatattatcgatcgcatggcccaattagacccggaccgggatggattctggaatgagcaaaaggaccacttagtcgctcatggaatcctcaataagggtaaagagtataccttacagggactgataaacctttctaaaaaattggaaaaatccggtactagctgtaatgtattcaataaaataaagaagaatgaccgtaaatcatttcgaaagaactacgaaagcaaccctgatctttcttctatgaagaaagtacgtaggcactcctcagcgaggacgcgggttt

SEQ ID NO: 9259 - DNA, 2751 bp, Oryza sativa
  ref <308>: DATABASE ACCESSION NUMBER: AK106607
  ref <309>: DATABASE ENTRY DATE: 2002-08-28
taatcaataacaccaatttggaatttttccctgtgaagaacaaagcagaaatatttcgtctgagaggtgacttcctgctaaaaatgaatgactgcgagaatgcaaatgttgcttattcaaatgctataacactttttaagcatttgctaaaagcatggattagctgggggaattactgcgatatggttttcaaggagacaaaagatgagatttggcttgagtatgccgtaagttgtttcttccaaggcatcaaatatggagtttcaaactcaaggagccatcttgcacgaattctctaccttctgagcttcgatacacaaaatgaacctgctggaagggctttggataaatatcttgagcagttgccccattgggtttggctttcgtggatacctcagttattgctatcattacagagaagtgaagcccaacactgcaaattagttttgctgaaaatagcccaagtttatccacaggcattgtattattggcttcggacatacttgatggaacgtcgtgatgttgctacaaaaactgaaatgggaagaatagctcagcagcgtatgcagcaggctatgctggcaaacaatgctgccaataacttatctgaagggaacgcgaggacatctaatcttgggggtgggaacatgacttctgacaaccaagttcatcaagctacccagtcaggtggtgcggcagtttctcatgatgggggtaatctccaaggacaagagtcagacagatctaatgttgagggtggtacaagcgctggccatgatcaaggtcaaccgagttcaactggtgcagatggttcgcaaatgccagcaagacgcaataatggacttggctgggtaacttctgcagcaagtgcatttgatgctgcaaaggatataatggaagctcttaggagcaagcataccaatctagccaatgagcttgaggttttactgtctgaaattggatcaagatttgttactcttcccgaggaaagacttcttgctgtggttaatgcattgcttcaccgctgctacaagtatccaactgcaactacaggcgaggttccacaatctctcaagaaggaactttctggtgtatgccgagcttgcttttcacaagatgctgttaacaagcatgttgattttgtcaaggagtacaagcaagattttgaacgtgatcttgacccagaaagtgctactacttttccagcaacacttgctgaactcactgagagattgaagcactggaagaatgttcttcagagtaatgttgaggatcggttccctgcaattttaaagctagaggaagaaagtaaaattctcagggacttccatgttgttgatatagaacttcccgggcagtacttcacagatcaggaggttgcacctgatcatactgtcaagttggacagagttggacctgatattcctattgtccggaggcacggtagtagcttccgacgtctgacacttattggctctgatggttcacagcgccattttattgttcagacatcattgactccaaatgcccggagtgatgagagaatgctgcagctattccgtgtactaaacaaaatgtttgacaaacataaagagtcgaggcatcgccatcttgctattcacaccccaatcattattcctgtttggtcacaggttcggatggtagaggatgatttgatgtacagcactttcctggaggtgtatgaaattaactgtgcccgacataatagagaagctgattcacctattacaattttcaaagaacagctaaatcaagccatctcagggcaggtgtcccctgaagcagtggtggaattacgcttgcaagcctataatgaaattactaaaaatatcgttaatgataatatcttctctcaatacatgcataagattctaccaactgggaatcacctctggaccttcaagaaacagtttgcaatccaagtggctctgtcctgtttcatgtcgtacatgttgcagattggtggtagggctcctaacaaaatattatttgctaaaaatactggcaagatcttccagaatgatttccatccagcttatgatccaaatggaatgattgagttcaatgagctagttccctttaggctgacacgcaatatgcaagctttcttctcaaatttcggtgttgaaggtctcattgtgtctgccatgtgttctgctgcccagtctgtggtttcaccaaaacaaagccagcatatatggcaccatttggctatgtttttccgtgatgaactgttatcttggtcatggaggaggccacttggcattccttctgttccagttgctgctggaatgattaacccgttggatttccagcaaaaggtgataaacaatgtggagcatgtcattacccgtatcaaattaatatcaccacattatcttgctgatgaggaggagaattcatctgagccacctcagtcggtccaaagaggcgtcacggatctcgtggaagcggcattatcttcgaggaacctgtgcatgatggatccgacatggcacccgtggttctgaaaagtgaaaacaaactcagcctattgtcgcctggccaaatatttaccatagccttttgtagcctaaccgagattgctcgtaggtgatgtaaatattaaccttatttggcaacaaccgtgaactagtcgtagtctcatcatgtagataagaaatatcggcttttagctttactcgtattagtgctctatttgatatctataaagagatttagtttcagagc

SEQ ID NO: 9260 - DNA, 2772 bp, Oryza sativa
  ref <308>: DATABASE ACCESSION NUMBER: AK106608
  ref <309>: DATABASE ENTRY DATE: 2002-08-28
tcctaagggtgctgaaattgatatacgatcaattgttgtcggtgatcatacattgtctgtcttggagatatggggtgctgagtaccaggaacaagatgcacttctggtgaagcctgagagcagaagcctgttagagtcactttgtgaaagggaaagggtttcaatggctgtcattggtacaattgatggatgtggaaagattgttttgattgacagtgctgctatggagcatgccaagataaatggccttcctcctccaacccctgttgaggatcttgaacttgaaaaggttctaggagatatgccccaaaagacctttgaattcaagcgagtgtctctagtcagcgagcccttagacattgcccctggagtaacaatcatggatgctctgaagcgagtattgagtcttccgtccatatgttctaagcgtttcttaaccacaaaagttgacaggtgtgtgacaggtcttgttgcacaacagcagacagttggacctctccaacttcctctcgcagatgtggctgtgattgcacagacatatactgacttgacaggtggtgcctgtgccattggagaacaaccagcaaaaggtttacttaatcccaaggccatggcaagacttgctgttggggaggccttgactaatctggtctgggctaaagtttcatcactttctgatgtcaaagcaagtggtaactggatgtatgctgcaaagcttgatggagaaggtgcagatatgtatgatgctgctgttgcattggctgactgcatgattcaacttggtattgcaatcgatgggggaaaggacagtctttccatggcagctcaatgtgatggtgaggttgtcaaggctcctggaaatctggtcatcagtgcttatgtgacatgtcctgatataacattgacagtaactcctgatttgaagcttggcaatgatggagttttgctgcacattgacctgggcaaaggaaagcgcaggcttggtggttctgctcttgcacaggcttttgatcaaattggaaatgactgcccagacattgatgatgttccctacttaaagaaagcttttgaggccgttcaggaattgcttagtcagcgccttatctcagctggccatgacattagtgatgggggtcttattgtgagtgttcttgagatggcatttgctggtaattgcggtgttaagctgaacattgactcagaagattcgggccttcttcaagcactctttgccgaggagcttggccttcttcttgaagcgcacttgaaagatctcagtgttgtgaagcaaaagcttgaagcaggaggcatttccgctaatgtaattggacaagttacagcatcaccagatattgagctagttgttgatggcaggctgcatctcaaggaaaaaacttcagatctcagggatatctgggaggaaacaagcttccagcttgaggggctacaacgcctgaaatcttgtgtcagacttgagaaagaaggactaaagcacagaacatcaccgtcgtggtctttgtctttcactcccaaatttacagatgaaaaactgctgactgcttcctcaaagccaaaagttgccatcattcgtgaagaagggagcaatggtgatagggagatggctgctgcattctatgctgctggatttgaaccatgggatatcacaatgtcagacctcttagctgggaagtcttctctagaggagtaccgtgggattgcatttgttggtggttttagctatgcagatgttcttgattcagctaaagggtgggctgcatcaatcaggtttaatcagcccctcatacagcagttccagaatttctataataggccagatactttcagccttggagtgtgcaatggttgtcagctaatggctcttcttggctgggtaccaggatcagatgtcggaagttctcttggttcaggtggggacatgtcccagccaagatttattcacaatgaatctggtcgttttgagtgtcggtttacaagtgtctctatagggacctctcctgctatcatgttcaaaggaatggaaggttctacactgggcatttggagtgctcatggtgaggggagagctttcttcccagatgaaaatgttctagctagtgttgtgaactctaacctggctcctgtgcggtactgtgacgatgctaataacattaccgaagtctacccgttcaatcccaatggctctccccttggcattgcagccctttgctcccctgatggaagacatcttgctatgatgccacacccagagcgttgcttcatgatgtggcaatatccatggtatcccaaggaatggcagcttgagaagtgtggtcccagtccctggctgcgcatgttccagaatgccagaaatggtgtttgtagtgcaggtacctaattgatggccatatgatgaatataaaagcttggagctgtggactcatttggataccgaaacgtggtgatatcagatgctggtgcgatgcgctcagcagtcagcattgttgttactgaggatcgaataaatgggttcagcgaaataattaaaagcagattttatgattctttcttgcagctctgaatcttgctgctggtttgaaactaggaatcctgtaaggctagtagtgttttattaggcagaggtgaggaggcctcaggcctgcaatgctgttaatgagaataatcctgttggccctgcagtgctgctttgagaatactatagcagaacaggacacatgcccataatgtgttgttcgattgtcccatgatactgtc

SEQ ID NO: 9261 - DNA, 1867 bp, Oryza sativa
  ref <308>: DATABASE ACCESSION NUMBER: AK106609
  ref <309>: DATABASE ENTRY DATE: 2002-08-28
ggcgagatggagaaggaggtagaggaggaggaggaggaggaggaggcggaggcgagtagaaagaagggagaacgcggattaggggagggggaatgcggggcgccgagtagcaagaagagagaccccgaattggagttgcgcatgaagcagaaggcggcggagtggcacaggaaggcgagggaggagaccctgaaggagatagccaaggagatggccaagtaccccaacgaagactggtccgacacaccgggcgtcaaggctcgcgagtaccgcgaggactgggaataccgttggtccgccatcttcggtccctacgacacaatctcgcctataccacccatgcgctatacacaccgtaaggacgactctatgccgagacatatttcagtccgtcacactctgcagatcatctcggtcaaaataaagggaataagagggggcttacagtggccgatcaatgtgtttggtctcattgctgcgcgcgacacgattgaccgcaaccgcattatgatcttcaaccgcaccaggggtaactgccaaacaattactaaagaggatcgatatttattactgacaggtcctacgcgtgctgttgtggtatctgaccctgtgtattttgaggccccgctgaaagtgaagggctctgtcgaatctgaggataaagatttaagctttttagctgtcccgctcaccggtgcttctgatagaggtgaaacgcgcttggttaatagagagtacactagcaggcttagcacgctggagttgacatttggctttgttgttgagtccttggaggcctcaatcagtgtgcgtatcattgatgggtcatggaaagatggttttcgtggtgcattcactgcccatacccccagtctaaaagacaataaagtcctgctgcttgattctggatattgtgagatggtgcctgttactgctgatcgcatgatcaagctttcacgccatgttgtttccgtggaaggtgagggagacctgaccgtttcagtgctggcacttggaactgataatgtgatagaagatgagaaggatttcacgcctaaggaagccggtatgagccagagctctcttgacgtgggcttttgtaaattggaagtaactgtcaactggtcacttctttccttgcttcctgatggctatacttaattaagtacattgcacagtggtatgtgaattgtgatgttcctttggatctgttgcttctgaacttctgaaatggggtgttggtttttttttcttttgtttactagctagaatagcgaactcttgatggacgcggtatcctgtgtatagaatgttggcagtattgccaccgctacggataaagttcgatttcctatcttgatgagattttgtattttatgatgccccattttcttggacagaatttgtggtggatgaacggcgccccactttgtgcacgcggagcaatgtggacatataatggaataaaaggggtgatgctaatgagaaaatttctagtttagatgccacttaccgaatcagcttgtcgaccacatctttattattatctttacacaacacaaacatattatcactaggaatttggtgttgtccgtgttactaataatatagtgtactgtaatatactgcagtctaggacaagttggtttcttgataagcatctaggacaagttcaggtgagcttctcgaccagctctgtcactaggaatgcttggctgcttgcaatgaaacttctatgcatgtacccagatatgtgttgaggaagttgattgttgattactttggttacagaacttgatcaggcttgtcgttaagccaaactgtaattcacttgtgggttgtggctatgaagtctcattttgagctg

SEQ ID NO: 9262 - DNA, 1516 bp, Oryza sativa
  ref <308>: DATABASE ACCESSION NUMBER: AK106610
  ref <309>: DATABASE ENTRY DATE: 2002-08-28
caatatccccgcaagcacccgcaccttcagcgagatcctaagcgacccccaaggccctggagcccgcactgcaactctacaaccaatacaagcctttcctcactagtgcgcctactgacaatatcccctcatctacctcagccaagcttctgcaaaggatgctcaagccttcaagggtcttcatatctcctgcaacaacaaggttcaacaactaatttatcaccttgagcttgcaagaggttgctataagggcaatgccactggccttgcacgccattctatgcttcgcaagaggaacgttctcaaattcgtcaaggactccagtattctcagacctggctattacattgccattgatccacgcactaaattggtcatccttgggattcgtgggactcacactgtttatgacctagttaccgatttgattgctctaagcgataagaaggtatcacctaaaggtttctcgacacactttggaacatatgaggccgcccgttggtaccttcgccatgagttgggacttatcagaaagtgtttggaaaagcataaggattacaagttgcgcctggtagggcactcccttggaggtgcttcagccgcgttgcttgctataatgctaaggaagaagtcaaaggaagagcttggatttagtcctgacgttatatcagctgttggatatggaaccccgccttgtgtctcaagagaaattgctcaaagttgtgcaagctatgtttcaactgttgtactgcaggatgatatcatccctagattaagtgcagcttcactggcaagattgcgagccgaaatactcaaaacagattgggtaagtgttttggaaaaagaagactggaagcatatagtggacattgtgactaatgctaagcttgtagtttcgtcaattcaagatgtggcgcgcaagcttgctgattatgctaaaattgtcacagtatcaactagttctgatgccatcaaagatcaagatcgccccctgagcaccagtgaagtattgtcaccggatagtaaagaggatgtatttgtgccagaagatctgttccttcctgggactctgtattacctcaagagggacattgaggatataaacggtgtagaagatgagtcgtatacactctggagaggtgatgccggggagaattttcagaggatactgttatctggcaatctgatatccgatcacaaatgtgaaagcatatattacgccctgagggatgtgctcaagactctgccgccccaggaatcaggatgacaagtagaagttccttttcaagctttttgcaggataatctccatctattctgtagtttgtcatctcgatacaatagaggaaagcatatttttgttgctccttagttctcccatgggtaaaggcgaaagtctgccggctttgggggaaatagaagaatagagcttgttgtacagttttgtgtgtgtgtgtgtgtgtgtgtgtgtttgtaagggaaaaaacaagaataatagagaagaaatgcttaacact

SEQ ID NO: 9263 - DNA, 2654 bp, Oryza sativa
  ref <308>: DATABASE ACCESSION NUMBER: AK106611
  ref <309>: DATABASE ENTRY DATE: 2002-08-28
aagggaggaggagatcaatcggcaagccaaaaaacaaaaaaagatttcttttcttttcttttcctcctgttgctcgtcgacgcgccgccgccgccgccgccgccgcctcctccatcgccatcaactctcccggccggccgtcttcttcctccgctcccttttggtctgaatgaggcaggagctagtcaaacgctcctttagagaggatgcttcaatggcaggtgccatcttcatgtccaacaccgccacaagggagctgtgcttccgttccaacatctttggacttcccatagagtaccaaccttttgtgcggaatatcagacaaggaatgcctttgtttctgtttgatcatactgaacgcaaactctatggggtctttgaggctacctctgatggtggattcaatattatcagatctgccttttcgtcgattggatgctcatatcctgcacaggtctgcttcaaaattatttggaagtgcagaccactcaccgaagatgagttttcacctgccataaaagagaactactatatgccatggaagttctactttgacctttcctaccaacaggttgtctgcttatatcagttatttgatgagaagagggttgaacatcctattcacaaccattcaaagagtgctaatttggaaaatgatccctttaggaaagggacacaagaaagaaagagcttgagtccaaatattcctcattttcctgctgatcagccaggtctttttatgcctgcgagtacccccagattttcaacagttgaagcaagctactgtgcatccacaagcatgcaccaagcaccacatcccaatatgtcaatgcccctgggaactaatccttttggagttcaaattgcacctgtccacaacagccatcacgaccaagcagaactaccttacaacaataacatgctttttcctggatacttgccttctggacatgtagctcgggacacaactcaggaacttgggctttctgcaaatcactcatatcctccatctatgggctatgcatacggttgcttgccgcctcctggacatagacctcaggatgcaattgcaggagatgtaaactatgcccctccatatcctcaatttcctctgccaaatgaacaaggcagtgctactaacaggagagattattatgatgtccactgcaaacaatgccagtttgaagatatttatgaatcggagcatcagcacttcagcaaagcaaaagtcttagcacctccaatattaaaccaacaagatgttccagtataccctgcaattgctgaatcagcatttgatcagcggaaagaatgtttcactgaagaagactctgagaatgctcgacagaaacaaagttttaatcacactgatatggtgttttctggtcttggaaatagcaatagagcctacatgccagaccatctaaacaaaaatcctgatataagatctgaaagcaacacaatagctgttggtcagcatgcacaaagcagtgtgttttctcgcttatcacggatcccaccaccactgcatcaagaaattcctggtccttcgctcaacaagttggttctctcactttctcagagagcagaacattggggtaaccaggataaaataatcaccaatgatgtttgtgaacagttggtcagtgagcaagtaatggatacaccctatcctcttgctgagttgaaccagcaaagcggcttaattgaagaagaaattgaagggcttgcattcatgaactttaagagacgcagcgaaacaaggaacttggatgcaaatctaggaaaggaaattagggggcaagtgaagagaagaaagcttgttcgcccttcctttggagaagttaacaatgctggtagttctggaaaagagcttgaagctaaagtcttagagggagaaaaacatagcaatgatgaacatgatgaaaacaagttcagtattgacctaaataaacctgctgccatagatggtgatgtagcaaaggaggatgataccaccaccgcattgccacatccttctgttgcgatcaagatgcataaagagaaaccatctgaagaaaacatgagcaagccaaacagcccaaatacgacggaagagatgaaaaaacaagatccatcccttgacagcgccacgcatactgaaaagatttcacttgaattagatgttgcggatttgaatacaattgaccagtccaaactgcaagcaattctcagctcatctctgttgcaagcacttgacaagctcagaagagagaagctcaacaactctgaagaggctgaagaggtaaagatagcaacttgactgtttccatgaactctgaaggagatgcaaagcctacatgcagttgattttagtacgtagtaccaaccaatactacttcagcagtactggagcagaatgactacaaggcatggttaagcaccaagtatcatgtgatgtagtataggaacaatagctaccttttctcatgtagtagtaccattgctattttgtgttatcctataaaactaactaatattctcggggaagtacggctctctcacgctgctctgccacgtagatctgtgtgatctgtcatgtggaattgtaaagcttctgcgtgcaaagaaatggattgagtttctctatagttatagtgctgttagtgcgtgcc

SEQ ID NO: 9264 - DNA, 2833 bp, Oryza sativa
  ref <308>: DATABASE ACCESSION NUMBER: AK106612
  ref <309>: DATABASE ENTRY DATE: 2002-08-28
ggtatgctaaccttgagaagtgcacattttgtacagatcaggttgtgtttcttggttttgttgtttcaggtttaggaattcaggttgatgaatcaaaggtgaaagcaataaaggattggccaactcctgaaaatgtaagccaggtgagaagttttcatggacttgctggtttttacaggagatttgtcagaggtttcagcaccatagctgcaccattgaacgagttgacaaagaaaggtgttgccttccaatggggagaaccgcaagagaaagctttccaagaattgaagaaaagattgtccgaaggccccttgcttgtgttgccagatttcactaaaaccttcgaggttgaatgtgatgcaagtgggattggtattggaggcgttctcatgcaaaatggacagcccgttgcatatttcagtgagaagttgggaggagcacaactgaactactcggtgtatgacaaagagttgtatgctttggtaagagcacttgaaacttggcaacattatttgtggccaaaagaatttgttattcattcagatcatgaggctttgaagtatttaaagggccaagcaaaactgaaccgtagacatgccaaatgggttgaattcattgaaacttttccatatgttgtaaaatacaagaaaggtaaggaaaacattgttgctgatgctttatctcgtaaaaatgttttgctaaatcaacttgaagtaaaagtgcctggaattgaaagcataaaagaattataccctgctgatcttgatttttcagaaccatatgcaaaatgtacagctggaaaaggatgggaaaaatatcatatacatgatggatttttgtttagagctaacaaattgtgtgttccacattgctctgttagactcttgttattacaggaaacacatgcaggtggtctgatgggtcactttggatggagaaagacttatgacatgctagctgatcacttctattggcctaagatgagaagagatgttcaacgacttgtgcaaagatgtgtcacctgtcacaaagctaagtcaaaactgaaccctcatggattatatactcccttacctgttcctagtgctccttgggaagatattagcatggattttgttttgggattacctaggacaaagagggggagggattcgatttttgttgttgttgatcgattctctaaaatggcacattttataccttgtcataaaagcgatgatgcttcccacatagcttctctatttttcagtgaaattgtgaggttgcatggcatgcccaagacgattgtttcagatcgtgacaccaagtttttgagctatttttggaagaccttatgggcaaagcttggaacaaggctgctgttttccaccacttgccaccctcaaacggatgggcaaactgaagttgtgaatagaacactctctatgctgctgcgagccttgataaagaagaacctgaaggaatgggaagagtgcttgccacacatggaattcgcttacaacagggcagtacactctacaactaacatgtgtccatttgaagttgtatatggtttcaaaccacttgctcccatcgatttgttgcctctaccattgcaggaaaggagtgacatggaagcgtccaagcatgcaacttacgttaagaagattcatgagaagaccaaagaagcaattgagaagaggtccaagtactatgctgcatgggcaaacaaggatcgcaagaaggtgacatttgagcctggagatttggtttgggtacatcttcgcaaagaccgcttcccacagaagcgcaaatccaagttgatgccacgaggagatggaccattcagagtgctgtccaagatcaatgacaatgcttacaagattgagctacctgaagattatggtgttagtccaaccttcaatgttgctgacttaacaccattctttggactagaagattcagagtcgtcgaggtcgactccttttcaagagggggaggatgatgaggacatcccaaccgtgcatgctacttcaagtaccaagcaaccatcatcaaacacaaaggatacaattcaaggtccacttacaagaagtcgtgccaagaaactacaagttcaggtgaattcattcctaactgattttaatttcagtacttctgagaatgttatactacctaagtgttctactttagttgtgcttaggaacatacaacatgaggaggatgaaagtggatcggtggattctatcactggagtacagaacggaccagtgaagcaaaacggaccaactgcagtgcaaaacggaccagttcaaagaactactcataactctcaatttacagaagctatggaagtaaatgaggactctttggaaagcttatcaagtcagctttccaatgccaccaataccaagtactttggacttcacaccaatgagaaccaagtacgtttgtgaagactgctctgaaggccaggagtctgctgagtcagcacgttggtacaagttcatgttcaaaactgtaccaatctacaatgtttcgtggtgcatgtgatacatggttcaaaacatagtgaagttaactttccaatgcaactgacggtgcatcatttggacttcccaagttggagttattgccaaattactgaacaccactccagaagaccaacagcctcgcgaacccacttcagaagccatttcgtggaggccctttcacattcttagtattttcatttccatctcgaattcacacctatctagcagggctgttgctagtataaataacccctaagaccattgcaaactgagacttttgataatccaattcggaaccctttgttcagctgtgtgctaac

SEQ ID NO: 9265 - DNA, 1328 bp, Oryza sativa
  ref <308>: DATABASE ACCESSION NUMBER: AK106613
  ref <309>: DATABASE ENTRY DATE: 2002-08-28
tcaagaacttctggaacactagatgtaagagaattcagagaactggtgaacctctatatccgaaggagtttaatcattttaagttgacagatctggaagtgatgaactgtgaaagccctgatgaatcacgtgccaagaaacgaacaaatgaggttttacagggaaatggtcaaagttacaaagaggtttttttcgataatttagactatagtagaccagaaaattatattcggccaaattgtgtgactccaaattctcttccagttgatgccacaagtccatttggtagtgccattgccacacaagatcagtcagtaccttttggtagtgccattgtcagtggacatccaattcttgatggcaacttctctacttctgggaccatacagaggcccatgaatgtagagctcccttcactccaatatcccaactatgactttaacaataataatgcatggtcatatcacgaccccttaggacatcctattgaccaggttgactttggctccctgagatcagaatatctctctccaaacaacaatggtctgctggatgcattggttcatggaggacatggacaaggggaacttgcaaattcccaaggatcttttgatgcttgttttcctcgtgttcaatgcaatcaagtgattcaatcgaatgctttctctctgagttcttcctttccaatcattggtgatgatctcctcgagaacagttgtcatgcttttgttggcatcaacaataatgcaagcagcctattccttgacagccaacctccacccttggtggaccctactttctggaggcacgatgtatcactagaaccgaatttgccagtttattgccagtttaacgaagaattgccgccctcaaatgagcagtttgccaaagatgcagatgacgctttcggtcatgggggtctttctgatgagaccaatctagctgctgcaggtcaaggcgatgaacatgaccttgaggacccctgggcgagcatgcccggtgcctgtgacatacctgattttccaagtgaatgacttgcatagagtttgtgcgtgttattgattttgatctcaaccagtgagagaaccaagaagatcctttttgcaataaccatgcctttcaagatcgtccaataagtttgtggctgcgtatgctattactatcttaccgtggagttgtgtgctatatgctttgctccccgaggaaatgtggcccttgaactgaatgttgccattgtttgtgtcggctacttattcgattcattaatgttacattgtttgctagaatatgctgaaattgtatattcgattcattggttttgattaatc

SEQ ID NO: 9266 - DNA, 2651 bp, Oryza sativa
  ref <308>: DATABASE ACCESSION NUMBER: AK106614
  ref <309>: DATABASE ENTRY DATE: 2002-08-28
gaataatgacgatccacacgaaaacggctctgctatgcctcctaggcgccgtagcaactacggcatggctctccttcgccgtcgcgcaaccacagccgccgccggcctgccggagaagatgcggcgacgtcgacatcccttacccgttcggcctcaacggcgatgcccccggctgcgccctgggccacggcacctacggcttcaacatcagctgcaacgacaccggcaacggcgtgtacaagcccttcatctgggacgtcgagctgctcggcgtcttgctgccggaaggccaggccaggatcctgatgagcatctcctcctactgctacaacccggccaccggcgccatggacggtcccgaaaacaacacctgggcgctcgacttcacctcgtcgccgtacaggttctcccacaccggcaacgtgttcaccgccatcgggtgccgcacgctcgcctacatcggcggcgacaacgtggacgccgacgtcggcagcctgaccaccgggtgcgtggccacgtgccggctgcaggccggcaacctcaccgtcaccgacgacgacgtcggcgcctgctccggcatcggatgctgccggacgtccatccccgtggggctccagtactactacgtctggttcgacgaccgcttcaacacgacggccatccacaacgtgagccgctgcagctacgcggcgctcatggagaagtcgtcggcgtcgtggttcaggttcaccccggcgtacgtcacctcgtcggcgttcaacgacaccttcaacgggcaggtccccttgctgcttgattgggccatcggaaacgagacctgcgagcaggcgaggcgagcgagtcccgagtcctatgcgtgcaggagcagaaacagtgagtgctttgactcgccaagcgggctaggctacatctgcaattgttccaagggattccgtggaaatccttacctgcacccagaagatcccagcagttgccaagatattgatgagtgcacggatcagaacatgaataacaattgccacgggatttgtcgtaatactcttggtgggttcgaatgtatttgtcctgcgggtacccgaggcaatgcctcagttggacagtgtcagaaagtgctaacacatggagtactgttggctataggaatttgttcctcaacggttgttggccttctaattttccttggcatagaatggatcaagtataaacgtcgattggttagacaagatctcatgaataaaagggatgcatattttcgtcaacatggaggccaattattacttgatatgatgaaattagagaatcaagtttcatttaagttgtatgacagagaagaaattgagttagcaacaaacaacttcagggagagcgcaatcctcggtcagggcggtcagggtactgtttacaaaggttttgatctagatccagaaaacaatcctgtggcaataaagagatgcaagggaatcgatgcgaataggaggatggaattcggacaagagttgctcatactctcccgagtgagacatgagtacattgtcaaacttcttggttgttgtctgcagtttgaagttcctgttctagtatatgaatttgtgccgaataagaccctacactatttgattcatggccaaagcgatgcatccactagaacactagatatccgactggaaatcgctgcccagtctgctgaagcacttgcatacctacattcacttgatcatcctatttttcatggggatgtgaaatctgccaacatacttattggtgacaaatttactgcaaaagtttctgattttgggtgctcaatatttagggcagcggctgatgaaaatattaatgtagtgaagggaacaattggttatctagatccagaatacctcatgacgttccagttgactgataagagtgatgtctacagctttggcattcttcttctagagctcttgacacgtaggaagcctctatccaatgaggtgagcctcgcctctctcttccaagatgctatgaagaagggaaacattgatcatcacatagataaagaaatactacatgaggataacatggaactgctatacgaattcgcatgtctagcaagccagtgcttagttatggacagtgagaacaggccagcaatgagccatgtggcagacatacttcggcaattggcagatacggcgtcacaacagcacactggcacacttcagggtattcgctcactcagattattgggaaactcaagtggtagcatctcagagccgtgttattctcctgttaaaacaatggagtatgacagcaggaagacatctatgggcattgaatttgcaagataagggcatctgccatgtataagcattaaacttagttgcacaagcctatagaaagtttttgtctgagctacatttggcttctatgtcgctctgagattgttcaacatggaaggaatgagaacgtaccaattcccatgatagcgtaatatggtgatccgaacatgtaaaggtggtaaaacatgctttggcatggaattgtcaacactttgctgactgtacatgctatggtccaaaaccgaaaaattccgattcatttgtgctaaaacagatatgtccggacctattttctatgcttaatatcctcttacattctatattttcctcatc

SEQ ID NO: 9267 - DNA, 1897 bp, Oryza sativa
  ref <308>: DATABASE ACCESSION NUMBER: AK106615
  ref <309>: DATABASE ENTRY DATE: 2002-08-28
tttcctcgcctccactccaaccaccccgcgatagctggagtcaccggcgttcacacaggcgacagctcgtgctccggcgatcgacgcggcggccatggacaagctcggcgccaacccggccaactcgtgcgcgctcacgccgctgggcttcctggagcgcgccgccaccgtgttcggcgactgcccgtccgtcgtctaccacgacaccgtcttcacgtggtcgcagacccaccgccgctgcctccgcctcgcctccgcgctcgtctcctccctcggcatctcccgcggcgacgtcgtgtccgtgctcctgccgaacgtgccggcgatgtacgagatgcacttcgccgtgccgatgagcggcgccgtgctgaacagcatcaacacgcggctcgacgcgcgcacggtgtccgtcctgctccgccactccggctccaagctcatcttcgtcgacccggcgctgctccccgtcctccgcgacgcgctccgcctcctcccggcggggcacacggccccgcgcgtcgtcctcgtcgaggatccccatgagaaggagttccctcccgcccccgccgccgcgctgacgtacgagaggctcgtcgagaagggggacccggagttcgcgtgggtgcggccggcgagcgagtgggacccgatgatcctcaactacacctccggcaccacgtcggcgcccaagggggtggtgcactgccaccgggggatcttcctcatcaccgtcgactcgctggtcgactgggcggtgccgccgcggccgacgtacctgtggacgctccccatgttccacgccaatggctggagcttcccatgggggatggccgtggtgggcggcaccaacgtctgcctccgccgcgtcgacgccgccgaggtgttcgacacaatcgcgcgccgcggcgtcaaccacctgtgcggcgcgcccgtcgtgctcaacatgctggcgaacgcgcccgagggcgtgcggaagccgctcccggggaaggtgcggatcctcacggccggcgcgccgccgccggccgccgtgctgtaccgcacggaggcgatcggcttcgaggtcagccacgggtacgggctgacggagaccgcgggtctggtgctctcgtgcgcgtggaagggcgagtgggacaagctcccggcctccgagcgcgcgcggctcaaggcgaggcagggcgtgcgcacgccggggatggccgaggtggacgtcgtggacggcgagaccggccgcagcgtgccccgcgacgggtcgaccatgggcgagatcgtgctccgcggcggctgcatcacgctgggctacctcaacgacgaggcggcgacgaaggcggcgatccgggacaacgggtggttctacaccggcgacgtcggggtgatgcacccggacgggtacgtggagatccgggaccggtccaaggacgtgatcatcagcggcggggagaacatcagcagcgtggaggtggagtccgtgctgtacggccacccggcggtgaacgaggcggcggtggtggcgcggccggacgagttctggggggagacgccgtgcgcgttcgtcagcctcaagcagggcggcggcgcggtgacggcggcggacgtggtcgcgtggagccgggagcgcatgccgcggtacatggtcccaaagacggtgatcttccgcgacgagttaccgaagacgtccaccgggaagatccagaagtacgtgctccggaatatcgccaaggagatggggcccaccacgggcaccaacaccaaacgcaacagtaaaatgtagcggcatctagccagcagatgtggcacttgctttttagcgtcgtcgtcgtcttcttcactcggacagagtcacagagcagaaatgtctggtgcaggcagaggctgatgcattccgcattgtcatggc

SEQ ID NO: 9268 - DNA, 2128 bp, Oryza sativa
  ref <308>: DATABASE ACCESSION NUMBER: AK106616
  ref <309>: DATABASE ENTRY DATE: 2002-08-28
gctctcctccctccctccactgcgagcaacgcgggctccggagggagagaaggggcaggagatttaaaaaaacaaaaaacaaaaaataccccgaaaacaaccgcaccaatctcaaaaccttccttttcatctcctttcctccaccctttcccccgccctatttcagcaggtagggggcgtcccgccccccctgccccccaggccggggagccagggaggggacagcgccggatacagggagaaccccggccccgggcccaacggggctggggacatctaagacggccccgggcctggcggaagccgtggagcagaggccagcagggacagcaatggttggtgcagacggtggctgagccccctgcccctggaatatgcagcccggggggtcctccggaggcagcggcgaggacgcggaggcggagcggggccgaaggcatggtctccacctatcgggtggccgtgctgggggcgcgaggcgtgggcaaaagcgctatcgtacggcagttcctttacaacgaattcagcgaggtctgcgtgcccaccaccacccgccgcctctacctgcccgctgttgtcatgaacggtcacgtgcacgacctccagatcctagacttcccgcccatcagcgccttccctgtcaacactctgcaggagtgggcagatgcctgctgctgggggctccgaagtgtccatgcctacatcttggtctatgacatctgctgctttgacagtttcgagtatgtaaagaccatccgccagcaaatcctggagacaagggtgattggcacctcggagacgcccatcatcatcgtgggaaacaagagagatttgcagcgggggcgcgtcattccgcgctggaacgtgtctcacctggtccggaagacgtggaaatgtggctatgtagagtgttcggccaagtacaactggcacatcctcctgttgttcagtgagctgctcaagagtgtgggctgcgcccgctgcaagcacgtgcatgcagccctgcgctttcagggagccctgcgccgcaaccgctgcaccatcatgtgacctcccctcctccaccctcgcagctggggggccgcaccaaggttgctgcccctggctgggggaggcaggggcagagatggggaacagagtcaactgagcttggcagggtggggcatttggcttgccaggctctaccccaaagtggccaatacagactgaaggccagggctcctcctgctgggggtgatgggaagtttctcagagatagctggaaagggtgctgatggggatgaggagaggatttgaacctgcagcccagcacaggcctgatgtccatcctaacactcaaacacacttacactctccccagccccaactactctgtcctactctggtgtgagtcaggggggtaagggaagtgtttcataactgcctctgtgggatccccagcccctccccaccttaacatttgtcttcctgggacagccatactccacaatgtagcctacaaatactccccctcccagattctgctgccctctgggattggggtccaggataggaggggaacctcgccccttggtgagtccatgccaccttagcctaaggctgtcacatcttgagaattcatccttcccattcaaagccatctcactccatttctgtctgtctgtctgtctgtccctcttcccttttatgtagatacctaccttctgtctatccccaataccctgaactctttttttctatagggctcttgcttcttccatcttcctgcctcaggtctgtgtgtgtctgtgtggtcctcccaaaggcctgttcagcacagcaccagagtgggtaaaaggcagagaaacagggatggcctccctgggactagggtcatggggttatagtcccaggtcagcaagaggggaagggggcagaacctccaaatgtgaagctgccccctccctttcctctccaggtagacttttcccacccagcagcctccagagacacaactcacctaccttccagccttaacttggtggcctggtacctgtcaggtactcccttccctgaccctccaacccccagagccagatcaatctttggtttgaatattttacttttaattaatagatagtttggaacc

SEQ ID NO: 9269 - DNA, 1999 bp, Oryza sativa
  ref <308>: DATABASE ACCESSION NUMBER: AK106617
  ref <309>: DATABASE ENTRY DATE: 2002-08-28
aggagtgagaggtcccacgtcttccccagcgccgccaccgtgagcgatgccctgccgatccccatctccgcggctgcgcctccgtcctccccgccacacctctcgccgccagctcgtccaccatagttgccttccatcccgccatagcgccgccgcctcgccgtccactcaaccgctagctggtccgcatcggaatcggaatcggaatcggaatctgtgatggttcgaatccgatcttgcggcgccctgccgaccgattcggtttccgtcggcgagggcttgcttaaatccgcggtccagcgagaaacgcagatcgtgggaagaagagaagagccttgacggatccacgaatttggggggaagaaatccctaattccattcgatttcattcgtacttgtgttgttcggctccttgcgcgcatccatgggtatctcggattggtccagtctccccaaagacatcgtgatcgtcgtcatggggaagctggagatccccgaccttctcagcgccggggccgtctgcgcctcatggcgcgccgcctgcacggccgtccgccgtgtccgcttcccaatcacggacaggtcgccttgcctgctctactcctgtgaggcggatgatccagatctcgccacgttctacagccccagcaacaatgctaccttcaaggtccgcctgcccggcccgccgttccgccgccgctacacggtcggctccgaccacggctggatcgtcaccgccgacgagctctccaacctgcaggtgatcaacccgctatcaggcgtccagatcgatctcccgcccgtcacggagctctacaacgtcgagagcttcaccgacgagcaagggagcctcatgtacaacaattacgaggattcgatgcaccgcgatgatcctcttgggtttcccgtgccgtatcctccacagagattacgccttttcttgtacttccgggtgatcctctcctgcagcccatccgccgggagcgaatgcgtcgtcctcctcctgcacagcccggacgggcagctctccttcgcccgcatcggcgaccatagttggacaaggctcactgatattgaaaatctctgggacagaggctacagatgtgcagtctacaacaagaatgacgggttgttctacctgttacactttcagggctcgatccatacgctaaatctgaatggaccctctcccgttgtaaacgagattttgaaaggggtcactgcctgggataatcctaccaaatcgatcgtgatgacaccccgcggcgatatgttgcaagtctggagatgcagggagctgtgttggaatgatgctccggttcagtttccttcggaggattctgaagatgttcatgatccatgtcaggagctgtacacggatgaaatgctgctgtacaaggttgatttcgatgatcagaagcttgacaagattgattcactgaaagattatgttttgttcctgggtttcaattccagtatctgcctttcagctaaggaatttccaaatttaaggccaggttgtgcctatctcgcagatgattcttatgaagagataggtataaataaacatactctgcgggaggttggcatttggaacttcaagagtgagactcttgaaagcctcggtgatccacagtctgtccttccttggcttaactggccacctccaatttggattacgtcctccattctttagaaagaaagagctgagttattgtcaggagctcctatttagatgaattatgtgtattgatgggagctcgatctctgttgtttaatacaagagggcaagagctgaggagctccaatttgttcaaattcaacatgtagtaatttgtcctgttgggacaaattctttctgtattagttaggtcatcttgtttgaataacaccgttgttggttagaagctcctatataggtgacaccttcagctaacttaggtgccagtgtttattttgatacctctttctgaagaaacaagacgattgttgtcaatcc

SEQ ID NO: 9270 - DNA, 1517 bp, Oryza sativa
  ref <308>: DATABASE ACCESSION NUMBER: AK106618
  ref <309>: DATABASE ENTRY DATE: 2002-08-28
atttttacttatcatatttggtatactagccaagtaagtcttccctcctccagctcgtcgccttcttctccagcttaatttctccgatcgaaatggcgtccccatcggcggcggcgacggctaggaagctcggtagtcatctgccgaggctgcgggacatcatcgaccacgacgacgaggacgatgacttcgtcgaggaggaggaagaggaggaggaggagtgggaggacatgagcaagcggatgtctcgcttgtccgtcgagggctccgacggcggtgacgccgacgacgaggacgacgggtacctgcgcggcgaggaggaggaggaggaggaggatggggacgaggtgagatcggatgtcaacggtgagtatggggacggcggcggcggcggaggccagtggcatccgtacggcgacgacgacccaagaaacccgcaggccccgtcgtcggcgtcgctcccgggcacgccggaccgcggggcgccggcgccgtcgccgtggatgtactcgaaggagtacgcgagcgagacggaggcggcgcggtggccgggcggcgacaagcggcggatgcgccaccggcgggagcggatgatgcgggaggtgtggctggaccgggcttggcagatgcggaagcagcggcggcagatgctgatgcagggccagggcctgggcgccgacgcggtgacggtggtggtgagcgccgccgccgccggcggcgagtccccggcgcgtggcgtggcgatggacatggaggagatgcgcgcgtgcagggacctcggcctcgacctcccctgcgactggaccgtggagatcccctgctacgcgctctccggcgtcgacaccgccagcagcggcggcaactcgccggcgtccggcagctggcgcatctccagccccggtgacgaccccaaggacgtgaaggcgaggctcaaggtgtgggcgcaggcggtggcgctcgcgtcggcctcccggctgggttcttgatacatttttatcgatcgtcgtacgtgccatcaaccaacgttttgtcatgagattgaaatagtgtattcgaaaaaaaaattctcccctctttcgtcggctcggctgtcacgtgtcagtcctcttcgtcgagcaataagtacatcgatcagcgatcagctcttccttcaagcgtgtgtgtttccacagtacataacttgaagtccaggaatatgtgtgaaaaaaaaaaagcattagcggcgtgtgcaatcgccaaaaaaaaatggaagaaaaaaatataaaaagaagttgtttccacagagtggttagctaggtagctatagctgtgtagatttacaggtggcacgtattgcttggtgacacgtgtttttctttctttcttgtattttattttattttcttttcttttgcctcggccggccggcagggggtgtggcccaccgggaaagagtaagacaggagtgttcgtgcgttccatgattacaggagtgcgggtgaagaaaacctaagaaaaattaaaagaaagttgtttcc

SEQ ID NO: 9271 - DNA, 756 bp, Oryza sativa
  ref <308>: DATABASE ACCESSION NUMBER: AK106619
  ref <309>: DATABASE ENTRY DATE: 2002-08-28
acacatcgatgcggcgccgccctctcttccccgtccgagcggcgccgcccttttcccctccccaccgtgtccccttctccggccgccagcgcgcgtccccggcaccgccgccggagtggatcgaggcggctccgtccccggccgccaccgtaggtgcggattgaggcggctccctccctggacgccatcgcaggcgtagatcgaggctgctccttccccagccgccgacggcgggcgtccatggccgcgtcgggtcctgatcttctatggagcttatgcacgcgctagcatcgacgcatcctcccccaacagcctctcaactcctctccggatgtgattccagcaagaacaattcctgggtgcctttttgattgacgaagtggattccggtgggaacttctggcttgcagatttgtggcgtgctggcgagaagtttgaacggcaagaacccggtgaatttgctaatttgtggcgtgcttgttgatgatcacggcgacggtcactgcaagaagtttttttttggcttgttgaagatttctggtttgctttggttagcttgttgaagtatttattgacatgacaagtacttatacgattcggaaacggcaagagtttgattagagtttaattaggattggtttgtctttcaatgtttctaaaagtggtgtgaacatgcggattcccaaaacattgtcagtttccaatgtattgtatgactcggttttccttattttcattttgactgattgtccgatt

SEQ ID NO: 9272 - DNA, 1799 bp, Oryza sativa
  ref <308>: DATABASE ACCESSION NUMBER: AK106620
  ref <309>: DATABASE ENTRY DATE: 2002-08-28
aagtctccggcgctcgcagcaaatccagcatcggcggtgaatcgatgggatggcggcggcgggagggcggcggcgccgtcgccggcgcggcctcgaggcttcggttcgcgccgtcctccaaccacctgctcgtctcctcgtgggattcggggctgaggctgtacgacgcagacgcgtgcgagctccggatggaggcgaaatcggaggcggcgcttctagactgctgcttccaggatgaggccgtggcgctcacaggtggctccgatggatccataaccaggggctcaaggtactattgggcaacaccacgaagtggtttcctgcatcgagttctcccagataactggtaaggggcagttcattgcgttgatgcttttcttggttcgatggacgcttggcccgggcatccaataggtgaaaactttaacactgcctgcctatgtgtccttatttgctgaaaagttttcagcatctgacattttctgtacgcaaataataataatgatactaggaaagaaagttatgctagtatgtgactatagtttttttggtatttgtaaatggattcctgtaataattatctatttagtgagttctttttattttttgcgtcgaatctatttagcgagtttcataatagaaatgacaacctttacttattaatttgtgtttattgttgtgtcgtgttcttatcaggtcaagttgtaactgctacccttgacaaaaagttaatgttctgggattctcaaacaagaaatgtgaacccgaacagcataaaaaatttggattcagatgtggcatcactttcagtctgcgaaatgtatatattagcagcaattgagagagaagtttacatttatgacatgaggaacctgataggaccagtaaaagtaaaagattcccctgtggaatatcatttaagaagccttcactcttctccagagtggaaaggatacgcagcaggatctgtggatggagttgttgcagtgaagtactttgatcgtggaaccgatggtgatatgggatatgttttccggtgtcatccaaaatctagagatggaagatccagtatggttcccattaatagcatcggaattcatccgttgtatgttttgtatttttttttgtgcatcttccagctgtcctgttcctcaaagtgatttttttttttgaaacgaacctcaaagtgatgtggacacactggtttctgattggcagtgacaaaacttttgttactggagataatgaaggatatgtcattgcctgggatgctcaatcaaaaaagaagctgcatgagtttcctatctactcaggcagtgtggcatcgatagcgttcaatcataatggtcaaatttttgcagttgcttcaaacagcaactatcaagaatcagataaaatggtagaggagcaccagatatttttcgaaatgaagcagcacttctaaggaggtgtgcctcaccttttagcaggaggtccctaccttcatgttgtacaactaatcgagctaaacttattcgtaggtattcttttccaccccatcattttgttagctgcgcaggatgtagctgaacgttgttgtattgttgtatggggaagcattatactcatacaaattagcaggtttacctatctcagcttgtgtaggcatgtgattgttctcaagcaagggcagggtagatttgtagcgactgtgtgtaaactagtacatcatgtactgtatgttcaaactgctattaggaaatgtaacacatgttattggacatttggacttggatctggttatgcaaaatggttgaagc

SEQ ID NO: 9273 - DNA, 1452 bp, Oryza sativa
  ref <308>: DATABASE ACCESSION NUMBER: AK106621
  ref <309>: DATABASE ENTRY DATE: 2002-08-28
acttcaacaccaaatggtctagatccaaaccagatccatggaggaggggggaggctgcacggcgcgtggagattgatagagcgacgacgagctcgggccagtcgaatagttgagtgaggagacacaacggtggaggcagaggcggctcatgagcttgaatctggtcttcctcttccccatcgatcctgcggtgagcctctctgaagacctccaaatccctttcctccttagcagtcaaggctggagctgctgctgttctcttaattgccaagagaaatgctccgagaactgagttgttgtggctgctgcattgtactctcgatgattttgtatctttagttccttagagcatcaccaacaatatctgtatatggttatcctgaaatttggagattttcgttcaaaaacccagtccaacagaatccctagccaagcgcccaatagttcaaaaaccgaatttttcgttctccacaagtagggagaggcgctcgctcccaatctccctctctcgtgccgtcgtgcgaattcccacgcgcacgtgaagtgttctcgacagggggttcatcacgaggttgttcgccgtcgcatcgaggtgtcctacaggtgcccacatctcacgcgcgcgccgctgcctagagctttctcggcgtcgatagttcctgctctggcggcggcagcggcaccatctccactacagccaggcgaacttccatcggcccgagttggtttctcctcaaatcgggattggtctctcgatgatggaatgagcgaaggtatctgctagtgcttgctagttttggcgctgctaatctgctactacgaattctacagttggtactgaataatgttgttggtgccggtggtggtgttgaaagttgatgttggtgttgctgatgatgtgctgtcgttgatgctactgacctgctgctagttgtgatctgctgcttgttgcttgccatgctattgctaattgccatgctgttgccgatctgaatttttttttgaacgacgtttgctgatctgagttgacgctactgatctgctattgttgaaaatggtacgatgttgttggttctggttggtaattagggactttgctgatgctgctacttgtagtggttctgcttgattgtttgcaggatcagatttgctgacgtgctactgcgtggagaggggtgacagggaggtgaccaccaagtggttcccgcgatcaatggtcacacgggcgagcgtgataatctcacaggagggagagcctgaaacagatttcagttggtagttttgtagagggaccactttttagatttagggagtcaattttagccaatctcttggagggctcaatattttaacaccttaaattttatttaagattcccataaacaaaattttgggatactcttggtgatgctcttactgagttattctagtacagtactgaattttaacacc

SEQ ID NO: 9274 - DNA, 1672 bp, Oryza sativa
  ref <308>: DATABASE ACCESSION NUMBER: AK106622
  ref <309>: DATABASE ENTRY DATE: 2002-08-28
catcaatgacaggaggaacaacctcagaggctggtacaagatcctgctccaattggcgaatgcagcgctgcgcaagtatgcccagcaaactggggaagaatatgagcttcataccatctatggtgaaaccttcctcaaggatcgcaacgagcgtgctgagtatatccacatcaatttcatggcttctccctccagctgccagtgcctgcaagcttctccagtctgcttctttgctgaagttcttcgtccaccacgctttaagtatcatgaagccgacatcactttgtgctgcatagtgcgaccgtcgccaaatgatgccgatagttgccatggttgtcttatcgagaaccacagaattgatcacccggaagctggcatgcgtttttgtgggaagaagcatagcaagatggatccaaatggctatggccatggctgggattggccaagcatagctgacgtcgaatacaggttttttgatcctgacaaggacgtcggacttgttgagtacttggatggagttataaccgatatcaaagcacgtatcagagacctatctatcagggatgaagacgacagtgacgaggacagtagcgatgatgatatctccggctattccatgagatttgtctgatgttgtgatgctctaacttgcagtactattcttcacctacaactttctcgaacagttatttacttacgtataaatgtttgaaactacagagctagcttaacgttggtgttattattctgaaatattctgtggcaagtatgacataatgcacgattggtagttttggttgtttagtgtaacttttgcaaatcgtatgttggcaaacgagacccaagattcggaggctgaagccccgcgtttcgggcggctgccgaggcggctcaacacccaaaacctgctgccatggcgcacttcttggccaccgtggagcgcgacgcggtgtcggtggtcgccggcaacagcgtgctctcctcggccaacattgcgcgcctctccgccatgctggcaccttcgccgctaccggatgatccgccgcagcctcctctccgggagcggagaccaaagatcatcagaatcatcaatgacaggaggaacaacatcaggagatgctacaagggcttgcttgagatggcagatgccgcgctgcgcaagtatgcacaccaaaccggggaacaatatgaacttcacaccatctatggcgagaccttccgtaaggattatgaggagttccatgtgtatgtccatatgaacttcatggcttcttcgtctagctacaaggccctgcaggctcctcaacctgtctgcttctttgctgaagcgcttcgcccgcctcgccctggctatcatgaagacgacatcaccttgtgttccattgtgcaaccatcaccaactgacatcgatagttgccatggttctcttgcaaataaccacagaattgatcatccggaggctggcatgcacttcgttgggaagcacaacaagatggatggaagtgactatgactgggattggccacacacagctgatgtctattacaggttttttgatcctgacagggatgttggccttgtggagcacttgtataaagttataacccgttttagtgccctgtatggcggatccacggatgaagatgacaatgaagatatcactcgttaatcc

SEQ ID NO: 9275 - DNA, 678 bp, Oryza sativa
  ref <308>: DATABASE ACCESSION NUMBER: AK106623
  ref <309>: DATABASE ENTRY DATE: 2002-08-28
acctgcgaatcctctagtcctcgcgagtcgcgacacgcggagctttggcacctgcagcgatggcgaccgaccaccgccgcttccccgtcttcctcgccgcggcgctgctcaccctcctcctcctcccggcctccgccgcggccaccgacgtcgagtactgcaggcaggggcgggattatcctgtgaaggtgagcggagtagagatcgtccctgaccccgtcgtcagcgggcagccggccaccttcaagatctccgcatccacggataaaagcatcactaaggggaagctcgtgatagatgtcaagtacttctttttccatgtccattcagaaagtcacaacctttgtgaggagacctcttgcccagtaactggtgaattcgtgcttgcgcaggaacagactttaccatcaatcaccccaccaggttcttacactctcaccatgaggctactagatgacggcaacaaggaactgacctgcatctcgtttgggttcagcatcgggttcatttcacctcttgctctcatctaaattcagctggagtcacagcaatgtacttgcagaactcccatagtcctaccacaacatgttccactaaagccggtttaatctccctgagttgaacatcttactacttctggtgttatgcaataactatagtcaattgccgcttatgttc

SEQ ID NO: 9276 - DNA, 2706 bp, Oryza sativa
  ref <308>: DATABASE ACCESSION NUMBER: AK106624
  ref <309>: DATABASE ENTRY DATE: 2002-08-28
ctcgccggagcaggagccgatctacgacctacctcaactcgccgacgagctcctcgaggagatcttcctccgcatcgcctcgcccgccgacctcgcacgggcctccgccgcctcgtcaccggccgctccttcctccgccgctaccgctccctccacaagccggctcccctcctgggactactcggccacgacggcttccaccccgccgagccgccctacccctccgccgccgccgccgcccgagccctcgctcaggccgccgacttcaccttctcgttcctcccgtccccctgccgctggattcaacaggattgccgggatggccgcgtcctcctcgaacgcagcctatccgacaacgacgacgccggtgaaggggaactcgtcccgttcgacaccaggaacatggcggatctcgccgtctgtgaccccgtatccaggcgttacgtcatcctccccccaatccccgacgacctgatcacctccggtgagcaggagggcctcctcgttttcgagaccttcctcgctcccgccgccaaggaggaggaggagatggtgggcacgacgtcattcagagtggtggcgagggcgaactacgaaagcaaggtggtcatcttcgtcttctcttcactcaccgaggaatggcacagctccagatctgtcagttggtctctcttgaccgccgatccctggttgtcgtcgacagctcaggcgcatctatggtttttcccgcgttactacgcgcacttcgtctactgggtgatgcatctggtggatatgttgctcgtgcttgacacatccaagatggcgttcttcaccatcaacttccagtgggatcgagactttgctattctggagacagaggaagacatgattggagcattctgcctgaagggagacttatccggaagaactcacctctgttatgggactaggcgaatcgatgctgattttgccgatagtccaccgttgaacttagacaagacaatccccttgcccttgcccttggatcattgctatcacattataaatgcaacccaggatacttgctcttgcaagggcggcgactacactcgtccagacgcactacggaggaggatgatacagatatgctatatttcacattggagcccaaaacaatgcttctcgagaaggtttgcggaatgagtagaccaaatgtcactgcaaagatatataccagtttcccaccatccttgtcactgccaagtctgaatactgaatatggtaagctttttattatagcatcagtaacatcttgccaagtctggccttggggatcggctcttgtgatgtggattcaatgttgataaagtgtttaccttcctggttgttcccggattgctggtttttgctgtgccaaaatgacctcatatgtgcttgtgcattcttaaccattgtcaccattttgattgtatattgtttgacaatttcctagagttgcaggctcaccgaaactattatctgttgtttgaaaggttttttaaattgaagaaataagaaatgtgatcattgaaacttcagaaagcacatttaactcttatctaaggctctgagctacatgcaattttttccccgttttatagtcgttctgacataaatggaacctattcgtgcagtgtggttactctgggcatatccaaattagctcatccctagatctccacaattgccccaattcatttcttctgccccttagccatttattatagttgtgtcttcatccgagttgtttcgtggtggtgcttgaatggctagtcatacttgggagtagggaatgcagccgtgatgatttgcagtgttgctctacaaattagcagcaaacttagttttgcacaaaatggttactggtatggaacagcactggcactattagattgcagaccattgctacctacatggcagatatgtataaaaagatatgaatgtgatatatcatatgaatataatttaatgattacccatagcctcacatatatgaaccaatagtgggttcagttatactggaaccaatataactgacttttaccattttgttagcttcgatgcttcttgtcatacacaagcacaacctaggtcaaggaacaagcaatcaacaagatagaccaggaatgggaacattggacttacttttaggtctgtggctttgcttaccagatttatagtctatgtcatgttttatctgaaaatacattcaaagtgatttttttcaaaatgaattggccatcatggtttttgtatctggttttgcatgtaccatgtacacccttggtcccaaaaaaaaaaaaaaccaatcctagctagaattggttttttatgggaaggagggagtagctatcatttatagagtataatcacgttatcctccggcatgatgaatatctggtttttttctgtatgactgtatgtaggcttgtttggttcaatgagaaggagtgctcaggagccaggaaggaatatcttggtagacatgaagctacaactgacggtggtggcatctatcagtattagtttgttcaaacgttgtctagtttgtttaggtagtcctattccacttttagcccttgtgatgtatttttgtatttggttgcaagtcaagtcaggcagatcgtggcttttggagcttttcaggtttgtccaatagaatcctgtgaaattaaggtggatggaatctattaaatgtttggaacc

SEQ ID NO: 9277 - DNA, 1335 bp, Oryza sativa
  ref <308>: DATABASE ACCESSION NUMBER: AK106625
  ref <309>: DATABASE ENTRY DATE: 2002-08-28
tttttcggatagtttttttttctcgccggcgacagtgagcgcccttcttctctcgtcgcccgtgcagcggaggtcgcccgcgccgccgcaagttccttccaggcggggaggtaacatgctacacaacaccgcccccaaaacattttcccctgttggatggcgacttgggcgctccatcgactactggatggcaccatgcggttgaggctgcgacaccccccacccccacacccccccgccctgtggcaccgtcggctgcccctttgtcgccgacatccatcccatcgccggatctaggagagcttcgcccgaattctcttctgattcttgcgtgtcggtggtgggtggagagcagcggtaccaacgacatttgaagcacagagggtggcaggattcggagaggaggctgcggatcaggggtccgatgggtcgttctccctcctccctaaagcggtggcgaaggatgtcagtaaattgttgttggcgttgtgcgcggcaggtcagcgccgccaaggaatacaggaggtccgtgtagcggctgtagtcaattgaaatctatttcaggtacagctcgttagttcctatcaactaaggctgtgtttagatccaaagtttggatccaaacttcagtcctttttcatcacatcaacctgtcatacacacaacttttcaatcacatcatctccaatttcaaccaaaatccagcctaagtagtagcgttatatggtatcagtagtttttttatcagcctgtattggattgcaccgtcgttttgattttggatgagctatgtgcctgtgttggctgtggggatgcggttttgttaagattgggtagtaacaactgattaatgcctgccgacggaagggcatgcatttcaattggcagccaacgggatgaagttaatatatgtcaggagcacaatgtaacccggtggactcgaagatgatgaaatgcatcatgcggtgacctgggaaacattgtcgctagcgccggagcggccatgcttgatcctgggctgcccatcctgattcctaatgctaccgccacacagtcctgttctacgctggttggttggcgagccagccgcctccactacaacattcgtccatcaaagatggatcccgcggtgaagaggaggatatgctgatctgaatttctttgatgatttttgttggagtgtttatatcctttgtaacttttttacttttgagtttaagcatatcatttgtttattgtatagtgtgtctgaatgtaacagaacccgtgtgtaaaagaaaatattgtcaatagaggctacaatgttaactggtagcttggttttctgatgaatac

SEQ ID NO: 9278 - DNA, 1758 bp, Oryza sativa
  ref <308>: DATABASE ACCESSION NUMBER: AK106626
  ref <309>: DATABASE ENTRY DATE: 2002-08-28
gatctcgcttcccgtcgtgccgcccctctcctcccgacttctctccccgatggcggcgcttccccacgtccggcgacaagcagccagctgcagatgcgccatctctgctccatcggccatactctcctcggcatcggcaacggcggcggtcgggcggcgccaagcttcagctcgggccagatcaacggcgccctcgccgccgggcctccatggagagcaggtaggcctcgtctctactcctaacttggtctgcgcgacgcgctgaatccatcccgcaattagttttgtcccacctcgctcattttgcgacagagcgacctctttttaaactctgattgattctattgtgttgcctccccggagacacccacaccgactagatacagcggtaagatccccactgtggccacggtttggcggacaccttctgctgtaaaaaaataaaaatggagcagtcataaggccccctcccgttacggggcacggcaggcgcctaccggttaggctgcatccatcatacacgttaagatgtcaaatacggcatacatacagtcgggtctctcggtggagacagcgctagacattagcgctttgccttttttgaaattttgtatcatcaaattattatttttctgttgattaatcacgatagcagcaatggaggcctgcatttgaaccccctctgcgtttcaattccaatttcctttgcatttgtatttgaataccatatttaccagcttaaattatctatggtatagactacggaatgtgtatagcaaactggaaaaattagagatgtggcgatagaggagagcctatcatcagcaggtatgcaaagaatttcctgtgaaacgaagtactgaaatactcttagcagaggtgattttttttaagccagagatgtgaatgatttgttcacgctgcaagacaatggaaataatgattgaagtgaaacatcaatcaaatattttcagccaattgtctgaagatgtcaataccgggattccaaataaagcaataagatcggctatgcgctgctttggctgctccgacaacctctgagactgagctgagctcatccaagcatggacgaagtatccaacattttgaagtcctttttgtgctcaaggcattcatttttctcagagtgcaatcaatcatgaggacataatgcatgctaatgattaccagaagctgcgcctagaagaagcagaagcttcacaggcgtcataaagggaagctgaagctttaaggttttatgcctatcatggatacttgggagttgcaacaatttttctgttgctacatggactggatcattggacgagctggtgcagtggtgctgttggagcaccattctgttttcaggtgggtgctctaaatggcaaagcatgttccctgctgaactgttttaagacctcctactaggaagatactagttcattttgaagtcctaatccgccaatctacaccttcatacgactgcatggtggttcagtcagctcaatgagcataactgaacatttcaagaagttttttttaagaacaagaaccacattccgtccatggatatgctgctgtttgagaacctgttggcaacgttgcaaggatgtgcaaatgaggtgctgaaacctgactaccacaaattttagctgtagctggtcggagcaaagtaatgtctaggtgtaacgcactgtaaatttgatagatgagacgcgtccctaaataatatcctttttaagtctttgggtttggctt

SEQ ID NO: 9279 - DNA, 1682 bp, Oryza sativa
  ref <308>: DATABASE ACCESSION NUMBER: AK106627
  ref <309>: DATABASE ENTRY DATE: 2002-08-28
gaaaaaaaaaaaaaaaattctccccttcccccctttgctgcgatgatgctcgccggctatggcatcctcgccgttgtcctcgtcctcctgccgccgtcggccacgccggctgggatcgctgactgcgacctcggcgtcggcaacacgtacgtgggcaacagcacgttcgaggcgaacctgaaccacctcgccgcggagctccccggcaacgtctccacggcgcataccggcggcttcgcggtcgccaccgtcggcgcggatcccgaccaggtgttcgcgctggcgctctgccgcggcgacgtgaacgccacagcctgccgcgcgtgcgtcgcggcggcgttcgtcgacgggaagaatgcttgccccggcatcaatggcgtcaccgtgtacgaggacgcctgcgtagttcgcttctccggccagaggttcatggatttcctcagtccggatcagtggcaggtcaccgagatgatttgggttcccgagcaagcctcggagagcgtcaatgcgccggcggttggctggttcaacgccgccatcgcgaagatcctcgccgccctggtcgaccacgccgtggccacggcgacgggcaacaactcgaccaccaagaagtatttcgccacgggtgaggaggacgtcgaccccaacatctacgggttcgcgcagtgcgtgccggacctgacgcaggagcagtgcaaggaatgcctcaacaccttcctttttcaagcaaaacaagtgtactttggcaagagccttagctgggttggtatgaattcggtgtggtgcagactgatgtatagtgtgcggccgttctacggaggccgggcgatgctgcagctgtcggcgccaccaccaccagcagccgaggctccggttctatctctagagcctggagcagggaagaaaaagagtgcagctggaatcgctgccgtcgtcgcttcttcagttgtggtattgttgatcctttcattttttgcagttgttctcttcaggagaaggtccaaggttactgagactgaccaccagttgaggaagataacaagagcacaatgcttgatttttgacctgccagctctgcaagaggcaacggataacttctcggacaataataagctcggagaaggtggttatggtattgtatacaagggagtactctcagatggacaagaagtagcagtgaagaaacttttgggaacaagtgagcatggattggatcagctacaaaatgaggtgttgttattggcagagcttcaacacaagaaccttgttaagctacaagggttttgcttgcatcagggggaaacactgcttgtttatgaatacgtcaagaacgggagcctggataactttctattcgataccagtaggggaaacacaccaaactgggagcaactgtacaacatcatttttggaattgccaagggaatattgtatcttcacgaggactcaagcttgaggatcattcaccgagacctgaaatcaaacaacatcctacttggggaggacatggaaccaaaaattgcagattttggattggcaaggctactagaagaaggccatactaatactcggacaactagaattgttggaacattgtaagctcatgtgcataataaaaccttcactcatagagatattgaatgtgcaagcctaatgcttatcctctgcagcggttatatggc

SEQ ID NO: 9280 - DNA, 1813 bp, Oryza sativa
  ref <308>: DATABASE ACCESSION NUMBER: AK106628
  ref <309>: DATABASE ENTRY DATE: 2002-08-28
ttcggatcaatacttgttctactatatcatattgttagccgattggtttctactggattatattgctatattatatcatcatcatgccgattgcctttatatcattatctacatttgacatatggccgattgcttaaaccctatcgctatcggctggtatcgacatcggctattatcggctatcggctggaactactccatcggcttatcagccgattggctgttttgatctactatttgcatatcttgtcagttgcaggatcaaactgactggcacgcccgcatttcatcaatctttggacctgcacaggagttaagcagatttcctaggccggtgtgttcgattttttttttcgtcgacagtatccagcctttttccttacttgtgcttctcctttttctgtgcgtgtgtttcagatactgacaaggggagagggaggccaacagcatcgaccaggaggcgtctgctagcagtagcgaggatgctgctaatgaggacaagccagctgaacaaggtgtcagcgggaccatcgacaggatcgtgaccttcatcggcgacaggggtagcaacctgaacaacctgggggagatgctcaagcagtgggaaggaacctgcaaccgctacggaacctttcttccccacatcggacaagtccagttctctgagaggaatggacccgtgccagtggtcatcgacaggaccaccaccgtctcccgcggggtgggctgcacgctcctccacctcggcatggccctgggcagcggcggcgaggtagtacggcgcgtgggggtggcatgcactgcggccagtatgctcaacgacacgcctggtctcttggcgctcctggatgcacgcagccaggagcaacctctcaagatcctcctcaagtcagtggaggacgccaaggacttcatcagcaactggaagatcaacaaggacgtcgtcgaggtggacgtttgtccagccctgacccttgacgaggtcggcgcaatccgcaggctattccaggtcgagaaagctgacaagttcttgacaggagatgtcgtcaaggtgaagctagggcagtacgaggccatacaagctgccagaaatttgcctgagctgcctgtatccgccgtatgtgctatactggctgcggctgagaaaggaaaaaacaagggcgcagctgatgttggcgcccaaggccaacagaagccttctgcctagttcgtcggtacgcatgtctgttcatcatctacaggatattgcgctgtgctggctggcttcaccatgtgctctcccaaatgccgactcagtttgtttctagaaggaaggatgtgacctgcccggcgagatggtgattaccagtactttgcttcagcactgaaccagtcgaagctcgtcagggaccttgaagtttgtttgtgctcatgacggttgaaagacatgagggagagcgggaaagacagcagcgagtggatgtcctgtagatggtgaaggacacacccccacccccaccctcatttctgtaccttgctgtctgaatgcttctggtgctgcagagtctgttaggcaaagtcttttttgagttaaaccttttgaatctaatcgatgccagaacttttgaatctccaatctatttcaccttaagcttagcttttttcattgacagcctgttagagtttttcttgtaacagatttatctgttatgttgctcttctcaacttggtattctaaagtgagcataggcatcaatagtaagtaatcctgtgaaaaaccgttgtaatatgttgctctacaaaacgatgatatatgatgatatacccgttctgt

SEQ ID NO: 9281 - DNA, 1780 bp, Oryza sativa
  ref <308>: DATABASE ACCESSION NUMBER: AK106629
  ref <309>: DATABASE ENTRY DATE: 2002-08-28
atactttagccattccacatcagtccgtgccgctctctgcccattctcttctccacggcaaaccaccaccggcgtcaccagcccaccaccggtctccaccgccacccttttctccgaatcccgacatggagaggcctccgcgcaggccctccgccgcgcgcccgcgcccgcgctccctccagcgagccgccgcggcgctcttcctcgccatcttcgtcgcgctgcccttcgccgtgctgtaccgtggccccgtgtcgcggtcgctgcacgactcgtgggagtgggacccgctgccctcgctcgacgcatccgaggaggacggcgccgcccgggatgatgatctggacagtcaagatctgaaactcgagcaagtcctgcagaaagcctcaatgggagataacacggttatattgaccactcttaattctgcatgggcttctcctggctcggtgatagacctattcattgacagttttcgatctggtgttagaacaagttcacttataaaccatcttgtcattatagcatttgattggaatgcttacaagcaatgtctcaagatccatccttattgctttgctctcggaactgatggtgtggatttctctgaggagaagaggttcttgacttctgggtatctggagatgatgtggaaaaggatagatttcttgcggctggtcctggaaagtggttttagcttcatattctcggatgcagatatcatgtggtttcgcagtccgtttccttatttttatcctgatggcgattttcagattgcttgtgaccactattttgggaatgcaactgatctgagaaacattgctaatggaggcttcaactacgtgaaatcaaatgaacgaagcatagagttttacagtttctggtattcctcacgattgagatatcctggccttcatgatcaggatgtatttaatgtcatcaagcacgacccttatgtttcagatattggactgaaaattaagtttttgagtacttcatactttggtggattttgtgaaccaagcagagatctaaacaaagtttgcaccatgcacgctaactgttgcattggactgcaaagcaaggtacatgatctaagagttatgatggaagattggaggagttatttgtccttacctccaagcttgaaaagattgagtgcattggcatggagggtgccgcaaaattgcagcctttcttggtcacaccaataaaacgtccttatggacagcaaaaagaaatgaaaatggtgaagcccgccgaaagcgctctgccttccccccgaaagaaccttcagctaaacatctaaacagtgtgacgagattctgattgaaaggtcgcggtaagttttgccaaacacttcggagatccttgacaatatagagcggagttgccggaccgctctggaaaaatacactacaaggatggagcggccttagcactgctcctcagctccgctggctgtaccgaacgggccttcagacttcagtgacaaccagcttcatttggctacgagaaaaggagtgcctgcttcttcaaggaaaactgaagcaattacaccgtcttgaaaagcaagactgctgcaatggatctgtcaagagtaaaatggaaaaaaaagaatgtatatcctggttgatttcataggtaagtttgaaaactggatgctcttttttttcctgtgttagaacaattttgttagatggatagatgtatgaaatatgaaaaaaatgaatggcctagtctcgcgattttcaaatatgaattcaagttcagctgtgtt

SEQ ID NO: 9282 - DNA, 2020 bp, Oryza sativa
  ref <308>: DATABASE ACCESSION NUMBER: AK106630
  ref <309>: DATABASE ENTRY DATE: 2002-08-28
atcgagctaaaagctctttctcttctctctctcagccatgaccggctattgccgccaccgcccaatctccctcaccagagctccactaaccaaatcctcgcgccattagcttcgcctcgacgagttgattccatttttcccccttcccctctccctccaccttgaaataaaccaccacagccacttcttttatcgccggagttgagctcctgccgtcgccgttccggcctcctcctttgtttccttcgctagccgacagcttctccggatgcgcgtcgctcgggaacacgtttcgccgccgacgtcgccgccttccggccaccggagagccgacgccccgcttaccctctcctctctcttctctcggctcactgtgaggcagagaaaagaagagacggaagaagaagaagcaaaagaaaaaggaagctgacaggtcttgaggattcttctgacacactagataatatcattcaatctcaggacatcgagcaaggcaagttactatacaccttttgatcatttaagcctatattttacaaattatttatttatagccttctattcaatattctattttctatatgcataaatcaatcatagaaacccagacaatttagtattgcttattttgcttacaatctgcttaaaatacctcatacttagattgagacaatacgtaagatttggttgatttccgggtggctagtattgtctcaatcgatataagttttaccaggtacttatgtcgaacgaacgggtacgaccgcagtttctagaatggggacagacctagttattatgttaattagcaatatggcacctctgtatggtggttcttatttttaagtgcgctcctcgcgcaggaggcaactatagccgcgaagggcaaatttaaccattaccatgtacaggtgaatggtttgtgatactcgagtataaattatatggtatatttctaaaccctgatcgagatgacgtggtgtcatacgatcagttccccttaaatacctcgggaatgccagaacttctctcgctgctgttaacattacgttcagagcatatgaggatataagttcatggaacaggtgggccatgactaaagccgatgattatcagcaagtcgtggactgcgggtaaagcgtacatctgctgccgtagaatatctttgaaactattcgaatagccgtactcatggagttgagtaccgggactcatatggtaccctggttagaaatctaaagtttatatgttttataaattctactataacttttccagattgtccaatactgctttttgcaaagaaccctattatatgtcaatgcataacatatttccgtgataacttgctgagtattgcgaatactcacccttgctcttattaacccttttttagatttgggtcaagaggaggacccctgtgattattattacgatgactctgataacttagaaaattcctagaggttatacctttctagtcagaatgtactagaacttccgttgtgtaatattagcacctatgtaggtgagtacctacccttgtaaaacctctagtattgtaaactttaacgtatgcaatgaagaaccagctgtattacatgtatcaatatttactgatccagggattgatacattaattttagtcggatccaagttattagttttaggacccgacatttagcaagagcggaaccaacttataaagacttgttcctctaatcatgtcactcctgggttaacccttttacacgaaacaaggataaaagagtaagagaggtggtatgtgtaaatgggctcgcctatcgaatggggagtaagagaggtggtatgtataagtgggctcgcccgtcggatgaccattgaaccaagatttgaggaacaatgttgttatcctttctatgactccactgttgttgacgaaaaatccgcgtccagtcgattcttccaaatgaaaatgaatcttatatacaagtttttatgttgtgtaaagaggccacataaaaattttcaatttttt

SEQ ID NO: 9283 - DNA, 1087 bp, Oryza sativa
  ref <308>: DATABASE ACCESSION NUMBER: AK106631
  ref <309>: DATABASE ENTRY DATE: 2002-08-28
ccccccgaccgcgcgcctcttgccattgctacaccatgcacatcttccgcctcctggcggcgcggcgccgcgccgtgtcgaccatcacggctgctgctgccgctgcgccggcggcgtcgtccgacgccggccgggacagcgaggacgagggcccattcttcgacctcgacttctcctccgtccggggggcctccagctccggcagcatgtccggctccgacgactccgacgacgactgcacggacctcgacttcatcatctccctccaccgcagccgctccgcctcgccctcctacgacacgctcttctttgccgccgccgcgtcggagcccagcaccaaggccagcttccagccgtcgcatcacttctgcgctaaacgccgcggcggcggcggcctccggacgctgagcttcggcgccaagaaggccgcgttctacggcggccgccacagcttcgcccggagctcatgcagcgcgcggtctctacgtctgttcatggagtctctgcaccgagcgtccgtgtcagagtgcgactcgtcgctgtcacggtcaagaagtgacccaggaaaacgcgaagctgatcagagttgccattagcttactactaatcctgatggttaccaagactaacgaacgacccatcacaagtctcaatgaaattgtggtcaacggccgaagcttccacctaaatttcagaaaagacggagaagaattcaaagcactagtacaaattattgaagtttgatgaaaatgcggcgcttgaggttgctaaagatttctcatctcttttgttttatgggtgtgggtgagtgtgtgtgtttcacgtccttaattttagtttaaggctttaacccttggtgaatgtttattttttttcctttttctttgttaggagagtgggaaaagtgctctttttaggcttctttatccctcatctagtgtagaagcgtggattgttttgtgtgctcgcgctctttccgtggttttttttctctctcgtctttctagtttgcttttgtacaagtgactcgcaacacgacatgtaattacgtacattcttgccatttgactggctagttctggctttc

SEQ ID NO: 9284 - DNA, 1722 bp, Oryza sativa
  ref <308>: DATABASE ACCESSION NUMBER: AK106632
  ref <309>: DATABASE ENTRY DATE: 2002-08-28
acgcaacacaagctagctcgctccaagcatggcgaccgttgagtcatcgacggcgccgggcgtcgccgtcgccgccgcggtggttctggtggtcttgacgtggctgtggacggcgcggtgcagctggtgtggaggccgtacgccgtggcgagggcgttcggtcggcagcggatccgcgggccggcgtaccggctcttcgtcggcagcgacggcgaggcgaacgcgatgcgcgccgcgacgcgcggcgacgtgctcgaccggcgctgccacgacatcgtcccgcgcgtgatgccgcactaccgcgcgtggatgtcgcgctacggcaaggtgttcgtctcgtggagcggcgccacgcccgcgctctgcgtcggcgactacgccatggtgaagcagatcctgtccgaccggacggggctgtacggcaagccggagcccgagccgagcatcctggcgctgatcggcaacggcctcatcttcatcggcggcgacgactgggcgcgccaccgtcgcgtcgtgcacccggcgttcgccatggacaagctcaagatgatggccaagacgatggcggattgcgcgcgggaggtgatccgggagtgggaggcgcgtgccacggccgacggcgagcggcgggtgcaggtggaggtcggggggcagctccaggagctgaccgccgacgtgatctcgcacacggcgttcggcagcagctacagggaagggaaggaggtgttcgtcgcgcagcgcgagctccagtccatcgccttctccgccatcaacagcacccgcttcccgggcagccagtacatcccgacgaagacgaacctgcgccggcgacatctcgccaagaaggtgagaggcacgctcatggcgatcatacgcgagcgccaggccgccgccgccaaggaggacagcggacacggcaacgacctcctcggcctgatgctcgaggccaacgcgacggacgcctgcggtagcggcggcgagaagagcatgaccatggacgagatcgtcgacgagtgcaagaccttcttcttcgccggccacgacaccacctcgcacctccttacctgggccatgttcctcctcggcacgcaccccgagtggcagcaccgcctccgcgaggaggtcctccgtgaatgcggcggcggcggcgacacggaggcgctccccaacggcgacgctctcaacaagctcaagctgatgacgatggtgctgtacgagacgctgcggctgtacgggccggtgagcctgatggcgaggacggcgacggcggacgcggagctcggcggcgtgcgggtgcccaagggcacgatgacgatgataccgatggcgatcctgcaccgcgacgcggacgtgtggggcgcgggcgccggcgagttcgacccgctccggttccgcggcggcgtgaacaaggcggcggcgcacgccggcgcgctgctggccttctcgctggggcagaggtcgtgcatcgggcaggacttcgcgatgatggaggcgaagacgacgctggccatgatcctccggcgcttcgccttcgaggtctcaccggagtacgtgcacgcgccgctcgacttgctgacgcttcagcccaagtgcgggctcccaatggtgctcaagctcttggatcaatagaacgtgtagaacctttggtcgctaatttctcgggcattttctatgggattgtgttcgcaacatttgattgaaagacctgcctcaaaatcttgt

SEQ ID NO: 9285 - DNA, 1677 bp, Oryza sativa
  ref <308>: DATABASE ACCESSION NUMBER: AK106633
  ref <309>: DATABASE ENTRY DATE: 2002-08-28
gcagcagcccggggtggacttcgacgaggtgttcgctccggtggcaaggctggaatcagtccgcatgctgctcgctttagctacacaggccaggtggtctgtccatcacatggacgtgaagtccgcttttctcaatggggagctcactgaggaggtgtatgtcgtgcaaccgcctggcttcgtggtcgagggacatgaacatcaagtgctgaagctggacaaggcactctatggacttctccaagcaccccgagcgtggaatgccaagctggacgcaagcaaatgtcacttggttttaggcgctgtgactttgagcacgccgtgtatgctcgaggtgagggaacacaccgcttgcttgttggtgtttatgtggatgatcttatcattacaggaagtgatgctgtggagattgatcgattcaaggcggagatgaagtcccttttcaggatgagcgatcttggtctcctctgcttctacctggggattgaggtcgaacaggtggcgggcagcacacggatgactcagtcggccttcgcgcgtcgtattttggagaaggcagggatgcaggactgcaatgcctgtgcgacgccaatggagcagcggctcaagctcagcaatcacagtgatgcaccaccagtggattctactggctatcgcagcatcgtcggaagtttgcggtacttggttcacacaagatcggacatcgcgttcgcggtgggttatgtcagtcgcttcatggaggcacccactgccgagcatgaggcagcggtgaagcggatactgagatacattgctggcacaattgattacgggatcatctaccagagatcggagacgccggctactctagttgggttttttgatgcagatatggccggtgacgtggatacgcgcaaaagcacgagcggtgtcatgttcttccttggatccaatccggtgagttggcaatcccagaagcaaaaggttgtcgctctttcatcttgcgaggcagagtatattgcggcgaggacagcagcatgtcagggcgtctggatggcgcagttgctgggagaaattaaccaagctcagccagatgttttcaagttgatggttgacaacaagtcggcgattgcattgagcaaaaatccggtgtttcatgactgcagcaaacacatagctactcggtatcattatatccgggagtgtgtggaagaagggcgagttcagttggaattcactgggactgcagatcaagtcgctgatatactgacgaagtcccttggtcgagtgcggtttgaggagctacgctcgcggatcggggtttcggaagtaagtcgcgggcacaaggtttagggggagatttgttgcatattacgttaaccttgtgcctgcaaaagctgttttatttagttaggatagtttcctttcatgcacgttatgtgtttgttttttattccctgtttttctgggctcgctctagtcagagttgagcgcgtctataggcctgaggcctgcgagttcacgtcgaggcggtaatgtgagagtctctcgctgcacgatctgacgagtgggatggcgctcgtaatccggatggtggagcgagtaatccggccaatttgttaggccgtagtgtgcattttcccttcaataaaaggaagaagaaaacatgaaaacggtgcggcaagatttaagcaccac

SEQ ID NO: 9286 - DNA, 1724 bp, Oryza sativa
  ref <308>: DATABASE ACCESSION NUMBER: AK106634
  ref <309>: DATABASE ENTRY DATE: 2002-08-28
atgatatcaccatgtccgcgtcgccgttgcgacgacggcgagcaccatctccagctttccagctgctcctcgacgccacgcagccgcagatgccctcagctctgatgatttctacgctggcgagcctgagaaaaaccagtggcagatgcgctcaccatgggcaaggccggtgacgccgagcaagcggtgcacagcactgcgccggcggccggccacggctccgccgtccgccggtacgccgccacgattggcggggctgtcgatgccaagtgtgtccttgtgctgttcctctccatcggcgtcttcgtgctggtcctcttcatgcttcttcctctccatgaccatgcatcagaaaccatccctgatgatgaccctggggtacttcctggtgaaattcaggctagcttcttcttgttaaagaaacgtcaacagctcattccacatgtcagaaggctacaaaaggacatatacagagaaatagggatccccaatactacggtttcggtttctatgcatacatccaaatataaggattccacttatgtaaaatttggtattctaccgaacccaagaaattcctccataagtgcacaatccattattgccctgagaaaaaacttgatacaacttacgcttgagcagtcgaatttatctttgacatcatctgtctttggagatccacattgcttggagatcttggggttcccaggagggatcacggtgcctccaccacctgatggcaatatatgcccaacagctcttttcaatgtcacactcaacatgactatacaacaactaagggtgcacctcaaggagctagagagtgagcttagaattatattgcagctgacaccatatgaggacttaattgtagagataacaaatgaaaatggttcgacgatcaacctgcccgttacagtccacattttaattgccccaaactatcctagcaattatctagaaacctacagactgaaacaactagcccaaatcatcattaaattaattccaaaaaaccttgacctaaacccaatatttggcatgattgagaatttgtggctgtcaccatgtctacaaagttatattccatcatgtgctcctaatccagctccagctccagcaccatcactatccccatccaatcctgaacatccacagccaactaccaccaagccttatggaagtttttcatgcccggctttggaaagaagaaaaactgtctctgtacatcgcaggttatcgacgatatctcccatgatggtaccaccagaaataccgacgaggtttgatagttggagtgtacacactgacaggaaaaatcgctctccacttgcaaaaccaatgtcccttgtgccagcatccccatcaaaataattgattctacacttgttccttcaatgtgattttgtcagttacatccaaggttgcatgaagtgcttctgagcgaaagtcctacactaatgcagagtaatgctcaagaaatcttaaccaagtgtatatatgaaatggttaagttctctttttgaccaaaaacactgtaggggaaatggttaagttctttagcagtaagatggaaaacctccagctacgggtggttaaccataagtttctttaatgcgttcagagatttttcatccaaacagcttgtgcatttgcatgagttatatagattgctcttgtcccaaagaaccattctgtgagtatatgggtaacatcttgtgctc

SEQ ID NO: 9287 - DNA, 1983 bp, Oryza sativa
  ref <308>: DATABASE ACCESSION NUMBER: AK106635
  ref <309>: DATABASE ENTRY DATE: 2002-08-28
tctgagaattatttttctggtgaatttccaaggttcctgtgccaaaacaacaaattgcagttcttgttggctttggacaacaacttctcgggtgaattccccagctcctactcttcttgcaaaacacttcagaggtttagaataagtcaaaatcagttcactgggagaattcacagtggcatatggggattgcctaatgctgtgatcatcgatgttgccaacaataaatttgttggcggcatatcctctgatataggcatttcggcttctctgaaccaactgtatgttcataataacgtcttctctggtgaacttccaatggagttggggaagctttccctgcttcagaagcttgttgctttcaacaatagattctctggccaaatccctgcacagattggaagtttgaagcagctgtcattcctgcacctggaacaaaatgctctggaaggatcgataccacctgatattggtatgtgcaacagcctagttgatctgaaccttgcagacaattctttgactggcaccattccagacacactagcatctctattcactctgaattcactcaacctatctcacaacatgatctctggtgaaatccctgaaggattgcaatatctgaagcttagttatgttgatttctcccacaacaatttatctggaccagtccctccagctctcctgatgatagctggagatgatgcattctctgaaaacgacggcctttgtattgctggagtttcagaaggttggaggcaaaatgccaccaatttaagatactgcccgtggaacgacaaccatcagaacttctcgcagagaaggctatttgtcgtgctgataatagtgacatctctggtggttctgctatctgggttggcatgcctgagatatgaaaattacaagcttgagcagttccacagcaagggagacatcgagagcggcgacgacagtgactcaaagtgggttcttgagtccttccacccccctgagcttgatcctgaggagatttgcaacttggatgtggacaatctgattggctgtggaggcactggcaaagtttataggcttgaattgagcaaagggaggggtgttgtggccgtgaagcaactatggaagcgtgatgatgcaaaggtcatgagaactgagatcaacacacttgggaaaatacgccaccggaacatcctgaaactccatgcattcttgaccggtggggaatcaaactttctggtgtatgagtatgtggtaaatggcaatctctacgatgcaatccgccgtgagttcaaggctgggcagccggagctggactgggagaagcggtaccggattgcggttggaaccgcaaagggcatcatgtatcttcaccatgattgctccccggccataatccaccgtgacataaaatccaccaatatactgctggatgaggagtatgaagcgaagcttgcggatttcggcatcgccaaattggtggaaggttcaccactcagctgcttcgctggtacccatggctacatggctcctgcccttacccattcctctcaaccatctcgcggatgaattcgccatgccgctgctctcttgctcggccgccgccgccgcggcgccaccttgcgagcaggtcgaccgccgtcggcggctgtgacgcgcatcggccactccacccccttcttccccgacaggcgcccccccccttctaccaccgccgcggtgctcgagctcccacctccctcccattccctccccgcctgccgccagcaacctccccttcaaccaccgcccgccgcggccgtcgtagtcgaccgctactggccgcgccatccgccgccgccatcctccagtgcctccgatgcggacgaatttcttggcgattagccgattacatgcggtgaatgagtggagtcccaccgggaatggtcaggctcatatgaagatggtatctttagaaataactgaaaataatttattaataaacgtttaact

SEQ ID NO: 9288 - DNA, 2487 bp, Oryza sativa
  ref <308>: DATABASE ACCESSION NUMBER: AK106636
  ref <309>: DATABASE ENTRY DATE: 2002-08-28
acacaaaaccgagccgagctctgtctctgtctctcctggccatgtccggccatggccgccaccgatcgatctccatccatagagcatcccaaaccaaatccattcgccaccagccaccccgtacaccgaagaacccattttacccacttcccccttcacttcccctttgaatcgagcgtcaccggagctctctctctctctctctctctctctctccggttcatgcaattgtgctcgccgttccggcctcctctctcactcccttgtccagccaccgcactccctaggtgtgccacacccgggaacacaacccgccgccagtatcgccgccctccggccactggagcaccgacgcccctcctctccctcctgtcagtttgctcggcagaagaaggaagaggaggaagataacgggaggaaggaggaaaagaaagcctgacaggtgggcccatgaatacgtcgtgcagccgagtgccgggtggaagcgccaaacgataagcgacgttgttgatgacggcgaggacctggtacggtccatagaaacggggcctcaacttgcccttggttgcatccggcagcgacgccggcactcggtggcgaacgcgaagccatagatgcttgtcatagtagcgcttggcgtactgttgggcctgctccagacggacgcgaacgtcggcgaggaatgcgtcccgttcctccatggactgcgccacagccaccacccgcgtctcactggcgtcgtaggcgcggatagatggagggtccctgccatagacgagcttgaatggcgtcgtgcggagtgcggcgtggaaggaggtgttgtagacgtattccgcccatggcaaccagcgaagccagtggcgcggacggtcaccggtgaggcagcgaggatacatggaaatggtcttgttggccgcctccgactgtccgtccgattgggggtggaacgctgagctccggtgcaacttggtgcccgttgccgcgaagagcgctgtccagaacgccgaggggaacacggtgtcccggtcggagacgatggacgtgggtaccccatggagacggacaatgtcggtgaagaacgcgcgcaccaccgtctccgccgtgtacaggtgcgccagggcgatgaagtgggcatacttggagatcttgtccaccaccgttagtatgacggtcttgcctgcaacgcgcggtaaaccctcgacgaagtccatggcgatatcggaccacaccgccgccggcaccggaagcggaagcagcaaccccgccgggtgtaagtgctccgtcttgttgcgctggcagacaaggcagccacgaacaaagtcgctgacgaggcggcggtcatgaggcgtgtgggagtcacgccggagtcgatgcagagtcttttgatgccttcgtgtccttcgtcgtgagcggccgccacgatcgccgatagccacggtgactcgggaggcacgtagatgcggcgcttgaaggtgacgaagccgtccacgagtgcccacggcgcaccgcatgttcctgcgttgatttcatcccggagggtcaccagtgccgggtcggaggccgaggaagaacgcagctcgtggaggaggtcgaatgttggcatcgacaatgcaagaagctggccctccggtggcgcgcggcgtgacagggcgtctgccgccgcgttctgcttccctggtttgtattccacggtgaaatcaaatcccagtaatttacttacccaatggtgctgtggaatcgtggaaagccgctgatcaagcaggtatttgaggctgtaatggtccgtcttcacgagaaattggcgcccccacaaatacggtctccagtgtcgaacagcttgcactagtccgatgagctcccgttcatatgccgccagtgcttggtatcgagcggcgaccggccgactgaagtacgcgatcggcccggcgccttggtgtaggaccgcgccaaaccccgtgccagacgcgtcgcactccaccgtgaaagccgtggtgaagtctggaagggtgaggaccggagcggtggtcagtgcgagcttgagccgctggaacgcatcgtcggcggatggtgaccatgtgaacccgtccttgcggagcaattgcgtcagcggtgcggccaccgtcccaaaatcttggatgaacttgcggtagtagccggccaacccgagaaacccgcgaagatccttgggtgagtgagggcgcggccagtccacgacggcttgaattttggaggcatccatggcgacgccgtgtcgcggcacaatgtggcaagtaggcgacgctggcgtccccgaatgagcacttggagcgcttgacgaagagtttggccgcgcggagcgccatgaacacggtacggacgtgctgtagatgtgctgtccacgacgggctgtagatgagaatgtcgtcgaagaagacgaggacgaaacggcggaggaacggccggagcacatcgttcatcagggattggaacgtggttggcgcgttcgtc

SEQ ID NO: 9289 - DNA, 1837 bp, Oryza sativa
  ref <308>: DATABASE ACCESSION NUMBER: AK106637
  ref <309>: DATABASE ENTRY DATE: 2002-08-28
atcgaatcccccacatttgccttccgccggcgaggagaggaaagacggggggtcgccggcgatggcggggacgatctcccgcatccggctggagaacttcatgtgccactccagcctccacatcgagctcggccaacacgtcaacttcatcaccggccagaacggcagcgggaagagcgccgtcctgacggcgctgtgtatcgctttcggctcccgcgccaagagcacccagcgcgccgccgccctcaaggacttcatcaagaccgactgcagttatgctgcaattattgttgatatcaataaccaaggggaagacgcattcaagcctgaagtatatggagatttagttagattggaacgcaggattactgagtcaagtagttctatgtttttaaaggatcaacatggtaataaaacttgattcatcctcctgtctaatcgactgttgtccatttttacagttgcattttcttgtttaaagttgctgatattttgttttaagtcattacaatttagccgttggaccttccaatttgcatgccaaattctttctgcaatgttgttttcctttttctgtcaattagggatataagttggtcctagtcagaccaactagtctactcatcctagtactttccagaaccacttatagaagtgtgcacaaaatgaatcatacactaggtgtgaagtgtaccaaggactaagtggaatgagtcaatgtgttggcttgttttcatttcttaaccttgcatttctcatttacttagtcattctcttaagtctattgcatatttctattctatgtagtaacaagcacgattttccaatgtttaggctgttgtttctcttattcttcccttacctttcattaaaaacttaagactggtgaaccagtttgaagatggtaaataacctgcataccgtgcgtacatgagaaaattgtatatataccactctaaatagtgcaactccaagaaatgccactcagaaattcagaatgcaactgttctaatgccactgaaaaaaaagtaaaagttctattttttgccactctaagcccttaacaatatttggtatctgtactacgtattcttctccccttgttccaccacagtaactaggtccatacctctggtcaccattggtatgagcagctcctacccctgagctttggtcttgccttgtactgtttgttggggaggaaaatttgaaacagcaccgaatttctggtgatcaagctggctggagtcagggccaattgagactgcccttccagctctgttttctcaggtcaagaagggtgctctgacggtgaagcaggggctccagtgaaactgatggatgtggtctttacaggtagctccatccacaagggcttttgaagaatattttcaggtacgggatgcagtgcaggaattttcactgagtggtgatcaagatgtggtacgctggaagttggaagctcatggacacttcaaagttgacttggcttaccggctattctctacagtacatgagtgctcgtccttgggcaaattgctctgtcagactgtcacacaagggcaccatcaaaagtgcacttcttcatgtggtttgcaatcaagggtctatgcctgacggtggacaacctgctgaagagaggctggtttcatcagcactgctgacctctgtgccagtcaaaaaagcttttgactcgttctgtctgatgttgtgctgtctcgtgtggaatgaaagaaatagcggggtgcttgatgtgtgaatgcgatcctccactcaactattctcagaaataaaaaaatgaaatcatggtgtggtgtgaagcgggtttgttcaagac

SEQ ID NO: 9290 - DNA, 1687 bp, Oryza sativa
  ref <308>: DATABASE ACCESSION NUMBER: AK106638
  ref <309>: DATABASE ENTRY DATE: 2002-08-28
cagaggcctcctcgtcagtttgcccttgcccaccgctgccgcctccggctccggctccggcgatccccatccatcccgccgagcgagcagggggcgccgtcgttcgtccagctgcctccgccgcatccatcctgtgatggtgaacactgacggtgaaggtggctgtgaaggcgggggtggagatccgatgtgtgttgacgataatgctatcgtcgcagttgagacgggcgttggtgtagatcaaggaattgggtcgcagcatgacgatgctggtggcgacagggtcatggaaggacaaggggcggttactaactctggtgatgaaatggggatgagggcgtatggtgatgaagccgagactgaagaggcagcaacggttcatggcagcaaggagggcaccgaggaactactccgcaaggtagtgtacagcgaggaggcggcgtacaagctgtactgtgactatgggcaccgcatggggttcagtatccgaaaggggaagcagtcctactttactggcacgaaaaggatcaggaccaaggattacttctgctccaaggagggcctgaaggaaggggagaggcttactgatgcaaacttcaatgacccacatactaggacgaattgcaaggccatggttcgcttcagagtgaataaccacggggagtggaaggttatccggctggtctctgatcacaaccacaacttggcaagacctgaagaacgacatcttttacggtctgcaagatcacttatagcagggaggtcaagttctgtagagacgtcaaagcaagattcactctcatgctacattagtatggcaaggacacttgccatagggaatgcagatttgcagaaccttgtaagacaccttaagagcagggcaaatgaagatggtatgttctattgggatgttcaaatagaccgaggcggtcggatgactaattttttctggcgtgatggcaggagcaggattgactttgactgttttggtgatgttgttgtgtttgatgcaacttatcgcttaaacaaacataatttgatatgtgctccgtttgttggtgtgaaccaccattggcagaacaccatgtatggctgtgctctattagctgatgagtctatgtcatcttttgtgtggctatttaaatctttcttggaggcaatgggcaatcggcatcctcgctctatttttaccaatcaagatcaagttatgtcaaaggcaattgaggaagtatttccaaatacatgccatcgcatctctcgctggcacatacaaaagaatgctgcttctcgtcttggtacacttaatagttccaaagcatttaataagctgttcaccaagtgtatgcagggatgtgactcagaagctgagtttgaggaaacatgggctgggatgctcagagagtttaagttggaggataacaaatggcttaagaaactttataaactcaagcagaagtggtgtggtgctctcaacaaacacacttttgatggtggggttgaatatgagccacaatgtgacagtctgagtaacatctttaactgcattgccgagaaatttacctctccgtctacaattgttgttgttgtggacaagttgactgaagattggcgtgaaaaagagatcgatgaagacacgcggtgcagccaaaagcctcctgcttgtattataaagcacagtgatattttg

SEQ ID NO: 9291 - DNA, 2591 bp, Oryza sativa
  ref <308>: DATABASE ACCESSION NUMBER: AK106639
  ref <309>: DATABASE ENTRY DATE: 2002-08-28
acgtttggcctgaccgcggcgccgagcgtccgtccgtctgcacgccggaggagaagacacacggcgatgagctcctgcgaggcgaggcgggcgcacgcggtgctcatcccgcagccggcgcagggccacgtcacgcccatgctgcacctcgccaaggcgctgcacgccagggggttcttcgtcacctacgtcaactccgagtacaaccaccgccgcctgctccggtccagcggccctggcgcgctggccggcgccgcgggcttccgtttcgaggccgtgccggacggcatgccggagtccggcaacgacgacgtcacgcaggacatcgccgcgctctgcgtgtccaccaccaggcacagcgccgagccgttcagggagctgttggtgaggctgaacagcacgcccgggacgccgccggtgagctgcgtcatagccgacggcgtgatgagcttcgcgcagagggtcgccgaggagatgggcatcctggccttggtgttctggactacgagcgcttgcggcttcatgggttacctccacttcgccgagctcatcagacgaggctatgtgccactcaaagacgagagtgacctgacgaacggatacctggacactccgatcgactggatccccgggatgcgaggcatccgtctcaaggacgtgccaagtttcatcagaacgaccgatccggacgacgtcatgctcaatttcgacggcggcgaggctcagaacgcgcgcaaggcccgggggctcatcctcaacacgtacgacgcgctggagcaagacgtcgtcgacgcgctgcgccgcgagttcccgcgtgtgtacaccgtcggcccgctcccggcgttcgccaaggccgccgccggcgaggtgggcgcgatcggcggcaacctctggaaggaggacacgggctgcctccggtggctggacgcccagcagcctggctccgtcgtgtacgtcaacttcggcagcatcaccgtcatgtcgccggctcatctggccgagttcgcgtggggcctagcttgctgcggccggccgttcttgtgggtcatcaggccggaccccgtctccggcgagaaggccatgctgccggaggagttcgtcggcgagaccaaagagaggggcgttctggcgagttggtgcccgcaagagctcgtcctctcgcacccgtccgtcggcctgttcctgacgcactgcgggtggaactcgacgctggagagcatatgcgccggcgttccgatgatctgctggccgttcttcgccgagcagccgacgaactgccggtacgtgtgcgacaagtggggggttgggatggagatcgacagcaacgtgagcagaacggaggtggcgcggctcgtgcgcgaggcgatggagggggagagaggcaaggccatgcgagtgaacgccatggtgtggaaggagaaagccaaggaggcgacagaggaaggaggttcgtcgagcagaaatctggaccgtctgatcgaattcttgcattcttctgggagtgacgctcgctgagttcatattatcgtatcacaaattatcttgtgcgtgctttccgctcatctagtggcactgagaaatgcagtgcaaataattggtcagtcaaaattcctgttcgtgtcagagtataacatggaaggatacggagtttgctagcacaaaacaactgtgctgctggatggcgacttgatcaccagctcaatttctccgggattctagatcgcaaaatgacggaaagggattctagatagtagattcgtctcgcggcccgtgcagccgtgcgctctaatcagccggcgctagcacactacgcgtcagccaaatctgacgtggaggagtaaaaaggaaagaaaaaggatggagtgagtgttccatctatcgtccgactgaagcgcaatacacgagaaaaggctgctttcttccaaccagatacgaggagatgaggtgtatatgcgaatattaaatatctaaatcttcaatagaggtaaacaaacagctaatctaacagccagcctattatattagtgatggctataggtgacatggtactattatagagccggcagctagctatattattatccttgctccgggtgatctccgatactcggccactacaccagtggatacgcacgagcagctagcagtgacagtttcgacgcacgcggctgtggtagcgaaggaacggctcggccgcttggatggctacacacacctggtgcggatgcgtacatgcacggacatcacgggcttctacagaaaaagttactttcaaaattatgaaaaatccagcacgttccaccctggctgctatcaaccgggaggcttcgatgatggagcggtgattggttgttcttcacttgttctgggcttatccagcggaaattggttgattgcgaacttcgtggactttaaccaaactccatataaaagattccctccgtggtataccgtcaggataatacaggtgcattttgtatatctgtttatcttttctttctttatgtaggtaaattgcatcggtgtatacaaaattgtcgtatgaatgcaacctagtgtacgaacttgtaaaatacttgttttggtgtatg

SEQ ID NO: 9292 - DNA, 2809 bp, Oryza sativa
  ref <308>: DATABASE ACCESSION NUMBER: AK106640
  ref <309>: DATABASE ENTRY DATE: 2002-08-28
ccaacgaaaggaagcgggcggccggcgctcggcggcgctcggcaggcatggcgatcggatgggatgggatcggatcggcgcagggccaaggcccgagggtcgcatcctgcgactcctgtgagttcgtgggctatgctcgctcgctcttctcctgagtttactatgtttccaccgactcatcgaccatatcctacacggttggaatcctggagatggttatattaattagaaagtcggctgttggttgcttatttcaattctgtgacccattgcgtaatgtacaacagtacaagccagcacaaattattgtctggtttagccaaagaatctggacacaacaatttgatcatatagcactcctactccaaagaacatgccaaatgcaattgcgaagacaaacttgtcaatgtactgctttgtggggattgtggagactggagctgctcctgctgaattgcagcggtgcaaaagcatagggctgcatagcttcgggttcccagcaaaactggaagttggaaatgtgctgaactggcctatagttggtacaggcccttcaaggtcattgtaagaaatgttgaagttagaaagaaagtgcaagttcgccagtgacgaagggattgcacctgtcagatggttggaagacaggtctagcaccatcagattcttgaggttgctggccgattgcgggatctccccatgtaagttgtgaagctcaagttgagtgagaggagcgctttcaactgaccaatctccatggggatcacaccactgaatttgttgttacctagattcaacattttagggaatgcattagccgtatggtactgaagagatggagccacaaaaactggcatccgaaagagtcttgggtttgagtgatccgcaatcttgtctgatcttagcattggcatctctgttagtgatgttggtatttcccctataaggctattattggataagtctacatacttaaggtagtttaggctcttgatccaggttggtattggtccactaagttgattgttgtataaaagtagaagttccaatttttttagctttgagagccaactaggtatttttccagtcagtgcacaatcatttatgccaagaacctgaagattctcaagaccatgaattgtttcatcctgtgaatagtttcatgcatgaaattgcccccaattagcaaggtagtgaggttccttaagctcttgagtatatgaagtgcacctgtgatattggtaaagtagttgtacgaaagagatacaaaggtaagggatttcaacttttctgtctcctctggcaactgaccgtgaagcttattgaaagataaccgcaaccaagttaaattactgcatgagtagatacttgctggaattgtgccggtgaagtaattcgtgcaaagatctaaagttttcagatttggtaggttggagaagttaaccttagcaaggtctcctgtgaatttgttgctcacgaggacgatggctgctagatttgtgcaattggccaaggttgatggcagctccccagatatgtagttatggtccatgcgaagctcctccagtttcttgagctcgcctatagattctgggaccttgccactgaaactgttccccccaagatcaagaaaaactagattactgagctttatcacaagcttaattgttccttgcaaaccattgttaggaaaagagaggtactccaatgatgtggcatggaagagatcatccgggagggccccactaatgttgttgtggccagctttgagcattctaagtgcagagcatttacctatcccagcggggatttcgccactgaattggttgtagcaaaggtcaagagcagcaaaggatagtgagctgatgcagaaagaggaaggtatgtgcccagtgaagctgttgttgctcgcattgatcgctactaggttgctcattttctcccatgtggtggatggaaatgctccagtaaacagattacttgagatattcagtacctggagtggccaatcagatgatgatgagtctacctcttgtagttccccgccgaggcggttgaagctgacatcgaggacaacgatgctgccagagaatatcagctctggcggaagcccaccggagagtgagttgtatgacaggttgagccgcgacaagctggtgagctcgctcagggatgacgagatgcgcccttcaaggcctcttgaggccagcaagatcttggttactgcaccatccacatcacagatgatcccttcccaggtacagcagtcggtcctattcctccatgacgcagcgaggccattatcatgtggcggtgacagctccgcgaggaaccggaggagggttagcctctcctgctcaatgcatgaaccgacgggaggacagatgaagctcagcggcagtagcacaagcgcaaggtgaaagaaattcatgcgaaaactgctggctttgtttgcatgaaggatgtgatttggcttcttggtcagtatttctgtcagaaactggcaggctactgagcatggtttgccaatataagctggtatcctgtgcaaaaaaaatacagtccctgagctatatattgtcgaataacattgctaaattccttgcagagagaaagaatagcattgcctaaacgcaccaaacaggcgaagaacaataagctgatggaatgttgacctacgcgtttgctactgctgcctctcactggcttagtgctatgcttaggtatggtttgtaaattcgatctattatttgctttcagcatgatgtgttagactcacattgtttgacggaaatacttgcacttaaaaagt

SEQ ID NO: 9293 - DNA, 1749 bp, Oryza sativa
  ref <308>: DATABASE ACCESSION NUMBER: AK106641
  ref <309>: DATABASE ENTRY DATE: 2002-08-28
tccttgcaactgaagaacaatggtagacaggaacaggtgtagatgttccttgctgcccccttattgtatcagcatcacagaaatgtgaaagataaaatagcttgtttcctatactatgcccacctgagaggcgagttaatgcgtcctggtagctcatttcctttattttacagtgtgtgactaagaagattaacatatcatgttctcgttttcatgtataggtggtaaccatacaagctgttgttgaagcatttgctagtctgcctgataattctattgccttcagaattgatgatgaccacaagtacgtctttagataatttcctctctgatgtgaattgtgatgctcaagatgcagagaaggcagattgtgccagactctcctcttcggtccattccaggctactgtttgctgctgatcgagtgaatcaaatggtgctcaacgtggtcttgatatggagtgaatggccatagaatctaattccacagatggcaagatcacatccaagcttctcgtattccaccaagaaactattcctgggagcaaattctgtgccagaattgaagagcagcctgacggtgctacatcatgcagtcgattattcgatcgactaggcagctgcgacgctgagggagaagggcaatggcgcagagtgcggcgaggccgagtagtcgttggccttgagggcttcagatccacagttgtctgcatggtcgtccattagcatctggtggcacctgtactcggagctgcagaaggctttctcccccctacaggtttgagacatgcacaatgacatgtcgagcccatcaagcctcttgtcacacaggaagcaccggctcaagaagtcagccgccggcgccggctcctcgtcggcttccacaagccagccgccgccaccgtcgccgaacccaaagtacacccgcttcctcacgctgccgctggcgccatcgacgccggcgacgtgcgtgatgacgcaagtgtagctctcagagagctcggcctcctctctcgcgcggcgccgagccgccgcgccgatggcgatcggctcggcctcggttcaggcaggcgtggctcatggccgcgacgatgccaagcccgacgccggtggcgccgccgtcgaagctgcgcctcggcctcggctcgggggagctcactggcccgaggaaggtggagaagaggttggcgaaggacgacgatgccgccgtcagcttggtgatggagccgagcctcgccggcggtggtgccttccgctcggttgcctgctcaagaaagctcatcgtggaatactaactttaggtaaattccttgtcaaagttcagttttgatgaacactagctagtaatcgctaaattgttcttgtgttctagagagagagagaggagagagagagagatgctttagttatgtagttgttcttcactctctcatctctcctctcccctttgcaattcttggagcacttgctttctcaccgattaaaagaacaccaatggtgaggtttatggagagagagaagagagaagagagagagagagagaggagggaaggagaaggtggtggcaacattttaaaggagcaaatgggtgagtgggagctgggaatttgggtttgttagggattaaattatttagtggtgttgcacatgtgggagctctttctgtggaggtttttatttcttgatatttagtggagaatattccacaatatcgattatttatcttatgagaatcaaggacttgtccttc

SEQ ID NO: 9294 - DNA, 2214 bp, Oryza sativa
  ref <308>: DATABASE ACCESSION NUMBER: AK106642
  ref <309>: DATABASE ENTRY DATE: 2002-08-28
aaagcgtaaaatgcattgacgccttccccgtcctcgatgctccccccctccgccgcctcctcgccgccggcgccgccgccgtcgccatgggacgacgtctcctgggcggaatccacctcctcgactgttctccaacactacaactctctcccaaagaagggcaagccgcaggggcgggagtccaccgtcctcgccgccttcctcctctccactccgcagcaggacccccggaatctcactgttctctcgctggccaccggaaccaagtgtctcggcgccgctcgcctcaaccaccacggagacctcgtccacgacgcgcatgccgaggtcgtcgcacgccgcgcgctcctccgcctcatctacaccgagatcggccggagcggcgcttccgattggttggttgcttccggtgagaagtggaagttgagggatgggtaccaccttcatctctacatcacccagattccatgtggagtcatgcctgttccaccatctccctcagagttgctcagggaacagctggatagtgttaatggatgcgatgatgttgggtttgttcaaaggaagcctgggcgtggtgacactacattatcaatgagttgttttgacaaaataactcgctggagtgttgttggaattcaaggtgcattactgtctcacattcttgagcccttgtacctgtccaccattactattggacaatcacctactggtgcttctgatgggttttctgttgaaaataatatcaagaaagttctcgatgctcgactgtcctctctatccagcaaactgctgttgccttttaaattgaacaagccactattttatgaggcacctatccctccaaaagagtttcaacagacttctggagatttgcaacctttgacatgcgggtagtatatggtttgttgtctttataaacttagaccctttttttttagtttacctcatgtagtatgtacatgtttttagtaagagcacctagctttgcaatttatattttactaggtactcgatatgctggaacaaatccggttttcatgaagttgtcttaggaacaactgggagaaaacagggtacatcttcaaaggcagcatgctcaccatccactgagtcattgctctgcaagagaaggttgctagaagcctttgtgttgattgaacatccattagtcaaaaagttccatcgcgaggaaatgtcctaccgtcaaatcaaggatatggctcatgaataccagcagacacttgagcttctcaggaaggctccattttttagccggtggggtgctaagcctgcatccctcgattcattcacggtttcacgcacaccaggatatgcaaaggcaaaggtgactgcagagaagagaggctggcgatggttgttgacatgggaccattgatttgttgcaaaagacctaagtttttcatggattctgcctagctccacgaatggatgggaggcagagacagatgcagaaattaaaagaatccagcatcagagaccgaaagatacggctaagagaccagacagaccctggaccccaagtgagcacatgcatgtttaaattattgaaagcaaccattaagaaacatatttgcatgtaagtgctcttaatgtaggcaaaaacatattgatggcgcctcttgttcatgaaggaaaagtggtgatgaccgaacttgcaagttttatctgcaatccttttgttgcttctgaaaaactgaatttctcaccctcttggtgctatctttcttgttacttttggattaatgggccttttgtagtgaatttctcaccaatcttgatatatttctgaaaactgaatttctcaccttcctttttcttgtcaattttggatttaatgggctattttgtttgagatataatcagatgaagggttggtggtcgagtgccgagtggcctaatactgcgtgccttgcgccatcagaagagctgtggacacaaacatgatatcttagttggtgtggcctcctcaaccatcaagcaatacagacaaggacccctccaactgcaagaaaaactgccattttacagctcaaatccaaaatctaatctcctcatcttgctaatcaaccattgcctttgccagaaggagaggcctacttttggcttccttgaattatggatttcaataagctggttggaagatgaggaacacttggtgctcactgcaatgatattgctacgtttgaattc

SEQ ID NO: 9295 - DNA, 2725 bp, Oryza sativa
  ref <308>: DATABASE ACCESSION NUMBER: AK106643
  ref <309>: DATABASE ENTRY DATE: 2002-08-28
cattcgtaaagcaccttgtttagtgcctggatacgtatcaaaggtagtagttcttaaatgaagatacattaaaaggtccaccattgaccagcacgttgcgatgtgcctgaccccattcatcttctcacatgaatatcacctcttcttgtagagggctatgaatgatcctgacttttatctaatgtaccgtctgcctccacatccgttctccctctggcaattgaagaacactgctgccacaggaggtccaagattatacagtgcggaaaaatctcttgtattgaaatttggtctccatcctggtgcataaatagtctgttgtacatattggcgaaataatataaagacaaaacgatgtatccctgcagttggttttgggctttcataactgacaacttcatttcctgtaataaaaattgttaaaacatgttaaagtcagttcatatgagtattgctctcagcctctcaaacttaaaagttctatgcatgaagtatggacatccattggtcaagtttaggttaataaaaaaatagcatagggatgctcatgttgagctcagtgcagtcagatcagacaagtttatgacaatcatagttaaaagaaattatttccatgggttgatgtcgaaggcaggacgatctgctgtttatcatctgaaatccaggcagcattcaaatatgcaggtatatgtgctgacctatcaaaagcaaacagaatatctttgtttacacgaaataaagaaatagaggtgcaaaggtctttttcaatccacccagtcacacagatgaagttgtacaacttacagaaagctgagaatatttgcttccagtgttctatacgtactgaacactaatagcacatgctacagtaatgaggatttggacttaccagagtgtaaaggttccttatgtcgcggccagcaatttcaatccttggttcatttgctacctgtgacggtttgagctcagacccatttgttaattccttgttgttgtataggaccttgagtgatgctgatttgttgaatgggtctaagatatccccaacaacatgtcctacgacaagtgggtcccttgacatggctagtgaagattgatgatcttcaggagttgagcaagaagaggctgtgctaagaagctaacttgagcagaaatgttgaacttgggtgaactgatgagtgcaggaatatgcctgcggagctgatggactctacataaagcggacgcagaaagcagagatagataaggcaaaggcctactacatttattcttgaccaacaggggcccgcggaatcccattttattcctgtaattcgcaccaaagattttatgtcaatcacgcctcccccttctgatgttatgttcccacttgcagaacgcaggccttgagctgtgcatcgaggaatcaagccactggttttctcagtcctccactcctgctggcacctaaatgtctcatcctattaagcattttgcaagataaactccaggaaggaggcggctggagggtagcaggaaaggcaaagagctcagttacgtggacgaagcgaacgtcaggttgagagttggaatccatgccccgaactgtcgctggcttgataatcttgactggagaacaattgaacaaggcagagaacaatgcaccatccccccttcacgtgggcgcatcccattcgtcgcgtgatcgataggacttgcagagggggggccgtggtcctcgccgagtcgccggcgccggattctctgtgaaaagaggctgcaaaggagattccacaaggcagaaaaatctgccggaaacggcaacatgatcgtgctgctgctctcgaccaccgtcgccatcagcccagttgatgagggcaagtgtagtacaaaacctcagcgcctgcccgctgccattggcttgctttgggtcagaaagcaacaccaaggtttttgggtctttcagatcagaaagcaacgcaaaagactggctcttcggatcagaaagcgacctctagtgtgtgctttcggaattcagatcagatatatgcgtcgacgacacttgcttcatcgagtgtatgcccttcttcttcttcagcactgttgcagttgacctgtccacataacacattccatggatatcaggccaggcctaccgtgtgtatatctgatgatggactagcagcatatcggttggcccaggtaaaactaggcatatatcgcttgtttacatagcttcatctgaagcctccatgatatcatccaatctaattttttgtatcaagttctatctatcctaacactcgtcaactccaatagcgcgggtggcttgatagttgatacatatcctgatatcaagcagattgcggaacaaacaagccgaaatttacgatgatctgtttgcctttttgttattctgctacgcgttcgtattgcggctgacatatttttaaggtgatgtatctggatcagtgatcacatcaagaaaaacagttgcgaggtcaaaagagaggagcagcttggctgtggaagaacttatgcctcgtcgtcgaataagacaggagttttgtaggatgcagaatctatgccccggaagaactagattggtaacaataatgtgtataaatgaaacgatttcatatttttcacaatgttagacatatgcgtgcaatatttatttgaaacttcaatcttctgaatatcctgataacacgattcaactacataaaagtatcagtttttactg

SEQ ID NO: 9296 - DNA, 2875 bp, Oryza sativa
  ref <308>: DATABASE ACCESSION NUMBER: AK106644
  ref <309>: DATABASE ENTRY DATE: 2002-08-28
atccggcgagcccactccggccacagccttcctcgtcgcctccggtcttcatcggcgggcggccgccggcaaatgccaccccaagttcccagcgtccgagccagctggcccagcgccgccaccaaggcgtcgcccgccggagggacaacccgcaagttcatccctccttgccggtctcgtctccctccacggccgtcccgattgacgacgagtgatgaaaggctacatcgccgtagaagttctgaaccgtaatctggacagcagttttgatcttcactgcatggtgctcatatggctctccttaggcgttgaaggcagggagcgagggagcggtggattgatgccgattttgggtcctggtttgcgtgacaagctgataagctggttaggaagagtgaaaggccattgtttataggaagagtgaaaggctattgtacagtacaaattatagaggttatgcaacatctgcatagaaatcttgaatggtaatccggactgctattggaattctcaccgacttcttttcattgtgccaacatcaaagacaagaacagatggctcaacaaccattttaactccaggcgggctctggatttcagcgtggtaaactgcattaacctcgcctacatttgtcactgttctagatactgtggttggattcctgagatcaggaagagcgattgatggtagattcaggtgatacccaggtagcgttgttgcattacagctgacagatgtcttgatgatgcacccaaaaaacttgttataatcgcttggatcgatgtcataaatgaggcctggatcagctgccctgtttgggttaatgcttccacctccatagtcaaatggatcagcaatcttccgaggcactccttctgccagtattggcatgcctcgttcgtcagttacagatgcttcgatatacaaaatgaaacagagtctggatggagggctttcagcagcgcgacaacacctgctacatgtggcgttgccattgatgttcctgtgccaagttggtagtgatctttcatggctgctaaaatgttggatcctggtgcagctatgtcaggctgtcatagacgcaacagcaacaagaccattggtaagatgaggaaacaccgtggctttctaccggaggctaagtttttctcctaagttggagttacgtaccttgataatatcagggtaatcaaccgatggacctctcgaggagaatgctgctacttttggcgccaatactccttctcctgtgatagtgcgtgccggttcgatctttgccattgtttgttctaccttgcttcgctgatgtacgagccgatcagatttgcactttcaaggtccacgagaacacaggcagtgccgttgcaggccgttgtgatgcccaggagatcagtcgtgtactgagcaaagattaggccagaagccccggcacccaggacggttttcaatgctagtggaaaaagtgtaagtggtgatatctcgatggagatgcacagcacaattctccccttcacatccgtgccgttcagatcatccttggtgcatctatccacaagaaaacggcctccatatgctagaagtctgaagctgctgcctgatgagttattcccttcgtagtagtacatggactgtccctgcaaaatagccagatttttggacaagataagccgttgaccaatgagcacacatcgtgtggtgattaatggatcacgtttgtgcgtcgtaccacaatctggcgcttgtcccccagagtgatcacggtcgggaacgaccggtcaatcttgcttgccgcgacggtgatgacccagggagcagtgttcctgactacctgcggcgcaggcccaaagttcgtggctgcgtacacaacggtgatccccttctggacggcgtgcagcgcgccgaacgagttctccagggtacccagggacagcgacagcacgtccacgccgtcgtggatcgcgtcatcgatggcggcaagcacggtggcggagttccctgacccggcgccgcccctgccccagacggacttgtacaccgcgatgcgcgcccggggcgcgccgccgcgggcggtgcccgcggccagcccgtggaagctgaccgcctccacgacggagcccgccgcggtggacgccgtgtgcgtgccgtggccgttcacgtcacggggcgagaggtagtcgatcttgaggtcgtcctcgtccaccccggcgtggtagaaccgcgcgccgatgatcttgcggctgcagttgttgctgccccatccttctccgacctgacacacgcccttccaccgtgccggcaccggcccgtacccttcgtcgcggaagcttctcgactccggccatatccctgtggcaagtgcaccaccagaccagctgcgttataatgggattgcggcagaaatggcgccaccaaaaacatttgaacgtgcgctctagactaaccggtgtcaacaaccccgatgattatgtcttctccgtagttgctccttcggagtaattcactggggttttggtagttcagccccaggaaatcccagctccgtgtggtcgttgtcttgtacctcctgcttcgctgcacactgattacttctggtaactctggagatatcagatgcattaagcaaaccacacatgctgagtttatcgggataatcatactgctcgattagaatcagaatgtgagaagtatatatgatcggtattctagccaagtgaatcgatgtatcatcctcttttctggatgggtatatcagtttattggtaggatcatctgacctgcaagttgttctgcttgctcttctgttagcattgcagcaaatcctgagaatccatgcttgtagttatagatgatggaagataaggattcctctttactg

SEQ ID NO: 9297 - DNA, 1921 bp, Oryza sativa
  ref <308>: DATABASE ACCESSION NUMBER: AK106645
  ref <309>: DATABASE ENTRY DATE: 2002-08-28
aagaagaagaagaagaagaagaagagagaaaatggcgattacccccgtcgattccccctcccctccatctccgatcagcagagccaacctgcacttctcccgcctcctcgcgctcccggccggtgacggcgagctggctctcggtgttaacacggcgaccccccaccctagcatcctcctgtgtgtgcggcctccttgcgagcaggtctggagcggcggcgcgcgcggccggccccccatctcggtcctcgaatcgaatcggagatagtacttcagtttggaaaaatgtcaggagattaaaattggtggaagccacttggcgcaagtgctactcttcactcttcagtcactgaataatgaagtatccctgtacaatgaaaaggtatttctggcattttatgatgagaggataatcaccttttttcaggaataagtaaaagatttgggcatcattgcatcaagccgaacaaaaaggtttataaaacatcaaacacatcctgtgtgttgagcacaatggtcaaacgactggaacaaaggaaaaaaaaaccgacaattcgacctaagctactgacagaaactaaggaatcagactactaaatgaggcaagctcttactgtgcgacccactaattcgcttcttctgcaattgacgcaatgatccaagaacaagcacttttgcagaagtggaggtgagacatctttgcaggggttggcctgttgacaggaagcctattgagtttacaaaatggtggcatggtgtaatgttgtaatattttgctactcacttcagtttgcagttaatgagttttggagtaatcatagcattagccaaatgttttctgacatagcaaaggtctccaaggtctcaggctctcagcttaccatggcagacctggtcttactgattgtgcactatttcctcatagatattccccttctagcagtaatagcataattcccttctttctgtggaatttcgtatgttcaaattatttcaatattgcctcagttttatactttgctggtgttaattgctactgaactactgataatattggaaaacctggccttatatggaattactgaagtaccttcccttcgatctcagtttaccatgggagacctggccttactagattgtgtactagtttctggtcatagatgttccccttttatgggcagtaccttactaataatcccttttctttccttttgacactgacagtctttaaattacttcaatactaacgaatttgctagtgctaattggtactgacaatgttggaaaaccgcagcagtaattggtgtggcatgttctgcctgagatgttcagttaataacgttgttccagtctactttgttacactcagattgcctttttgtttgttttactttaggtagtacttcagtttgcaaaagacgatgatattggatttggtggaagtcactcggcacaagtgctgctgtcaagagacaggaagctgacccctgtacaatgtaaagtcattgctgccatgcacaggaatcctgtgcatatatgatccaagatgcaacactttcgcacaagcggagatcaggattcaggagataagttcagcttactgaagacctgctgagttcagcttgaagttgacaagttttgcagaaatagctgactcttttttcacattggagcctgtgaaactgttgtaaattcttgatgacgctagatctttttgttttgtatattcttcagtaaatgtaaatataatgtaagatgcacttttaagtacgaatcctgatataaggggcacagcagctctgttttgcagctgctagtatggtggtcatgtaaatcgatgcaagaaaagcaccagggtgtcagtggcactcgtgctatagttgacatttgcagtttaataaaaagatgaaatgattgttct

SEQ ID NO: 9298 - DNA, 2055 bp, Oryza sativa
  ref <308>: DATABASE ACCESSION NUMBER: AK106646
  ref <309>: DATABASE ENTRY DATE: 2002-08-28
taatgcatatttcttagagcttgtgtgtagctagctcttgcatgagagccaacactctccacttttatttatctctctcttccacataagcatttagcttgcttatagctcaccattatccttgctcttatgtacatattatacccatattatggggattaaccgaagaacaaggccttaatgggaaattatcttggaggcctccccaactgttcaacagcaatgaagcaccatgtataattgaccagaccactacgaactacgaaattgaaaagcttgaatttctaacaaatgggtttggacaattttctatggatcctaattgatggaagacaaatgcaaaggtcaagagccatgctcaggaagaaattcaagtttcaacctgattggaatgcgccatggcaacattcccctcctccatgtccttgagaaattcagcgaatgcagtgcacgatgatcccccttccttccatgctgccgctgcgctctccttcatcgccatgacccgctccaggactccctgctgcgcatccgattccatgatccgcctcaagatggcatcgacgatgtcggcctggacaagtgccccgggtttataccctctgacctcgatgccaatcttcatctcctccacgatgaacaccttgttcatccactgctccgcgtcgagcggccagcacaccattggaacgccggctgcgacagcctccagcgtcgagttccatccacagtgcgtcacgaatgcgcccgtggatgcgtgctgcagcaccgccacctgcggcacccaggacgcggtcaccacgacgcctctgtcggctgtccgcgccaagaatccgtcaggaagaagagacatcgcggcgtccggcttcgtgcccgcgggcgcgcgcagcgcccacaagaatctctgctcggacctctcgaggcccgtggccatctcgctgacctgctccggcgagagcgcgccgcggctcccgaagcagaggaacacgacgctgcgctccggctgcgcgtccagccaagcgaggcacgggtgcctctcctcctccgcgccgccgttggtgatcaatggcccgacgcagtagaccggcggcgtggcgcggttggagaggcagcggccgtccctcagcgccgccaccccgggaccctccagcgcgtcgaaggtgttcaccagaatgccgcgcgcgtccgccatccggtcgaacgcgtccagcatggccgcgcttatgtccgtcccacggtcgagcacctcctcgggcaagtgcgacgccggcagcgggcgcacgccgggaaacgacacgggcgcgtcgccgagctccctcaagcttccgctgctcccggcgcaaaaccgtggcaaacggaggaaaacggcgaggttggtggcgccggtgcagaagaggaggtacccggggacgccgagctcggcggcgacgtcgagggcgtagacggagaacatgtcggccacgagcgcccgagcggcatgggggccacgcagcaggtccccgagggcgggcgcgtgggcgcggaggacggcgagcatacggaggagcgggtgagcggcggcatcggcgccggaggaggcaggaggatgaggaggaggagggagtggatggacggagagggaggggaggcgggatgcgtacttgcggagcgcggcggagaaggcgggggcggtggtggccgggtcagggacggcgaccgtgacggcgaggccgtggcggatgcaaaccgcggcgagctccagcatgggggcgagatggcccacgccgaggctggggaacaagaccactctccttgcagccgccattggaggatcgctgctcacctctgctcttgcctttcttgaattcttggtgggcaatccgcgacggatagagacgatgcactactaatcaatctgagggactttctgccctttctttttcatttttttccccttctttcgtgtggactagcgtggcgtggttgcttttccgtttttgtttaatcatcactgtcaaatatatacacatatcactgtatctgttcaactaatgacctaactttctacttcgtact

SEQ ID NO: 9299 - DNA, 2350 bp, Oryza sativa
  ref <308>: DATABASE ACCESSION NUMBER: AK106647
  ref <309>: DATABASE ENTRY DATE: 2002-08-28
agctgcatcgccacaccccattatccattcctaacccgaagaaaccgagaaggagagctccatctcccttatccatctcaacctcaccgccgaccgtgaagacgacgaccgcctccagcgccattacgccgcggtcgtttcctcttctcttgcgtcccattatcacctctccacgccgattccatccctctaagtttcaccccatttcatgcagtggtttggtgggaacgcaaacctcgccggcgatgctctggagcacgcaccgggcgccgccgtggcggcatcgtcgtcgttgccatcgatctagactgagccggagcgagccaccacgccaccagcttcacctcgaccgcctctccatttacccccaagaaacccatccaatggcgcagcgatcttggagatcgacatcgtcttctccaactccgttcaactgcttccatcatcgaatccattctctctgatcgagcagccgacgtcatccctggagttgtgccatgccgccatggagcttcgccgtcgctgtggctctgcagacaaccccagccttgtctagcatctcgataattgcttaatcggtgaagaagtgaattaggtgctgacattttccagtttcaagcttgtcgtttccgtcgttgcgaaggttcgtgagtgcgccggaagtattcaagaagattaattgaagaccgattattgcaagttgaagataaaggatccagaaggagaagacgtttggcttataccccagttgagctgcctgtgggagtggagctgaagccatcgctagatcgttattccgctgctgttttcttttcttttgaccccctctgggcagtattgacaatatcgagttggcgggatttaagagcagaaacttcgacagatggtggggtgagtggaagttgcacttgtttcaacaatcagcttcgatgtacatgacagacctattccctgacatcatacccaagacaatcgactcttcccctccacgtcaaagcaacagtggtgtccaatatgccccaggtttgatcccaaatggaggtggaccatctccccccgtcatcggctaccatgcccccaagacttcaactcttcttcaaggcttaatcagagaaccaaccgatgtaagcaagaaaagaaaaactagatcatcggctatgggcactttggctctagttccaaagagaaaggtcaagtctaagaaaaccaagccgaccgatgacctgcttgccttggatccatccattgaacgagctctggatgaagaagacattgaagacgatgttgatcaggctgtagctgaagtgagtgacacagaaaaaacgccatcggcattacccaagcagacgcctctgactccttctgcccccactcatttcttaagaaagaagaaaactgctgtaaagaagaaatcaacaacaacaattgtcaagccagttccgccacctcctccccctccttctcctcctgtactgcaatcgtcgagtgactggactccatcggctgtagggagtcatcatattggggaagaagaacaaccagctgctcctactatcccagttctagccgatcagatttcttttgacatcagagattatcttgatgaagcagaagaggatacttcaagcaaagcgctagcccccttatctgacgatgtgaagaaaacacttgaagatatctcttgtcggctagaggcctcttctttagatagcttagtggtcgactatggatcaattaggacacggctacatgaagttcaagctctgattctcgaagaactggccgctgtcctaactccagccgcttatctcgagcaaaaccagttcaagctggaaaaagccaatcaaagactagccgaacgccgtgagtgcaaggagattgaagccacaatccaggtcaatcgacagcttgtgcatgaagaaaaagtcaaactagattagctatctgagggtccgattaagtccaatattaatcggctcaaagctcgcaagatcgatctcttggcacagcttgaagaatgcaatgctgaactagatatggagcacaaaaggctagccgatctcccaaaatctgtcgaagagcagaaagcaaggcttaaatcggctatcaagaatgttgctgacctaaccaagtccctgaaggtcatttctggaaccgatgctcaagatgcccaagctattgaagaagtcaaacaaattaggcaaagggctattttggctatccaacggtacttgtctcaataacttttgtgtaataggacttagaaatttttgtaatcggctaagatgccttaataccccgctgttttaacaatcctttgtgccgattaacataacttccaatttttctc

SEQ ID NO: 9300 - DNA, 1545 bp, Oryza sativa
  ref <308>: DATABASE ACCESSION NUMBER: AK106648
  ref <309>: DATABASE ENTRY DATE: 2002-08-28
agaggcaaatcactagcatgcgattcgctcccatcctccggaacccgcgccgccgccgcctcctccgctccgtaaaccctagcctcgccgccatgtcgccgccggccgccgcccacctcgccaccgcctccgatcccgacgaggacctctgcttcaccaccgaatcggtcgcgcccgcggaggagaccgccccgcccttgcccgcccctccgccgccggtgtccgcggaggagagggtggagcgcgcgtgggcgcactggaggcggctgggctccccgaagatggtggtggcgcccatggtggacaactcggagctccccttccgcatgctgtgccgccgctacggggcgaccggggcatacacgcccatgctccactcccgcatcttctccgagaacgagaagcacaaggccatggagttcaccacatgcaaggaggaccgtccactttttgttcagttttgtgcaaatgatcctgacattttgttacaagcagcaaagattgtggaaccgtactgcgactatgtcgatatcaattttggatgcccacagcgcattgctagaagggggtactatggtgcgtttctcatgaacaaccttcctctcgtaaaatcccttgtacagaatctatcagcaaacctccatgttccagtatcatgcaagattcgcatattcccgcgactggaggacacactggcctacgcaaagatgcttgaagaagctggtgcttctctggtagctgtgcatgggcggactagagatgagaaggatgggaagaaatttcgagctgactgggatgccattaaagctgtcaaagatgctcttaggatacctgtacttgcaaatggaaacattcgccatttggatgatgtgaaggattgccttgaacatactggtgctgatggtgtgctttcagctgaaactcttctagaaaatccagcattgtttgctggtttccggacaaaggaatggaaagaaaatggtgatgaagatgaagctagtggcttagaccaggctgatctagtcattgagtatttgaaactgtgcgagcagtaccctgttccatggagaatggttcgatcccatgttcacaagatgctaggggactggtttagggtgcatcctcaagtgagggaggaactcaatgctcagtccaagctcactttcgagtggttgcatgatatggtaaagaggctgaaggatcttggtggaggaataccgctttacagaaacaataatgctttacagactacatcaaatgggctagctgcaagcaacgcctgatgatcaccttccaattttgatcattcaacatatagcttaccaatttatcaaccaagattttagcaacaaagcacttggttttaacttacatcagtatacatcgaaacatcattgttgtagtgcaacatcacatttcctgataagaaaggaagttttgagtaatcatttttacctgttgctcagttagcatgttttgagcaactactacgatcaccttattatctgtaacaactggtgtataactaattctatacttgcatgc

SEQ ID NO: 9301 - DNA, 1639 bp, Oryza sativa
  ref <308>: DATABASE ACCESSION NUMBER: AK106649
  ref <309>: DATABASE ENTRY DATE: 2002-08-28
catccatctccctcccacacgcaagccccgggtactacgctgcccgtccagcgttcaatcgatcgatcgatccccgcggctcggtttgtgttgcgttcttccagatcgatttgatagatgggtgctcatggagaccaccgccaccaccaccaccatcaagaagccggggtgctcgtcgacgaggaggaggaggaggtgatcgagcaggcttgcggtggcccgacgagcggcgtggtggagcaagaggtggggggagacggtggtggagtgtgccaagatgctgccggcatggtgttcgaggcgaccagtagcgtcgggagcgtgagcgccaccatggggccgccgccgatcatgtgctggccaccgccggcgcagtctgtccacggtgcaatccaccaccaccacaacctaggcggcggcggcggccagcagagcccgttcttcccgctgctgccgcccctgccccctcagcccccgccgccacccccgttcttcgccgacttctacgcgcggcgggcgctccagtacgcgtacgaccactccggcggcgcgtcgtcgtcgtccgacccgctcggcctcggcgggctctacatgggtcaccacggctcccacgtcgccggcatgatgatgccgccgcccttcgctccgtcgccgttcggcgacctcggccggatgaccgcgcaggagatcatggacgccaaggcgctggccgcgtccaagagccacagcgaggccgagcgccgccgccgcgagcggatcaacgcgcacctcgcccgcctccgcagcctcctccccaacacaaccaagacggacaaggcgtcgctgctcgcggaggtgatccagcacgtcaaggagctgaagcggcagacgtcggagatcacggaggaggcgtgcccgctccccaccgagtcggacgagctcaccgtcgacgcgtcgagcgacgaggacgggcgcctcgtcgtgcgcgcgtcgctctgctgcgacgaccgcaccgacctcctgccggacctcatccgcgcgctcaaggcgctccggctgcgcgcgctcaaggccgagatcaccacactcggcggccgcgtcaagaacgtgctcgtcgtcaccggggacgacagcgccgccgccgccgcctgcgcggggacggacggggacggcgagcagcaggaggaggcgatgcaggcgcccatgtcgccgcagcacacggtcgcgtccatccaggacgcgctgcgcgccgtcatggagcggacggcatcggccaccgaggagtccggggggtcgggcgccggcggtgggctcaagcggcagcgcaccacgagcctctcggcgatcctagagaacaggtctatctaagcaagcatccacacatgatgagatgtgcaaaacgaaacgaaaaaaaaaaacagtaaaaacaacgtacaccacaccacagtccacactatctcaaagctgatcataataccatgcagctagctagctagattatggatcacatgttccccaagtacaaccgttttccatttctttaattttagttttctctcccattgattttatactagtactgctttgtgtgtgtgaatcttggtgctgtatatctgcatggcatctctcagcaatcaatacaaggccacactctttgttc

SEQ ID NO: 9302 - DNA, 1720 bp, Oryza sativa
  ref <308>: DATABASE ACCESSION NUMBER: AK106650
  ref <309>: DATABASE ENTRY DATE: 2002-08-28
atgcctatctaggttcctccaccgcgtgcgccggcgcccgccggcccgcggctcgccgacggcgctcaaccgccgtgtctcgccgatctctttcactgcgagcgcgagcgtgtgcgtgcgctgcgtgtgcgtcggtgagattgctgaggtctcgtcccgcaggtttcgttcttgctctgaccgcctgaggcgcgcagagtgttcgacggaatgtctcccaagagcaagaaggcggcggtggagggcggcggcggcggggaccacatcggcgcgctcccggacgcgctcctgtggcacgtgctgtcgttcctgcagtcgaaggaggtggtgcgcacgtgcgtgctcgcccggcgctggcgccacctctggaagtccgtgcccgtcctgcgcgtcaccggcgccgacgaggcgatccacaagttcatggaccatctccagctcctccgagaccgatcgcccctggaagcttgcgtgttcgccttctgtttatactccaagcacgacgcgccattcgcgaacctctggattcggtatgtcttgtcgtgccaagttcgggttctcactcttgatatcattgggcttcggctcatcgatctgcctgtagtctctggattcttgactacgttggagcttggtggtatgagtgttcatggcaaatttcttgatttctcgagctgtccggcactggaagagctgaagatgaccaaatgcaccatatctgctgacaaaatctcttcccaatcactcaagcgtctgagcatctgtgaatgcaagctaaagtcagacgggaggacagttatctctgtaccaagtctccttttcctgcaactaatagctttcaagggtagaactcctttccttgaagatatgccactgttggtaacagcaaaagttatactgtctggctaccactgtaaggattagtgttacagcagtgaccctgggtattgtcctattggttgtacgcattgttatggcattgatgatggtagtgcaggctgtgtgcttctgaaaggtttggctgatgcttcgaatttggagttgatagctgatcctaaagtgtttattctcagaagggatttgagatggtgccccacatttaccaaactgaagactttattactcattcagtggtttgagtctgctgaaaactgtgcactaatttgcattcttcaacactcaccatttctagagaagctcactcttcagctttctaagaaacctgacatcaatatgcgatcaagagcaatctacaattcgatgggaaaatcatttgcatcagataaccttaagacagttgaagttaaatgtcaagatatcgacaagaaagttcataaacttattatgtccttgaacagctacggcattccacctgagaaaattaatattcaacaaacaaatgaatcatatgagtgttttaatttcgtttggacaggattcatcccaaggcagagctaccaagcatccgagctgtccatgtatatccggtctccttaatttgctatggatgtagagcaagtttgcagtcaccaggtgttgctgtctgaaaccaatgggagtgttaaaaatctgttccaaacctgttggtgaggcttggtaatacgactttgtgtagataactagatgtggctggacctagattttattagctctcaagttttgatccagattttgttaacgacttttgcaaagatatcttggcagtatcttgtgccatgac

SEQ ID NO: 9303 - DNA, 1621 bp, Oryza sativa
  ref <308>: DATABASE ACCESSION NUMBER: AK106651
  ref <309>: DATABASE ENTRY DATE: 2002-08-28
actgctcggctcgactcctcctgctagctcgcccgtatccagctctaccttcgccggcggtggcggcggtgatcggtggtcctcgatcgatgccgccgccgctcccgtggcggcgcctcgtcgtcccgctcctcgccgtcgtctccatgcctttcgttctcccgctcgcactcccgttcctcctccgctcctcctcctctcgccagccgctctccgtccaccgcctcgactggctccctcctctgtccccgctgcctcgcaccccggatccatcaactccgccgccgccgccattgacgctcccgttggcgccactgaccactccgccgccgccgccgccatcgactctcccgatggcaccaccaacgaggtcgtcgccggccgcttccccgccgcctcccgagaagggcgagggtggaggaacgacatgcgacttgtacgatggggagtgggctcgcgacgaggcggcacggccgctgtacgcgccggggacgtgcccctacgtcgacgaggcgtacgcctgcgcgtcgaacggccggccggacgccgcgtacacgcggtggcgatgggcgccgcggcggtgccgcctccccaggttcaacgcgacggatttcctggcgacgctgcggggcaagcggctgatgctcgtcggcgactccatgaaccggaaccagttcgagtccctgctctgcatcctccgcgaggccatcccggacaagacgaggatgttcgagacccacggctacaggatcagcaagggccgcggctacttcgtcttcaagttcgtggattacgactgcactgttgagttcgtgcgatcgcatttccttgtccgggaaggcgtgcgctacaatcggcagaagaactccaacccgatcctccagattgaccggatcgacaagtcggcgagccggtggaggaaggtcgatgtcctcgtcttcaacaccggccactggtggacgcacggcaagacggcgagaggcatcaactactacaaggaaggcgacacgctgtacccacaattcgactcgactgaagcttacaggagagctctcaagacctgggctcgctggatcgacaagaacatggacccggccaagagtgtcgtcttctaccgaggctactccactgcacatttcaggggaggggagtgggattcgggtgggtcgtgcagcggggagagggagccgacgctcagaggggcggtgatcggcagctacccgcggaagatgaggatcgtggaggaggtgatcgggaggatgcggttcccggtgcggctgctcaacgtgacgaagctgaccaacttccgcagggacggccacccgtcggtgtacggcaaggcggcggcggggaagaaggtgtcgaggaggaagcaggattgcagccactggtgcctccccggcgtgccggacgcgtggaacgagctgatctacgcgtccctcgtgttggaacccaagcccagatcatggaaacaccactagtacactacttcagtttctttttgtgtttgtttcggtttgagcagttgagctgatgcgcaaactgaaaatgtgcttgatgtttgctcaattgaggacaggaggttttgccttgctttttgagatgcaaaagtcttcctcct

SEQ ID NO: 9304 - DNA, 2098 bp, Oryza sativa
  ref <308>: DATABASE ACCESSION NUMBER: AK106652
  ref <309>: DATABASE ENTRY DATE: 2002-08-28
gtctgtccctcccacagtcccactcccacctcccctcattgcctcgccgccgctcgccgtcgttatccaccggacaacgagcatcccctgacgagcgcagaaccgagctccggcgccgccgatctcggatgccaaggcgggctacagttttgcctctcccgattgctccgtctctcgagtcggtttccgattcgaacgcaggatgccaaattaaccgctaactccttcaaaatctgaactcgggaggcaagagaagaagagaatcaaacagagcgcctctggattttgattctcaacactacaagaggcatttttttttttttgccggtggagtatatgaacggcaagcggaagagatcgggtggaaccatggagactcgtgccatcaagtgcaggacgatgcagcttctccatgaacttcaaataaacgaattgggcacatctgcaaaaataattgacgcaccaccgcgacgaggtgatatttctactggcataatgcgagaactcccgctcgataaacttccagaggacatcttgcatcatgtatattctcttatgccattgaaagatgctgctcgtgctgcttgtgtgtcacatggatttctacgttgctggagacgctatccaatccttatattaaataacaaaacgataggtttgattaagagaaaactcagtttggatgacatggaaagctatgctgtcagtaaaattgaccatattattaagagccattctggcattggggtgaaagtgcttaaacttcaactgttcgcctgtccgaatataagtgcagctgttcttgacaaatggtttgtaaccgttatcaaacctgggatagaagaactctccttggagatgtctttcattgaaaaaacggacagaatacaacttcccatgttccgttctatccaataaggcagagggatggacaattcagtcacttttcctctcctcctgtgcttttcatcctacggtgactcttggttgcaacataagcttgacaagcttgcatctatgtaaagtcgatatttgtggggaggagttagggcagttcctttccaattcattctctttggagcgattggtaatttctgaatgcagtgatatagtccagtttaaggtaccttgcctgatgcaacagctcaagtacctcgaggttacaaaatgtcaaatgctacaagtgatagagatagatgctcccaaactctccacttttatctatggggatgttggagttaaaatctctcttggagatccactgcaggtcaaggacatacgtctgatgggttacaatgaagccgacaccgtctgttatgctcgtaccaagcttccatccattttgccaaatattgaatcacttgtcgtgtcatctcctaatgagatgaccagtacgccagtggtgcccagcaagttcctccacctcaagttcttggagatttatcttaaagaattatttgcctcacttcccagctatgatttcttttctctggtttctttcttggatgcttcccctgccttggagactttcatcttgcacgtagagcagcagttcgaaaggcatgattcgattcttgatggagaacctacggatttgaggcgaattctgcacgacggacatgccaacctccagaatgtgacgatcaccggcttcaattctacaaagagcatgattgagctaacaactcacattcttgagaatgcaccatcgctcaagtgcattacgctggatacagccaacttctctggcaagaaccatttggcgatgggcgaatgctctcctatgatgagaggagggatcttggaagcacgaagagctttcgaggcagccagaagacacatcgcggggaaaataccctcctttgtcgagtataagtttctggaaccctgcaggcattgtcattttgggtactgacacaatacatctcaagaagtccagatagcgtttcttcagaggagaaattcaagtgtagaaatctatattgacgctcaatcctttttgcttgttcgcaaaaaagaaaaatcgaatgtagaaatgtaaaaatgcacagcagtacagcacaaccaagtaaagaacaagtatggtattttgggggac

SEQ ID NO: 9305 - DNA, 1875 bp, Oryza sativa
  ref <308>: DATABASE ACCESSION NUMBER: AK106653
  ref <309>: DATABASE ENTRY DATE: 2002-08-28
tttacttttctagggcactactcgccgccgcaggcggccgcgggggacgggggagcgcctccgtgtcccgggtgcccgcgccgcgcagagggggctcacatggctggaaggaaggaaaatccggtgcttactgcttgccaagcacccagtggtcgaatcacacgagctcaagctgctgcaaatcgtggacggtttgggtttgctccctccgtatcactacccgcaagaactgaacgaaagcagacagcaaaaggaaagacaaaaaggggagctttggatgaaatcactagtgcaagtactgcaacttcagctcctcagcctaaacggcgcacagtgctcaaggatgtaaccaacatcggctgtgccaactcatccaaaaattgcaccaccacgagcaagctgcagcaaaagtcaaagcccacccaaagggtgaaacaaatcccgagcaaaaagcagtgtgcaatgaaggttcctaagctaccccctccggctgttgctggaacttcatttgtgattgattctaaaagttctgaagaaactcaaaaggtggagcttttggcaaaagcagaggaacccacaaatttgtttgaaaacgaggggttactgtcattgcagaatattgagcgagacagggacagtaattgccatgaggcattctttgaggcaagaaacgccatggataaacatgaactcgctgactccaagcctggtgactctagtggtttaggttttatagatattgacaatgataatggaaatcctcaaatgtgtgcttcctatgcttcagagatatacacaaatctgatggcctctgagcttatcagaagacccaggtcaaattacatggaggttttgcaacgtgacatcacaaagggcatgcgaggcattctcattgattggcttgttgaggtttctgaagaatataagcttgtgccagacacactctacctaaccattaatcttattgaccgatttctttctcaacattatattgaaagacagaaactccaacttcttggaataacaagcatgctgattgcctcgaaatatgaagagatatgtgctcctcgtgttgaagaattttgtttcataactgacaatacatacacaaaagctgaggtgctgaaaatggagggcctggtgcttaatgatatggggtttcatctatctgttccaacaacaaaaacatttctcaggagattccttagagccgcacaggcttctcgtaatgttccttcaattaccttgggatatctggccaattatcttgcagagctgaccctgatcgattacagtttcctcaaatttcttccttcagtggtggcagcatctgcagtctttcttgcaagatggacacttgaccaatctgacattccatggaatcatactcttgagcactacacttcttacaaaagctctgatattcaaatatgtgtctgtgctctacgggaactgcagcataacaccagtaattgccctctcaatgctatacgtgaaaagtataggcaacaaaagtttgagtgtgtagccaacctgacatcaccggagctggggcagtcactcttcagctgacaaaggcaatggtatcagtttcctgttaatcaacaaccgttagcagcagtcattaccatgactgctttctgatttgttgtgttgtcctgaagtgttgtttcccgaccattttagagtcgtgcagtaaaaaaaaaagaaaaagaaaaggagagatagcttgcatttgtttgaccttaagtatgcctttagttgataattgtaagaaaacactcactgtgtgtaggctgccgcctttgggttgataattgtaagatgatcctgcttgtataacaaatggttgcttggtttgaccgagattatgtt

SEQ ID NO: 9306 - DNA, 2362 bp, Oryza sativa
  ref <308>: DATABASE ACCESSION NUMBER: AK106654
  ref <309>: DATABASE ENTRY DATE: 2002-08-28
ctctcgctagctacgaagtccacccgaagaagtcgccgtgcgccgtctccctcctccgtgcaggccctcgcctcccctcggcggggccaagggcgcagcttccctccgcccagatcggcacggtggccctccaccccgtgcggcggagtccccgtcgacgtagggcgtcgccggccggtcctccgtccagggcagcgccggccacctcagctgtccagtgtcttccgaatccagggccaaaggttctgcttgcttcccctcaatccaacatctattcctccccgacgtgaacgtcgccggtttccctctggccaaggtgagcaaatgctgtttaatttggtggtagtagtacttggttgaagcaactgctgaaattacttgtctggtacatgtgtgcacaagattgtaattttgttcggtttgaggttcaattacaatgatcgatagggccagacctgaaattgaagttaaatgctactagtaataattgtactagttgaatataaaagaaaccataaaaatcaacaaatgcagatgaatctgtttcagtttttttttgaacgccgctgttttaggttttaagttacctagacagagactttcagtttgtttctttggttcagaattgtggaactttaggagcctatcatgttttgatctgttcattaccatgtatgtgatttatatcgtggaagatgatggcttggcggtatagtttcagtaatctgaaaatcaattcactgtacagaataagagtgctccaacttcagcctcaactttttatattcacatttataattttaagtactagtatatttatacatagaaagtttatgttgttcctctgagatttgatgggtcagagtaaaaattcagttctatgattcttggacagttcagtgtgaagtctaattctttttcagttcagtgtgagaacatggtaatgtgctttttagcatggaggataatggcttgtcattatagtttcagttctatgaaaatcaattcactataaagaattgtctgtagctgcttatgtgtacatctagcaagcccatctgcgtgcgtggaaagaaactcgctgcccaccgtaaaaaaaatcgatgcaacaaaccaaccactcatcccaccttgctgctacgtggccaaccaactaatttttaggatctgattagtggattttgagccgcccaattctttttggaatggtcccaatccatagtttttgggagctaatttttagggaatgtgttttaaaacatttattttgagttgaagagccataatagaaagtgccatagtacattacattttttttttcattgaaagatcatgtacattttcatgactcgaaagtttactcttttttcagtactgaagtctgaagatctgtttcatccaccctcctattttttttttctaataatggaacgggtaatggaatgtgattacccggcttcaaagaagaacaaagtggttcatccaatggattgcgagatgaaggaagagccaaccaatgcagcaagcatgaatcagcattctctctggagccagtggcagctcctggattccatcctcccaactggcgggttcgcgcattcgtatggccttgaggccgcaatgcaatcccgcatggtgaacaacccagaggagttgaggtcatttgttgtccaggtcttggagaacactggcagcctgttgcttccatttgtgtgctgcgctaacaagtctcctgatgccgcaacgtgggtgaagctcgatcagttgctggaagctatgttgacgaatgaagttagcaggaaggcctcgatgtcgcaaggctcggctcttctgagagttgctgcttctgtattcactgagattcagtcgctgcaggatcttcgacaaacattccttggttccaagattgtgtcgtttcaccatgcaccgatatttgggttgatatgcgggctggttggattcgacagcgagacaacgcagcgtgcctacatgttcgtcacaatgagggacgtgatctctgctgcgacgaggctcaatttgatcgggccgctagctgcttcggttctgcagcaccaggttgcggaagatgctgaaaggatggtgcagaagtggaaggatcgcggtgtcgaagaagcaacgcagacatcacctctgcttgatgcgttgcagggttgccatgcttacatgttctctaggctgttttgcacctgacaaggaggtgtgcttcatctccctgtttctttcttttttatacataatcccctcgatgtgtttgcagagttgccatgcttacatgttccataggctgtttctgtacatttgttttgaatggattcacctcaataaccatgtcaattttatg

SEQ ID NO: 9307 - DNA, 838 bp, Oryza sativa
  ref <308>: DATABASE ACCESSION NUMBER: AK106655
  ref <309>: DATABASE ENTRY DATE: 2002-08-28
atttctcctcaaccccccctctctctctctctcacacacacacacagcaaggtcgcggcgggcgtcggcgacaccgaggaggcacgcggtggcggtggccgagggcggcgcggcgtgaggcgggcggtgggggcgacgaatctggcaccgtgcggcggcaggctagggtttgggatattttagatttttattttttttgtttgctgaatttattttcacatgcggccggtataagcaaccgcatgcgaaaataggattttcgcatgcggttgggccggccgcatgcgaaaagggtgatttttgcagacccttctcccccatgcggttgccccaaccgcatacaaagatgccttttgcccgtatgcaaaaagcctttctgtactagtgtatttagaaccagatggagctagcacaaggtagtaagggtgtgtttagttcacgctaaaattaaaagtttgattgaaattagaacgatgtgacggaaaagttgaaagtttggccgagtttaggccctgtttagttccaaagtttttttttccaaacttcctactttccatcacatcaaacctttcatacacacaacttttcagtcacatcgtctcctatttcaatcaaattctaaactttgggccgaactaaacacaaccttagttccaaactttttattcaaacttccaactttttttatcacatcaaaacttttatacacacataaacttccaacttttccgtcacatcgttctaatttcaaccaaactttcaattctgctgtgaactaaacgtaccctttatgtgtgtaagaatgttttgatgtgatggaaaagttaaaagtttgaag

SEQ ID NO: 9308 - DNA, 1777 bp, Oryza sativa
  ref <308>: DATABASE ACCESSION NUMBER: AK106656
  ref <309>: DATABASE ENTRY DATE: 2002-08-28
gctgatctagtttaaaaggcagtcatttgtgtagataatttagaagctgcgtaggcgctctctatattatagataatgcctttaaagccaactattttaaggtaatttaatttgggacttaaaaaaaataaacaaccttgcctttggactgagctatttgagaaagtaattgacgagggagtgcccggcagcccgccccctggcggctgcgaagccagctaggaagcagacgcagaagccgcagacaggaccaggaccctggacagggacagcagccggcgaggaaagaaggaaggagcagcccagcagccagtcagcttggtgaagctaggaaggaggtcccagcccctgacaggagagcagagcagcgcggccccctaggcgagccaggaccccagagcagagagccgggcaggaggcgcggcagcagcagatgcagatgcggtggagcaaggacaggcaggagggcaggaggcgcagctagctcggcgcggttggtgaattcagctgggagccagcgtggccacgataggggccttagaggctgcagcagggccctgagcggtggtaaatgcgggaagttttgataagccagtaattaatgccttggaatgtggggaaggggggtgcatatagtatggctgtggtgtaggcacggcactgggactgcctagctgtggatggatgatgtaacagttctctcttgggggatgtttggctgtttgggggttgttgtaggtttctctttttcagtgcatctgtcttgtctgaagcttttgggggcagtctgccaaggcctggagagtgttactgtctgcctaattaggattcctgcaggtttcctttcaatgctaagaatgaatggtagctagccattgtattgctatactgtaaaggcaaagcaaattgggggcaatggagtgaacctgaagagagagctggagaccccccgcaccttgttgaggaagtgtataagccactggatttggaagcagttaagttcatctttcagcttggacaaattctgagtattttgattttatgcctaaacttttttttcttcccacccctcaaatttgaattttctaagtaagaatgtttttcttaaaatgttttggggggcttttaaaggggagggcaatatttttgttcagttcttttcccccaggtattttctagagctcaaggtcagatgactcgaatatcaaagaaaaagaagccagtatcaggataaacaaatactacaaaactgaaaggtttttaagcactttctagaaaaattaaagcttttaagttaagctctccattaaggtgtgctggagctggaaaaacggctggtagttatgttttcttttctcaaacagactttaaagctacagatttccagatgatttatgtacttttgcgggagtattaagttttcctgagatttttatgggtgggggtagatgactatgagttgtttctaagacctttcccccccacagatgactagtcaaaatgggtagaagcattgattcactgctgtgtcagagatggctgagctcagcttttttaccttggaagaattggaaaatgcagcttgtgttgctaaagttcagcccaccccctcctggagaagagccaataggccagtctggcaagtgaaatgttcaggaagtccaatgagtcgatgaaggcctagacggtggtattcttggggccttgggggctggggtaggtaattgtttatattttcagattactgaaagccagagagagcctaataacttagacg

SEQ ID NO: 9309 - DNA, 1516 bp, Oryza sativa
  ref <308>: DATABASE ACCESSION NUMBER: AK106657
  ref <309>: DATABASE ENTRY DATE: 2002-08-28
actctctgtctcactttacctctctctaggctggcgacaggcgacgcggtggcggcggcgacgtgggaacaggcctcccatcccgacaaccaacgcctcgctcttcttcacctacgacgaggccacgcacccgctcacgccgccggcctcctctgtttgtgtttggtgagtggtgtttaatcggtgtcggtatttggtggatgccgtgcaagccgagcggatgcacgcggggttggaggaagcgcagcgacggcacgtccgggcgctggtggcggccgcggcgcgcgccacaacagggaggacgcgtgcggcggaggccaagctggatcgcgcacgctgccgcaacgcggagctggaggagaagctccgccagatgagcgcggaagggcaggcgtggatgggcgttgccaagagccacgaggctgtcgccgccggcctccgcgcgatgctcgactagctcctccagtccccctatgccgtcgccgccaccgcgggggagggcgacgccgaggatgcgcagtcgtgctgcttcgagaccccaggcggcggcgccgccgccactgccaccgacgcggtgtccggggcgacgtcgtgcaaggcctgccgtgtcacggaggcgtccgtgctgccgcctgtgcctgtgcggcgcctgcgaggccgccgttgacgcttgccccgtttgcgccgccaccaagatcgcctccgtccatgtcctcctttcctgaagtcactcacatgtgccacaccagctactgcatggagtaggagatttcgatagcgcaacagctgtggccagaccgaaaccaggcatccgtcagccaactccggtgtcaagcaagctaacaacaatcatcctgtcccaagttacatggaaattcatgctagggaagccacagttctgtgcatcagcgatctccgggccatgcgagttttgtcggtggaaacaacagtgttcggtgcggtgaattgaatggttgattgcctatctcatcttccgcaggtaccattgcttcgaatatttggcagcccggataggcatgcacgccgtcccgtctccccgtcggccgctgctcgtcggttgtcctccccatcagctgcctcccgtcctggcaccccttctccccgccgatcctcgcctgtcgacgacgtcccggcgccgctccccatccgccggccaccgcagctccgcgcctccgcttcgccggccgccgcgcgctcacacgctgcctccgccgtccgccgctcaacccccctcgccgtccggtcgtctgctccctacccgtcggccagcctgcaagagaagagtgcgagagagaggggggaggaagggagagaagaagaggggaaaggggaattgacgtggcaagcccacatgtgggtcccacgcgccacgtaggctaaaacagggtcaaaaccactaaaggatctcgggtgactggttttgtatagttaagggacacctcatatctggttttgcggtttgaggatgtttttgtatccgatgacaagttgaggg

SEQ ID NO: 9310 - DNA, 2008 bp, Oryza sativa
  ref <308>: DATABASE ACCESSION NUMBER: AK106658
  ref <309>: DATABASE ENTRY DATE: 2002-08-28
cttacgcgagagggagagagagagatcccgagctcccgacccgagcgacacgctcgcgctccttgccaatcttgggcctcccgagttttgctgccattgccgctcgctgctgctctcgagtgcgcgcgtgcgtgcgtgcgtgttgcgccggggggaatggggatagtgagagccgcggaggatgtggagggcgcggtggtggccggagccgcgggcggcggcggcggaggcggaggcggcgaggtgacggcgccgctgctcctccggcagcacaagcaggggcggggcgatgaggagaagatccagaatgatgcgggcggcgatggcgggggtcggcgcggaggaggaggaggagggtccatgtcgatgctgatgctctccaccgccgtcgccgtgtgcggctccttcgagttcggcacctgcgtgggttattctgcacccactcagtcagggattgtggatgaagttggactgtccatttcgcagtttgcactattcggatctgtactgacgattggggcaatgattggtgatgtcactagtggtcgcttagcagattttcttggacgtaaaatgacaatgcggatatcagctactatttgcatttttggatggctttctttgcatttggctaagggtgttatcatgctctactttggaaggatattgttgggctttagtactgggattctttcttatgtggtgcctgtgttcatcgctgaaatagcaccaaagaatctcaggggaggccttgcaacttcaaaccagttgctgatctgttctgggagttcagctacatacataattggcgccctggttgcatggcgtaatcttgtgttagtaggtatagtaccatgtgttttgctattaacaggacttctcttcattccagagtcaccaagatggctggctaacgttggaagggagaaagaatttcatgcctcattgcaaatgctacggggagaggatgctgacgtttctgaagaggccgtcgagattaaagagtatattgaatcactccataggttcccaaaggccagggttcaagatttgtttctcagaaaaaatatatacgctgtcactgtgggtgttggcttgatgatatttcagcaattaggagggataaatggtgtaggcttttatgcaagctctatcttcacttctgcaggtttctctggaaaacttggaaccatcttgattggcattattcagattcctattacattgttcggagccattctaatggataagagtggaagacgggttcttctaatggtctcggcatccggaacatttttgggctgctttctgacaggaatatccttctacctaaaggcacaagggctattctcagaatgggttcctgaattggctcttaccggtatactggtttatattggagcatactcgattggaatgggccctgtcccttgggttgtcatgtctgagatattctcgattgacatgaaagcaatcggtggaagcttggtgacactagttagttggttaggttccttcgcgatttcttactcgttcagcttcctcatggactggagttctgcagggaccttcttcatgttctccgcggcgagcttgatcaccatcctgttcgtggtgatggtcgtgcctgaaaccaaagggaggacgctcgaggagattcaggactcgctcatcgactccagatcaagattgagggatccatagaccatagagatatgatccacttgctccactctttctacctgagccgccgtcaaattcgacgcacctctctctctcactctctctgtctctttagcctcctgatctttctctctccggttcttggcagttttgccgtagtgtactcaatacctagctaggctaagtcccgggctactacgcatgcaagctatgtataccatgtcactctgaattgtattgagcaatatatatatgggacacacacacatatgtgtgttctgaggctttacgctgttttgtcgtgaaaaaaaaaaaaaaaaaaaac

SEQ ID NO: 9311 - DNA, 1138 bp, Oryza sativa
  ref <308>: DATABASE ACCESSION NUMBER: AK106659
  ref <309>: DATABASE ENTRY DATE: 2002-08-28
attctacgaacaaaaaccccagaatttttccgatgattccttcgtattcgcgtttcggggctgacgaaacccaatccaccacccaaaaaagtagcgagtctccgatcgaattcgccacccagtatctcaatttcgttcgtgcgaggcatccgtgttcgatttgcgaaggtgaattttgatcggtttggtttggatttttggttttttttttctccatcagatggatggattggcgccggcggcgatgtcggaggcgctgctggtcttcgcgagcgggagatccatcggcggcgccggtccaggacgacgacctcatcttcgccgcggcgagagccgggagttcgcgtggatctacgactacgaggatgcgccgatgagtgcgccggtgtggtgagaggggtttgggcagctccaatctcgagtcgaggcgcccgctgatggggacgaggaggtcaatggggatcgagcgtggcctcgcggctcgcgccgtccatccccaatgggaagaagggtggtggtatgaagattctagggcgaggaaggacgattccgatcagggggcgctacctgtgtaatgttaaaatggtggcttggaggggcaggacaatgctcagggatttctccaaggtgagggtgcaggagactgaagaaaaacagggtttgggaattggttattgggttgatgcactgcaacagaagctgcatttctcgattccgctggtgagggaaggggatgggtcgatagaggttgttgcagacaacaatggatggagcttcatgggtgaggatgtggttgcgcgatcagggatatcgaggaagagtaggatgtagaaggcgagggaagccgaaacctctctcaagctagaaggatgattggctctcctcagtgtttcataggtaacattttacagttcgttccatgtaaaccttataccttaaatagggctaatagtttacaatcaatttagtaggtttaatgatgatctttacacacttctgtataagcaacaaaagtattagattatagcataccatgttccttgtgtacttattattgatttaacttcagagcctatgaatttaacttgtaagcaagataagtcacttttccaatctgtacacttgttgggccatgttc

SEQ ID NO: 9312 - DNA, 1857 bp, Oryza sativa
  ref <308>: DATABASE ACCESSION NUMBER: AK106660
  ref <309>: DATABASE ENTRY DATE: 2002-08-28
aaatccaatcctccccccaccatcggacagcgagatggtcatggagatcccgagctcgaagcgcgacatggcgcggggagcggaggacgacggcgaggaggaggaggaggaggagtacgaccgcgtgttctacgaggacatcgaggcgcccaagttcgtcgacctcaccgcccccgacgccgcccgcccctccgacgacccctcctggttctgcctccgcatcggttgtgaccagaaccacgagcatgtcgacccggaggcgctgcacaggagcttcttcatgcgggtcatggcagcgaggagccccaacgtgcggctgcagaaggcgatcaggaggaggaaccagagctcgatgctgaaatgcccgcactccgcgccgccgaagcctccaaggtcacggatcgcgaggctaagcacggcgacggaggccgcggcgaagcccaggctgaagacccaccggatttgcaccctgcgggcgtctccgacccggaccaaggcggcgaaggtggaggcctccggcgcgaggaagaaagccctgacgacgccgaggagcaagcccgtccggccgaggcaggatccgttcctcagcgtgaagcaccagaagcaggagcccgtcgcggcggcggcgaggaaggggaccgtcgcgaaagctctgttcatggccacgccgaagaaggacgccagcaagacgccggcgaaggcccaggcggcgccgccgctgtccgaggtctgctccaagatgaggaagctgaatttggcgtgccgggaggtgcctagcagatacctctgtcagtcatcgaatccgaagagttccaagaaatgcgaccagactgcagtgaagagtgtcaaggcagctcaaaattccaggccggatgagaggaagaagaagaagattctaggctgctcgttgcaacatgccagttctgaagctggtagagagaacagaaatggccgtgagaacacagctgcagatgagaatgcttgtccagaagctgcgagctccagcgaggaaccgaaggaggtgatgcaggaatccagaattgaggtggagacatcacaagctgacaattgtgatgacgataaggagaatttgtcatatgttgatcagccaaccgaacaaatggtgatcatctcgcattctgatggtgaaaacctgcagcagctggagaacaatgagaatgtccctcggaaggtagccaaaatgcagagcaaactgaacgcagagcaaggaggaaagctcaagaaaactaccaatccgaagccatttcggctaaggactgatgaaagaggagtgttgagagaagcaaatccagaaagacaccagacgctcaccgagaacaactccacggccgcagttcagcaaataggaaggtgtcgtgacggaaagggacgagacaaaccgacgtgcggcgagaaacagaagaagcaaatcagaaatgttgcaacgggtcaggttgatgaagccaaaagggtcttgaacagcattcgttgcaacaaggtgaagcctgcgatgacgaatggaaaaacagttgggaaatcacagggagcttccagagtagcatcatcaacaagaagtaccaagataacaagtggctccatggcaccttctaaggttggaaaagagaagagtacatcggtgaaactatccaggctacaagcagctgctgcttaactgaagtgacaaatgttttattgtcagctccaagcatgaaaatatgtatttaccgcgtcgaattcgttccattgtattcttgaactactctctagtctgcacactcactcacaccaacaaggatgtatcatgttcccttgttttgtccgtgccattggtatgttgagtgaaatttttttctctgt

SEQ ID NO: 9313 - DNA, 1856 bp, Oryza sativa
  ref <308>: DATABASE ACCESSION NUMBER: AK106661
  ref <309>: DATABASE ENTRY DATE: 2002-08-28
gtatagaggatctcaatcccttgctggttgcaatagcacgagaaatatatataaaattaaggcaaaacggtgggagggcggaggtggttgaggtgaagcgaggcctcgccgcatctaccggagcggcgtagccggcgatcggagatgacgatcccgagaagaaggtgatgtccaatcggagaggattttagggtttgtgcgcttgcaacatcgcgtgatgagctcatccgaggatgacttgtacttggcctgtcgagcagcacatcccctccgtgatctgctccaggacgccgcgcctctcctcgtcgctccacgcgtcgtctctcgccgccgcggcctcccaggcgccggggcccttgtgctcgacgtgcccacgcttgtacagcgcgacgcggcgcagcgccgacgtcgacgcctccatggcgaacctcacgagctggacatgccgcctctccgcgctccggaagcccatcaccaccagctccttcaaatggcggtgccgcgaagccgagttcggccatggcccggctgcaccacctcctcttcgctgtgatggtggacatggagggtctccagcaatggcgtcgcctcgacgaggaggcgtggccacgatgcgtcccaggatggaggcacgtcggcgacgaggagccgccgcagcttgggcatcggggcgaaagggctcgtcggcaagaacaagatccacatgtacggcccggtgaagcgcaggacgagatcggtgatgccattggcgttctggaggaactccctgatgctggggatcaagaagcgcagcctcctgcgctctatggccgggaacagctcgtccccttgcagggagccaatggcgtgctcgaggctcacgcgctggaggtacggcgcggcgtcggggtgcgtcagaaacacggcgtctccattgctggcgaggctctccagcatggggagcgacctgatctcgaccgccatgtagccgccgtcgacgacgagctccctgatccgcgacatcggcgcgtccaaggtgagcgggcacccgaatttccgggacctgcaggagctgagatgcagggattgcagctgcgggcacgcggcgaccacgcggtacacggcgggccgcgtcgagcacggcaatccttgcaggacgagagtggcgagcgagccaaacccctgcagcggagggggcaggcagttgcgaagcttgagcctccgcagccgcgacgcgccggggtcgcggctgatgcggcgaagggggaagctgtagaccggcggcgggtgcatgatcggccccgtcggcacggcggacacctcgaggtccgtgacgccccaggaatcgacggcggtgacgaccagctggttgatgcagggggaggcgtcgaagtcgaacacctccagcgacagcctggtcgcacgccggcgagccgccaagagggccctgacggagccggccatggcgcgcatggcgcggcgctcgtaccgcccggtggcggcgtctagcctcgcgcattctcctcgcgcgcggtgaccgacctcctggccttgccgcggatggcaaggcaccggcggtagcgcggcggcagcaggtcggtgactcggaaatcgagggcggggagctcgcgcgggacggccgcccagcgccttgacagcgcggcggtggcgagcgcgtcgcgggtgtcgaggcggcgcaggatgaggtggagcaggtcgtccgggagagcgctgaggcggtcctcgccgcaggctcgccgtcgccgccgatccttgttgctcctagtcctagccatcggagaacaaccccccaagtggagtagtattgctcttgctctgctctaatttctaaaattcagtgatgattcgtggtgggg

SEQ ID NO: 9314 - DNA, 512 bp, Oryza sativa
  ref <308>: DATABASE ACCESSION NUMBER: AK106662
  ref <309>: DATABASE ENTRY DATE: 2002-08-28
attgcacggcgagcgacgatgcggcggacggcggcgtcgctgctgcgccacagcggaatcggcggcggcggcggaggcagcgggggaggcatcccgcaggcgctcgccgacgcgctcgtctgcccactctccaagaagcctctcaggtactgcgaagacagcgggtctctggtcagcgacgccgtcggcgtgtccttcccgatagtcgatgggattccttatcttgtcccaaaagatggtaagttgctggaccacgaccaggacaaatcagaagattgcggtgcaaaggattcttcccacaggcattgaacaatggctcaaatatctgcatttctgttgtggtaatagttggtaagaataaaacttttgagataaaccacaacctgcgtgctcttctaattgcttgttgcttcaataaagcattcccctgctgatgggcactgaccaatttgttcatcaggacaaagaaatacttacatggctactcatgattcagtggtgtttgatttttc

SEQ ID NO: 9315 - DNA, 1654 bp, Oryza sativa
  ref <308>: DATABASE ACCESSION NUMBER: AK106663
  ref <309>: DATABASE ENTRY DATE: 2002-08-28
tttcgtgagcttcaaaacagcggggaagaaaagaaaagaaaaatcgatccagatcggagaagcccagcgccgcccctccgcccgccgccgccgccgccgccgcctcgcgcagtcgagcagcatcacagcgggaaggcttaattaccgccgctccacgcgtcgggcgtcggcgccgtggtctgatccggcgagtcggaccaggggccagcagctagctgatccggggagtcggaccagggggcagcggcgaggcggggccttcgaagatgatgtcgccgaggccctccgcctctgccgcaccggaaggcggcggcggtgcctccacctcccgctcggtgcccacggcgaggtcaacaccgttgcaagttattcatattttgggaaactttgctagaatttggtctgtgtactccctgtataactacctgtctagtagtggggattcaatggtcggcttcatcttcagttgccttgtacctgcttcagtcatcttcctggctttgcagaagccttggaaaggccggcctctgcccaacacacaggttgttccgacagttatcaatggaggaattctggcattgtacttcgtgctgtggggtaaaggacttcttgcttgcggaccacttgtcgctctgctggcggagtacgcaggtgctgttcttggagttctctcagctgctttatatggaaggaaagttaacatatggaagaagattggtgggctcgctgctatgctggtagcatactatctcttaggaaatggatgggctacaagaacacattcaccactatatagctttggaagtgaatcactggagaagggaacacaagttattggaatgaaagaaatggtggtcccacttactgctggaattttatctgctttgaggagagtattagctcggcgggtgtcccttaagaatcaacttaaaaggcgacttcatgcaattaatgttgcttctgctacatgttttctttttccttttgcaatgtgggatacaatcctgggctcggcatctgacagcatagttaaactgcagtttccaagctgggcgtacttgagtactgttttgtttggaatggtgcttatattctatgttgacaatgttgccgaggaaaaattgcatctggtcttctcttctccaagacatctaatggtttcaacaggttgcatcattgttttggagatactgtacaaaatggatttctcccttttgggctttctgctttgttcagtgattttaggatttggcatttttgaagcaacatccttggagcgctcgaagaaaagtcctttggaggcacatgaactatcaaatggatcatttcacaaccagttgccaatttctgcacttccaagctaaaagtattaaatcggggtaagttgcaccaaaaaccttgggttctattgagtgtgatatcaacctactatgttttgaatgaggttgttatatacagtaacactaagatctcagcttcaaaaaatagagttgcttggtatgctgtttgaaattgaattagtatcgacttccatatgttgggtttcagtcatggggtggaaaaaagaacaacagagaagccttgaatgttaaaccagtttgtctactcatctcattaacactatgatgctaatttgccctcttattctgcagct

SEQ ID NO: 9316 - DNA, 1475 bp, Oryza sativa
  ref <308>: DATABASE ACCESSION NUMBER: AK106664
  ref <309>: DATABASE ENTRY DATE: 2002-08-28
atcggtggtatgtgcaggcggtggcgctgctggtggtgctgaaggcggcggcagggtctgcggcgccgccgacgacgacgaggagcaggagcagcagcacggtggtggccgggatggtgttctgcgaccagtgcaaggacggcgccagaggcctcttcgactacccgctctacggttggattgcttttgcatttgcatataaagatactacaatttgattgcaataatccatgatgatcgatgatcatgggggcggcggcgtgcttgaggcttgagcaagctacctgtccgtcatctactctactgtgtgcagtgcatgctattctccttgcctacctaacctgatcaattagtactttacttcctttattattctttccttcagaaatttgtggttaatttggatatgctgtaaaatggaaggaatgcatttgtggtgggtgcaggtgcgcgggtggcgatcgagtgcggcggaggggagagcccggtgacggtgcgggagtgcaacaccaactggttcgggggattctccgtccgcatggagggcacgcccgagatgaaccgctgcacagcgcgcgtcgtccaggccaccggccactgcggcgccgccatccccaccgcccctcgcgacctcaccctcgccttccgcatgctcggcctcgccctctacaccgtccccccactcctctcccagccgctccgtcccatggacttctgcccatctccattaacatctccatctcttcccgccctcgcgctcgccccctctccgattccgactccaatcatcgcgccgccccccgtgtcctcgccggctccccctctcccgcccctctggcgccgcaggcctcgccgcctgccgcccatctggcgcccgaccccaccctcgctacccgttgacaccatgccgccgccgccgccgccaccgccaccgcagccgcagggctccgcctgcaccttcgacaagtgggcggacgttggattgcacgggtgcaactggaaggtggtgacgcccaacacgacggtggccatggcgttcggccccgccgcggcgcagaggtacggccccgacatgacgctgcgggaggcgctggacgggaggggagacatgtaccggacgctgctgcgggaggccacggcggcgctcctcaatgcctactacaaccccagtggctccggcttcctgtaccccaccaccgccagcgtcatcgaccacatcaacgccgccctcctcacccccacgctccacaagcttctcctcgagggtgcgcgcttccgccgcgccaactccgactccaacctgccctgccacctcaccccctgcaactaattactactcctgcttgcttactcgatcgctaatgcactcgtttttcattttattactcgctacgctaatgtattactagtgtctcgactcaatacttaattggtggatggattttaatactacactactactactggagtactat

SEQ ID NO: 9317 - DNA, 1503 bp, Oryza sativa
  ref <308>: DATABASE ACCESSION NUMBER: AK106665
  ref <309>: DATABASE ENTRY DATE: 2002-08-28
tgctctatatggtctgtgctgtgctcccctctgtgcctggttcgctgtggggatgtgcgtgggtgcctgtctaccaacggagctgacgctcgatggcccacctggtagtcactttggtccatggtgcgccggtgctaggtagtttcttccctgcctgacaggctttccttttggtacaccgcccacttttactcaggacaatgcactgtctctctgtgtgagacacgtctattcgtggttctcctaccaacgtggtgcaccatggtcccccatcacacaggtgctttcctatatgcgtgttccgtgcgctaggagcacgttcacctaacaccattgaaagtagctgagaaattatccgctggttaataccacaaaaatcctgatgcacatgcatctattcgttgcagtcagcgacaggtggggtcaatttcgtgtgcttccccacctgccatacactatgcccatccgggaggttatagctgtatgatgccatgtttttctgtgagcgccgcgcgctacgccaccgcgtgaggcaccatcaaatcgacgtccatacacaccgtaccggcgtgcgcgcgagcaccgatgcccacgtcatggtcttagcctttccttctcctcttcatacccggttcgttagttctgctcgaggctgttgctggttcggttcgctggtgtgctttgctcccgttttgccccttttcgctgttgcgcacatggcgagcaccaggtgatatgctgccccatatgtctttcgttccccctgactgctattctgaatgtgtatgcgtgtgcaggggacattgtggatactgcgtcgacacttaggatttgccccgctcatctagtgtacgactttagctcctcgacgccctgttcatttcgctcgaaggtcttggtggggttcgcgctgtaggccaggacgctcggccgaggtgactctgcccattggcttcttcgctagcccatgtctgcacgcgttcctcgatcctacgagtgttagctctttctccaagatggcggctgtgggagtttcctttgtttctttgttgaatgccgtcgcatggcattgtcgcctgccatccgtctcatacctctgggagctagatgggaacgatgctctgccatccgatgagagtcccagcaaaaccgccaagtatgggttcgcagtccacgactacaacctgcagactttgctttcataccgtcaaatagctgcctctgcagtcgatgcagctcttacggcctcgacgcaccttgctaggtttcgggcgcgctatggtcccatggatctgtcatgtgagtgtattctgcgacagtgcattgctctgtggtccaattttgttaaggaagaccacttcttctatagcacatataggccatagaagtagctactgcaccaaacaattgtgttttaggatacgcgtttcgtaaaactatgtgtaatagtaccttttcttcagcgtatctgtttctaatggatgagtcgttgtttggatttgt

SEQ ID NO: 9318 - DNA, 2112 bp, Oryza sativa
  ref <308>: DATABASE ACCESSION NUMBER: AK106666
  ref <309>: DATABASE ENTRY DATE: 2002-08-28
tatatgaagaggaagcaaaggatcagatccaagacttgtaaagttattgtgcgacatgttcaagaggagaaattgcaagcctttccatgtcttccatgcccactgtggtatagctccttggatctggttatgtgaaatgtcaagactaaacatcttatcgagatgcttcaagatattgggaaaagtagacatgctgcaagatgctaaacttaagaactccaaattggggaatgacaccagtgatgaaatattttctccatctaccactactagtttattgtttgagagattcaggacggataggtttttcagttttgagaatgaggtgagttctattgtgccgtcaaaattgttcgaatggagcacgagagtttccaaatgagtcaaatttaagatctgcggaggcaccttccctgaaaacttgcagttgtacagtgctaacttaatcaattcccttaagtttcctattgaagaaggtacatgtccagacaatccgcagttggagaactggagaacagtaagagaagttaggttggatatccatgacggcatggatcctactatctggaacccagacacttctagcaaatccaagtataggaagctacctaacgaagagggcagtgttccagagaaaccacttgcaccaatgcccaacttcttcagagatctgagattgctgatggagctcggaatcatacctgtgaagtttgttctactgacggacaaattctccaagctactgtcctgtgagaaatttggcagattaccagatatgccaggattcttagaaagatcaattgttctcaacttcttgtgctggaagatgatgggaggaaaccatccttgaaacttgtttgtggatagctgaagaacagtgaggttggaaaagccagccaagaactctggcactgaacctgacaataaattgtaatgaagctcgatcgtggtgagcgatcgcatggcagcaaatgatgcgcatacgggacctgacagtgagcagtaaggtaaactaagaacttgaagcttaggtgtgtacttggctatgtggtcacaccacaattcgccattattggacatatccaccattcccatatggagctcctccaggttagtgaggtttgtgagcaaggtctccatgtttggtgctgagagctgcccaatggagtctacagcgtactgtgtgatgctgttttcgtcatcgtaagacacgatgacgaagctcgtggagaggtcgaggtagaccaggctcacgaggcgcccaatgccagccggcaccttgccggcgatgttggtgtccgagaggtcaaggtgtgtgagctcggtgagctgctcgaatccagtggccaggagctgggacatggtgaagatgttaccagagaggttgaggtgcttgagtgaggttaacctgaacagtgcatggtcgaggccgccggcttgcaggttgtggcctcccaagtcgagtgaggtgacacggccatcggcgccgtcgcagtggacgccctcccagcgacagcagtctgcaccagggacccatgatcgaaaggtggtggagtagtcgccggccgtcgcgttgaaggagtgcttcagccggagcagcgcggaagcctggtctggaaggcacattgccggcgtcgtttcggaggaggtcgtcgtaaggtcgtcgagcgtggtggcctggactagctggaggatgagcatcattgctaggagtgatgccacatgatgagggactctcttggagaacgacgacatggtggtgaaggtattttcgcaagtgctgtgctttatccacttaaaaagacacgacacggtgaaatcagtagagggtggtagatttcttgaattttagacgactgtcagaaggactggggtcatgtatcattggttgaaagggctgctggctgttgcctaaacattgtagtgggaatggaagacgtgtagtacatgataactgcagaataccccccaagttggcacacatgtatagtaattgctccagttctgacgacctttgagaagacccgcaaattggacatgttacacatgtataagggtgtgtttagttcatgaactaattagaagtttggttgaaattggaacgatctgacg

SEQ ID NO: 9319 - DNA, 1837 bp, Oryza sativa
  ref <308>: DATABASE ACCESSION NUMBER: AK106667
  ref <309>: DATABASE ENTRY DATE: 2002-08-28
aaaacgtgagggatgaaggacaaggacaagaaataggtgaagctatctacttctcgatgcatctatgtacggaggcggcggtaacacggcggcggctgctgctgcttcttcttctcctggtcacctgcagctgcctgtctgcgagagagagaagcaatagcagcagcagcagcagcaggagagtggtgaggcatctcccggggttcgatggggcgctccccttcgagctggagaccgggtacgtggaggtggaccgcatcgccggcgtgcgcctcttctactacttcatccgctcggagagcagcccggccgacgatcccctcttgctctggctcaccggcgggccaggctgctcggccttctccggcctcgtctacgaggtcggacccctcaccttcgatgtccatggccatggacatggacaactgccaaggctcttgtacaagccggagtcgtggaccaaacgtaccaacgtcatcttcctcgactcccctgtcggaactggcttttcctacgctgacaccgacgccggattccgcaccggcgataccattgctgtccaccacattcacgtcttcctcaacaactggtttcaggaggtgcaccccgatttcctctccaatcctctatacatcgccggcgactcctactctgggatgattgtgccggctgtcaccttcggaatcgccacttcatcacccaaaccatctctcaatctcaagggctaccttttgggcaatccagtcactgatcacaacttcgatgctccatccaaaattccatttgcccatgggatgggtctcatatctgaccaactgtatcaggcatacaagaagagctgcagtgtcaagcacaacacccagcagcaaagcgttcagtgcacaaatactcttgatgccatagatgagtgtgtcaaggacatatacggaaatcacattctggagccttactgcacttttgcaagcccgcataatccgcgcatcgataagccattcacttcagggacggcagaatatacaatgtccagaatatgggccaacaatgatacagtaagagaggcccttggaattcaccagggaacagttccttcgtggcaaagatgcaactacgacattctgtacacttatgacatcaaaagttcagtaagataccatctggatttgacaactagaggctacagaagcctaatttacagtggtgatcatgacatgattatccctttcatcggcacgcaagcctggattagatctctgaatttctctgtcgtggatgagtggagaccatggtttgtggatggacaagttgcaggatatataaggtcatactccaataacctcacattcgcaactgtcaagggtggtggacatactgctccagaatacatgccaaagcaatgccttgctatgcttgcaaggtgggtttctggcaatcctctttgacgatggtgcatatatgtgtaagagaaaattccaggatggagatattacatcacaagaaatttatgattttgctaaaattgtggcgacatttttttccccatcacggttgaatgcttttctcttgggttgcggcggagactatactcgcgcgtgtattatatatgtctgtttcttcacgaagtgcatgaagatttgtcccatgtgtaagatctggagagtgagaacaaaacatggttcaatacagtgcaaatgatggatcgaagagcatactcctacacgtcaatgtaaatagacatgtaacattttattacgccgtcagtgtggcccccagttttgtacaccggaaatccaatgtgttttacgatatcattctctgaatcatcagtacttatttgtat

SEQ ID NO: 9320 - DNA, 1560 bp, Oryza sativa
  ref <308>: DATABASE ACCESSION NUMBER: AK106668
  ref <309>: DATABASE ENTRY DATE: 2002-08-28
gattgctacggcttcaaagctcagcagagctttctgtgttcaacaagttttgtacacctcactcctgttgctttcgcgtgccaattcggatggttttcgctctgagtttttgaaatgggctccgggggatccattccagtcgagagcagttcaaattcggtgatggagaggcccaactcgaagattccggcgatgaaggcgtcgtcctccaatgctgcggcgccccagatgatcatgaacaggagccaatccaggagagacaggaagattgcactgcagcaagacgtggacaagctgaggaagaagctgcggcacgaggagaacgtccaccgagctctggagcgcgccttcacgaggccactcggcgctctccctcgccttccaccttacctgccttctcagacgctggagctcctcgccgaggtcgcggtcttggaggaggaggtcgtccggctcgaggagcaggtcgtcagcttccggcaagggctctacgaggaggctgtcaccatctccatggcgaagagcgcgtacttctccgacaccgaccggtgcacgccggcgcgccatggccaagttcccgaccaagctgctagtgctagctggtcgtctctgaagcgagtcaccaatgtcaagcagacgccaagaaggactattccttccatgaaccatggaggtgatcgtcctgggaaggagaaccaatcgtgtaccaccaactctttcagagatcacagccggttccctctgaaaaccgtgccaaaatgcagtaatccagaagaggagaaatgtgccgattttcagacagttagtgcagtgaaagatcagaaaggtactgaggacaccactgtcattgattcagaaaacatctcgacagaagcaaacaaagtgtctgaggagctattgacgtgcctactgaatatcttctcacagatgaggtcctccagtgaccaagatgaggaccgatcatcgtctccgtcggtttcaggctcctgcgagagctccgacggcgccgcctgcgccggcgacccctacggcgtcctggaattgggtagcagggacattggtccatacaagcaattcagagcagttgatgccacttcattcgatcagaatgtttttgacaacagcaactcccttcttgacaggagattgaagtgagtttccactgatctgggggccttgctccagaagctctcttcagttgacctagtgggcctttcccatcagcagaagttagcattctggatcaacacctacaattcctgcatgatgaatgcttgtttattctgcaactccaggcatttcttgagcatggagcacctaccaccccacaaacgctggtggcaatgatgcccaaggcgacaatcaacgtgggtgggcgcgtgctgagcgccatgacgatcgagcacttcatcctaaggctgccctacaatgcaaagcatgtaagagtaagatgctagcatcattgccgtgtgcctgaaaacttatctgatcgatttcatggtacaaaagattgacgccccgtcgttcgggcgtatttgcaaaagaaaaaaaaaaaaaaac

SEQ ID NO: 9321 - DNA, 3515 bp, Oryza sativa
  ref <308>: DATABASE ACCESSION NUMBER: AK106669
  ref <309>: DATABASE ENTRY DATE: 2002-08-28
tgctgaaggtttattgataataatctagcatactagccttatgtgctgatagtttttgacagaaacataggcatgtagtacaaatgatttgcttgatactaagaaattaccttgtgaagtgaagagtggttgccctcttgtctcccatccaattaaagtacagtcaagcaaattatggccatgtttcttggtccattcatcaagacatgaaagcatcaatgaaaaggagaactgaagttccatgagtgactggatccaagaggctggcaatctggcataacttacctgggtctgccgctttaccaagcaggaacagcagcctctgctagataagttctctaagaaggttgtcgggtgtaagccaaaagatgctgccgtcaggaggaagactgacacaaatcaagacagtgctaatggtgtcactagtacacctaagtgatggtaattgaactgccacaatgggcaattaaagaggtagagaggaaatgccgaagctttctgtgattagtgtcagtggtggacattgtctggtggcttggagccaagtctgctcgcctgatgagtatggtggtcttggaatcaaggatttacatcctgttcggtcgagcactgcatatgaagtggctggcactgacggtacagcaaaatgatcgcgcccatggacaatgctgaagaaacaagaacacaagactctggaaaacatcttcttcgcagcaaaaagggttgaggtaggaaacgtcgtcaacattgatttctggaggtccaattggttgcccagcatcagctcctcgatgccatgcctgtcctgctttgtgtgccaagatggtctcttggtaactgagggtctgacaaactgtcgacgggtgaaggatattgtgggtgcaccatcgtgtagaactttgagctaatactttcaggtatgggacttagtagaagagaagaaactgaaccagcgagaagaagatgtgtttttctggacaacggcgaggggtggtaacttctcagtcgactcgggtgtacaacatgttcttcctggccagaacgagatggtcttgggacaggatggtctgagagacaagagcaccatccaagatcaagttattcatgtggcttacctcaaagggagatgcctcacggcagacaatctacaaaagagaggttggccccatcatcgacactgccacctctgttctttagcgagtgaggattgtacccacctgtttgctgcctgcaacttcactaatgcagtttgggatatgttgaggaactggctcaacattggttttcagctaccacgggatcaggccctcgatcttggtgagtggtggcttcagtcaagagtgtgttgtcgtgctgctcacaggaaatcctttgattcctttttttcatggtatgctggttcatatggaaggagaggaatgcaggggtctccgagaacagagcaagcacgcctagtagtgtatatggagcaattaaggatgaaatcttggtctggagggctgcgggtttgttcaaaagagattagtccctagttcaacccaaaccttttttcgccaggacgatctcctgttttgtttttttggctacccagcatggtgggtgccaccggtttcaacagcctactgtcattgtaatatctgcatttccccttcaattttaatggaattcgatcggcctcttctttggctgatccagctaaaaaaaagggcctgactgtcatgttgtttttttgaagcaaaatgactgtcatgttgtcaaccactgaaaatgtagaacaaggttttggcatcatcaaacttgacataactgccagccttctgagcaagaaagaagataaggaggagctctttgtattacaatgagctttagactcgcatcttcttcaagaaagaaatgcaatactcaaggtacaagaaaggtccttttatatgcactccttaagctttctgaagtatcatatgctgaggagtttctcagaccatcagtaccaactgccagccggacgagttcacccagcacgattagtgtgagggcctgcgacggcgatcaagatgcgagaagtctgtgaccacgaacgacggcgagatggcactaacaccggcgaccagttggaattggattctaacacttgtcctacgagaagcaggcgtcccgtctggtagtagcttgctagaaatcaaatcttttctcttttcccagcaaccagttggaattggattctaacactggtcctacaagaagcaggcgtgcagtctggtagtagctaggaaatcaaatcttttccgcaagagatcggtctaccaacacaagactggaaaagagatcggtctaccaacacaagaccgcaggcatggcgacaacgacgacgtccaccgtcacgaccatcgcggcgcaggcttatcacgtactgaagatcaacgggtactccaacaccttgaaagccggccgccaccaccccctcagctcctgtccgttcagcgcaggaggccacacctggcatgtcagctactacccacacggatgccgcgacagcaacaaggactgcatctccatcttcctcgtgcttgaggacatcgtcaccgacgaggacgtgatggcaaaagctacattcagcctgctcgatcgatacgggaacccggtgccctcgtgcacctatcacaccaaattacgtaacttttcaacatcttctggtagggcaagggggttcgaaaactttattaggagggacgaattagagcgatcggaatatctcaatgatgactactttgccgttgctgcccatgtaatcatcccaaagaaaaagccatctgtcgtcgtaccaccgtcgaacatgcatctgtattttggtgatctcctcgtaagcaaagaaggcaccgatgtcaagttcctggtcggcggcgagatgtttgcggcgcaccggttggtgctggcggcacggtcaccggtcttcaaggcagagcttttcgggccgacgaagaaaggcaccatagatgcgatacagattgacaatatggaagcacgagtgttcaaggctctgcttgagttcatctacacagacatttggtcagagataggtcatggaaaagacaatgtagctatggctcaacagttgcttgctgctgcagacaggtatggcttacagaggttaaagtttgtctacgaagataagttgtgcaaccatattgatacatgctcagtgtcaaccatgttggtgctagcggagaagcaccattgttgcaaactcaaggaggcatgctctacgttccttagtttcatgagccctcctattgttgaagatctaaattccagcatatttggcagtgaattggagaagacggtttcttcttcagagaaccatggaagtcaaattaaccgtacagatattaggattcaaccgtggcaaaatgcagatgtctaggaacgttatttccagtgctataaaatttgtttactttgtttctaataattatgtagattgactttggacttgagtttttacaagatggtgtatcctt

SEQ ID NO: 9322 - DNA, 1423 bp, Oryza sativa
  ref <308>: DATABASE ACCESSION NUMBER: AK106670
  ref <309>: DATABASE ENTRY DATE: 2002-08-28
ctctttcccctcctctcccttcctcctctctctctccctctcctctcgggcaagctagccggcgggtggggatgaggtcgccgacaacgggcgcgaggacgagggggtcggcggcgacaggggtgaccgggtcgacggcgtggattcggtgacggcggtggcggtgatgttgaggacgttggagatggagatggcggaggcgtagagcggtggggagcagcggaacacgaggtaggcgtcgcaaggccccgtggcggtggcggaggtgacgtcgtactcctgctgcgcccgaggcggcagccgatggccctcgcccgcgccgtgccgcgacggcgaggagaacgaggaggaggacgagcgcgagcatggcgccgccgcctcggatttgccgtagcctcttcgccatcggcgaggtctgcggccgctgccaccaccaccaccactagggctcgggctccgccgccgccaccactcagccgcggcgaggaggacgaggaggaggacgagcgcgagcactgcgccgccgccggccaccgtcgatggctgagaggctacggcgaatccggatctagccgcctccaccatgggcgccgggtgccccagccgacgccgtttcgggcggcggcgagacggaggggaggaggaaggtgtggcggtgaccggcgcgcgggggaggaggaaggtgtggcggtgacctggcggcggccggcgcgcgcgttggatgcggacgcgcgtcgctgtaccggaaccgcctcggcccgctctccacgaagaactcctcgtcggcaagctcgtcgtacaccatctcgtcaaagatgtcaccatcggcgagctctccggctttcctccattgtgacacgaaccagagcacccctatggcgacgagcacaagaagcaagctgtagagtcccaacaccacccacacgtccttggggtcgatgctggtggtgaactcccagtactacacttgctgcagctcggcggcctcgcccgtagcggcgaagaagccgacggtgacggcatcggggaggtactccatcagatcgacggcgtaccagagcacgggatccgtcgggccgccgccgcgtcgccgtaggagagcgcgacggtaaggttcttggcctcgccgtcgtacgcgacgcgctggtgcgccctccagccgtccttcatgctggtgggacagtcgacggtggcagagaagggagagagatgagaaagagagagaagaggggaaaagagagaggaggctgatgtggccacgctgacaggtggggcccacgtgggtcccacgctaactcagctgccacgtaggataaaaccagagtcaaaaccacctaatgacctatcgtaaccggtttcgattagttaagggacgttggatatctggttttgtagttagatgacgatttagtaactcgatgac

SEQ ID NO: 9323 - DNA, 1712 bp, Oryza sativa
  ref <308>: DATABASE ACCESSION NUMBER: AK106671
  ref <309>: DATABASE ENTRY DATE: 2002-08-28
atgctcccttttgtgcgctagcctgccgccgcctcctcccgccggagccgctggcctcctcctagcgcgcgccagcccgctgctgccacctcccgccggagctgctcgcctcctcctcgcatgcgctcggcggaggagcctcaccctacccgccgctgcctgcttccctgttcgcgtgggctggacatccgggcgcggccgccagaaagggcatatgaggtggcggagagtctttctaggaggagaagagggggccattgaaggagggttggaggtcgctgcgcatggcccgtgggcggcggagcgatgaggccgggaggacgtcggcatcggcgaggttgactaagcaagaggcaagcgtcaacagaggtgccggggaggagcaggccgccggcgcggtcgcaggagaaggtgccgaccggaggcagagacgaggacccctaggaccgcacccgccccaccactgctgccatcgtcagcatcctatatgatttttcattgttgttgttatcagggatgcgctggaacgatagcacaggactagggccgctggacatcatcgacgctagcagataaggacaccaacaacaggtcactcttgtcgtcaaacactttgatgatccaaggatagtgagtgcagacttgaaagatcttcttcttcttcaatcaatatctgttcttgtacagtacaaagaattcatgtttctatttgagaacaatcggggggctataaacagaatgctaagatcacttctgtcagcttttggtaatagatcatgatacctattaccaacataccttttcaactctgcaaaggtttaggttttgcttcatccaagaatgctgaatcttcatcatctgcaactttccaggtttactttaatattacaatctcttttgtaattatattcattcttctatttatgttatcctttctgaatcgacttttcaacacattaagttggacaatgactgagttctccatgtccatccatgagatgcaagataagcacctggtggattttttttttgttttatatttcccttggtgcagaacttcaactctttgctgattaatctttagtactcgggttacattttcagtttagtaactaaacaccatcctttttcacatgtcaaaatgcatgaactttatcttagctctgcaatgaaggtatacactaacaggatccttcctctttttgtttggagaacactaacgggatctcttgacaaggataaattccagtaatttggttgcttcagttaattgctttttcaatattttatcccaagggtgtagtcatgcatgtgaaggtaaataattgtaaccaatatttttcaggttgctgatttgcagcaaagaaagtgcatcgttattttttacatatcatgtagtcttgcaaggatcttggaattctgcgccagagagatccctcatgcgttactcatggggccagatatgaatctgcggagattgactgaattaattgtatttattttgaaccacatcatatcagcaactaatgcagagtggttttacatgcaagtccacatcttaatctgaattctgaagtctgaaaattagcagtgttttagttattttaagttgagacagtgatctttaaaggtggttcagtttagtgccagaatctaaaacgcactacttctattgttgatttgagctgactcaagtatgaaccaatattgtt

SEQ ID NO: 9324 - DNA, 2151 bp, Oryza sativa
  ref <308>: DATABASE ACCESSION NUMBER: AK106672
  ref <309>: DATABASE ENTRY DATE: 2002-08-28
aaaacccccaacccaaccgccgccaccactcaccggcgcaaccaccggcggcgacctgatctctctgcgtttgtgtgctctgtttcaagaaacaggggaggagatgatggaggcggtggccgtggcggcggcggtgctgctgctgctgcacgtggcggcgagggtggcggacgcggtgtggtggcggccgaggcggctggaggcgcacttcgcggggcagggggtgcgcggcccgccgtaccggttcctcgtcgggtgcgtgagggagatggtggcgctcatggcggaggccaccgcgaagcccatgccgcccgccgcgccgcacaacgcgctccccagggtgctcgcgttctaccactactggaggaagatctacgggccgacgttcttgatttggttcgggccgacaccgcggctcacggtggcggacccggagatggtgcgggagatcttcctcacgcgcgccgaggcgttcgaccgctacgaggcgcaccccgtggtccggcagctggagggcgacgggctcgtcagcctccacggcgacaagtgggctcaccaccgccgcgtcctcacccccggcttctaccccgacaacctcaaccggctggtgccgcacgtcggcaggtcggtggcggcgctggcggagaggtggcgcgccatggcgtgcgccggcggcggcgaggtggaggtggacgtggcggagtggttccaggcggtggcggaggaggccatcacgcgcgccacgttcggccgcagctacgactccggccgcgtcgtgtttcgcttgcaggcccgcctcatggcgttcgcctccgaggccttccgcaaggtgctcgtcccgggatacaggttcctgccgaccaagaagaacaggatgtcgtggggcctggacagggagatcaggcgcggcctggtccggctcatcggccggcgcagtggcggcgacggcggcgaggaagacgagaccaccaccgagctcaaagacaagcaggacagcggcttcaacgacttgctggggctcatgatcaatgccggcgtggacaggacgatgccggtggaggacatggtggaggagtgcaagaccttcttcttcgccggcaagcagacgaccaccaacctgctcacctgggccaccgtgctgctcgccatgcacccgggctggcaggaccgcgcccgccgcgaggtcctcgccgtctgcggcgatgccgccggcgagctccccaccaaggaccacctccccaagctcaagacgctcgggatgatcctcaacgagacgctgcgcctgtacccgccggcggtggccaccatccgccgcgccaagttcgacgtcaccctcggcggcggtggcgacggcgacgccggaggcatccatatcccgcgcgacacggagctgctcgtcccgatcatggcgatccaccacgacgcccggttgtgggggcccgacgcggcccagttcaacccggcgaggttcgccagcggcgcggcgcgcgcggcgaagcacccgctcgccttcatcccgttcgggctgggctcccgcatgtgcatcggccagagcctcgccatcctcgaggccaagctcaccatggccgtcctcctccagcgcttcgacctcgcgctctcgcccacctacgtgcacgcccccaccgtgctgatgctgctccacccgcagtacggcgcgccgttgatcttccggccgcgccaatctcagccgtccaattagctactattactaggtaggagtactagtattgctagctaggaaaagacaggaaagcccctgtccgttgtgtgcatagtgacacaggaaaaggccaagagacaactaacaaaaggctctgcccgtggcaggggcagggccggattccgaaaatgccctcgctaacagactagtggtacgatcagagcacaacttttagggatttgatgggtcagaaactctcagaagagaagaagagagacagtagtagggtagtagcagtagccccacacatccactgctcggttgcttccatttgttctcttctccttcgcgtggattctggtgtatgtatcgatcaatgcatgtacctgtatgtgtgtgttgtgtacaggggtgtgattattttgattcgggacacccggcacttcacagcaaaggagaattccatttgg

SEQ ID NO: 9325 - DNA, 2323 bp, Oryza sativa
  ref <308>: DATABASE ACCESSION NUMBER: AK106673
  ref <309>: DATABASE ENTRY DATE: 2002-08-28
aaaaggaaccccaccaccgctcttccgcgcttcgcttctctcgccgtctcgcggctgcgcggcgcggcgctctcatccatcccctcctcccgcttcccccacccgccgcccgatctcgacggcggatcgccccgggatgggctccgacgaagacgagctgctcgacgacgaggagtactactactactgcagcgacggggagtgtagcggcggcgggagcgggagcgacgaggatgaggagttcgggggccgcgggagcgacgagggctgtgaggccgacgaggtcgtctccacgcgcgagcaggtgctagatatgttgtgttgaccgaagatgatatacgcgagcgacaagaggaaatgataagccgtgtgtctgcaatattttcagttccaagggaatcagcatgcgtcctccttcgtcactacaaatggagtattagcaagctaagtgatgactggttcgcagatgaagaaaatgtccgccgttctgttggcttgccatcaaatgttgttcatgttcctgactgtcctgagctaacttgtggaatatgttttgaaggatgtgctgcaaatgcaatgagctgtgctggttgttcccatttctattgtcatgaatgttgggaagggtatattagtgctgcagtaaatgatggtccagggtgtttggtgttgcagtgccctgaaccatcttgtgatgcaatcgttcttgaagatatgattaatagtctgacgaaagatgaggataaagtaaagtatgcacgatttgtattatggtcatatattggagttaacaacaagataaaatggtgtccagctcctgattgtacctgtgcagttgagtttcttggtgatggtaactatgatgtctcatgcaaatgcaaattcagtttttgctggaattgtgcagaggaagctcatcggccagttagctgtgacacagtctcaaagtggatactaaagaacagcgcagaatctgaaaacatgaattggatattagcttattctaagccctgtccgaaatgcaaacgacctatagagaagaatcagggatgcatgcatatgacatgcactcctccttgtaaatttgagttttgctggttatgcctaggtgcatggtcagatcatggagatgggactggtggcttttatgcttgcaatcgttatcaatcagcaaagatgggaggcatgtatgatgaggctgaagcaaggagagagagagctaaaaattcgcttgagagatacatgcattattatgagcgctgggcgtccaatcaaacatcaaggcagaaagcacaagcagatctgcaaaaagttgaaaatgaagatcttacaaagttaagtgatgttgttggtataccagagacccaactaaagttcatacctgaagcttggtcacaatcatagaatgcaggcgagtgctgaaatggacatatgcttatgggtactatctacacaacaaagcgaagagtgatttttttgtgtacctccaaggtgaagctgagtctggtttggagcgtcttcataaatgtgccgagaaggatatgcgtgaatttttacctacagcggattccactcaaccttctctttcattgcaagacttcggtgaatttcgtgtgaagctttctggtctaacaagcgtaacccgcaactacttcgagaaccttgttcaaacactggaagcgggtctgcaggatgtccgcgctacagaccaatcagcttcagtcagtacctccagctccaagaagcctcccaccaacaccaaggggaagtcggggcggagtaaggtggcgagaacatcgcaggagcgctcaggcgacagatggccatgcgaccgctgcactttcatcaacccgtcctctacgaactcatgcaacatgtgcggcaggaacaagccccgccgcagataggaagattggtcaaaatgcagttgtgcaaaggaacaccttctcactgggattctggtcgaacaaagtggtgctcatttggcccaacactctggtgctatgaacatgaagcagactctcccagggatctgatgatgctcagaggagatgtaagaaacgaacaatctcaggaatgcagcgcaagaggcttggacaaaattaggtagtagtaaaacatatatgcgtgtgtgttgttagctgtaaatattacttcatggagaaaattaggaaagtaccagcctggaaaatctgcgagttataaaataggattgcatgtgagaatgacatgtggggtcctcacatgtgattgtatttttcaacttcgtgaattcagctatggttcaaattaaaattggcctgtatggatgagtggttccatt

SEQ ID NO: 9326 - DNA, 1645 bp, Oryza sativa
  ref <308>: DATABASE ACCESSION NUMBER: AK106674
  ref <309>: DATABASE ENTRY DATE: 2002-08-28
tggccatccgctccgccgccattttagggatccctcggcgcgtggcctccggtgcggtgatgccgccgcatgaggacgccctcgatgccggcgccgttgacgtgctcaccttcaggctccaccccctcgctgtcttgaaattatcccaccgcatccgcgagttcgtccatctccacgatgaccaataccagcaagcgaggatgtctgggtgcgttattggggttcggcgtggtgggacggtggatatctccgataccttcgacatcttgcacgaccccgaccccggaaccttcgaccgcgccttactggagaaggatcaggagatctacaagaaggccttccctgacttgtccgttctcgggtggtactccattgggaccaatgtgcacgccaccgacacgggaatccaccatggggactacaccgacatgcaaatccaccagaccttgatggatgctaatggaacagccttttatcttctattaaatcctgcaatcaacttttcccataaggatattcctgtgactatttatgaaagagtgttgtgcaattccgatgggagtcccccggtcagctttgtccaaggaaactatacagttgagattgtaggagcagagaggatatctttagaccatgctgattttctctatccaagtccatgcgtagtcttcgatgttcttgcaccacctcttggagaaaaaaaaaatgcatttaggacgatgttgtttgaaaccccttcgggatttgcaatgttccgtgtttcggatgttttatttagatatccggaggacatatggtcgagttttactgatccacatactgcacaccaggtcgttcgtaccattggttttattgaggttggtgacaaatctgttgtatgggataatgatattggtcctggcgaggatatagagcactttatcctaaaatttccaattaaatcattggttgttccagatgcacagcttaaatttattattgagaaaaaccttaacattagctgttggtttaatgggcgtattgttcctgggttgatttggggactaaattatgccctggatgaatttgtgcctcgagagaagggcaacctatcaaatgaacgccattttccactgagcaagcaactgcatgagcagttaaaagcatatggatttagtatctcaccacaattgattaacagagagtttataaccagttttggttacttaaattatctggaacgtacttcaaattgcatttccggagatttacaccagaaatttgatcgtttcttttgtggacttgagatgtctgagggagagtttgtaagaggagttgcacaccgtctccattccatggaggaagtggcatctacaccaggcagacgagaggcattgagcaatgctgaatttcttttggcggttcctaagaagaagtgtaacacgatatctcgtcttaagcgtatggaggcagaggataggggtacagggcttgggcatccttgggtttgcgctgctgctgttgcggtgggcttcggggttatggcaggattgtgcattgcgatgaagcgagcaaattagaactgggtaataggaccaatgagactaaattaggatccgtatgtacggtgacaaacaacctttgtgatctaaagtgaccagtaaac

SEQ ID NO: 9327 - DNA, 1734 bp, Oryza sativa
  ref <308>: DATABASE ACCESSION NUMBER: AK106675
  ref <309>: DATABASE ENTRY DATE: 2002-08-28
aactgctgcgtccactatgacgtgttctgttcggaggcctcgattccaattcgaaggtttcggaatctgaaatggcggcggcggcggtgcgggcggcggaggagcttgcggagagggagatggcggggcgcgacgcctcccacgacgccgcccacgccctccgcgtccgcgacctcgcgctctccctcgccgccgagctcggcctctcctcctcccccgaccgcctcctcatcgtggagatagccgcgctcctgcatgacatcgggacaatgctgaggatatgagcatcgtggagaggtttcttgaagaggtggaactggagcagggccagagggaggaaattgtggcgatcattaaggggatgggattcaaaaatgaagtttcaaagaagtctgttgttgagcctactcttgagtttgcaattgtacaagatgcagatcgtcttgatgcaattggtgcaattggcaagtactgcataaccgaagtttctttatcagctctactcaaacaaagtttccttcaacaattaggatgcagtaaatgttgcactggttatgcaaaatcttttccatgcaccatcttgttttttccccttcttcctttggactctgatggcataaatttatcaagtgtttgccactttgcctcatcatttagtttttcaatattgactagcgcacatatatcattatttcttcctctactgatagaagtacgccacaatctttttcttggttttaataggactgtcacatatgttttattgtcctgagtcttatgctcttacttatctcagcagttgtttccaaatatcatgagtttataagttactgtacctcttaacttgcttcatatgcgttcatatgctaattgcactttacccccttgtcatatgaagctgaattgaaattactgataccacacaaaggcaggatatagggaggaaatttttaggtagcaatgatcccctgaaattgtagacgagcaagaaatagggagagataaaaataagaaaacatcatgtactgttagtttgcaagattgtactgtctaccctgtcctgtccaggtccaagtgtcttccaacgtatgctgatatgggtaatgggctaatgggaatcctactatgtctgtttcaattgagaaatgcatatgctttgactgccttttttggtctcatgtagtatgaataaatgctctgtgttcgaatctttccctaaaacacctgcaggtattgcaagatgttttacgtatggtgggagcaagaaaaacacattgcatgatcctaagatactgccgcgtgataatttgtcaaaggagaaatacatgtccaaggatgaaaaacagacatcaattaatcatttccatgagaagctatttaagttgaaggacatgatgaagacagaggtaggtgatgagttatgtagacatgtgttcttaccgctgtcctagttgaagcctatggagaaagcattaaatatttggacctattgaactcagtactaagagtagtagatctatgttgggtcttatcttcatcaatttacacgtgttaagtacatgaaagaaaattctgcttactgatgctcatggtatatcttctgatttagcatgcatctgtacattggcgaagtgtatgaaaagtggattctgtgtactagtcatcaatactccctggagattcctattataccttctgatgggctaataatcactcattgtctttactttattc

SEQ ID NO: 9328 - DNA, 2360 bp, Oryza sativa
  ref <308>: DATABASE ACCESSION NUMBER: AK106676
  ref <309>: DATABASE ENTRY DATE: 2002-08-28
gtgtctcattcccccccaaatccgccgcctccccaaaatcacgcgaggcgccggcgaatccgcctccacctccgccgcccgccgcccgccgcccgccgccgacctctccttctcctgcttccgcttccgccgacgctgtcaatctgatggggttggaggaaagccaaaagcatctccttggccttaattaccatgagctccaatctttgtgcaaacagtataatcttcctgcaaacaagagtcactctcagctagcaagctcgcttgccttgtttcttgagaagggaagaataaatccatcgcctgaaaagaaagcagcagcatcccttgttgccttgccctccttgttatcaaatgccaaagaagtatccacccgttgccaaggtagccataaaagaggtccgcaaagtgaaagagatgatggtgatagacctcttctgcatgtaaaacatcacaaaggacctcaaacaccaacagatgaaacattgaaaaaaaatgactctggaaccagagtgagttctacaccagtttcaatcaacaatggaaaagtagactgctttagccactcacctcctcgtcaagtgattgcttctaatgtacattcacaaagtgctgatggtattggaaagaacttgggaactcaagagcatccaattcatcttgattcaactgctaaggtagatgatgaaatttctccggaaacaagctaccaggcacctaatgttgttgaaacagttacagatattggtagtggctcatctcataagatctcagaaaatgcaaagtcttcgtttgaattttttgtcatgtcagatgagggacttgatcttgttgttgatctgaattccactccatcaatgttacttgatagcttgaagaaggaagtgttcatcccctcaagtacctgtcgttctgaacctggaaatttctctcattttatcagtagcctgacgacaaaagatgacagcaacaactccatttcttcatctgggaatattactgtggacatacaaaataagggagatgacagcattgctccttgcaccaattcatcactaggctcaaccggtggtgacaattctcactcagagccctatctgcctgatgcaactgctgtaaactctatgtcatttgcatccacattacctggtacttcactagaaatttctggatcacaggagggagttccagtcgtatcttcttcatgcttaacctctatgactgctaatgctttgaataatgaagtgcttcctcaagaatctgttgtgctctcaaagtgtccggaaagaaaccatgctccccttgcttatgattccacacatccaactggtaacaaagacacagtcaatcctgtcaaaatcggttgcactcaaaatgttgttgctgatactgatagagctggagcattctcctcagggggtgtggttagaagtgcctccaatgaaaacttctgcccaacttctgaagaaaaacatgaaacgttaaatgttcctggagcgcagcttacccccaacggtaatacccatgaagttatattggaaaatgaaccagtggaagcagtgccagtggatgaagatagaggttgtcatgacaggctgtcaatgtcttgtcaactagccagacaaacagtaactaaactgccagttacagatgcccagtcagaagctagttctgcagatcattgtattgccggaagcttcaaacccacaagcccaacgccatcacctgctgcttcgtaaaggggaagaaagaaggaaagctggtaaatatattattctggtctaactgtggtcaagtctacatgtccaaatcttagatctgcagctgcaaacctgcatatttgggcaatgcttttagctccaagcatgatgcagagtcagcacagagttctgatgagcttgaggagttagagagcaagacaccatcaagttttgaacctcccagaaacatactacttagcttaagaagtgcttctgctaaacagaccaaaccaacattacctagaaggtcagcaaggcttgttccaaagtaatcgctttaaatgcaaggagagatacatggcaaagaatcaatagcttaactgccatcttagtcaggttctaagaggaggctgaaggatagaaataccattgttagcaagctagtttccaaacttgtcttgttctggttcgttgattctttattggtagcagctgagtagcttagttctatacaccagtacacagtcaccgagcaccaaacgttttcttctttttcttcttctgttgtagtacatctgttatacctggatgcaatgctgagccctttacaccgtgtacaaacaattcatagttttcggatagctctgaacctgctgactt

SEQ ID NO: 9329 - DNA, 1055 bp, Oryza sativa
  ref <308>: DATABASE ACCESSION NUMBER: AK106677
  ref <309>: DATABASE ENTRY DATE: 2002-08-28
aaaaaaaaaaaaaaaaaaactctcccgagctctcctcgccgccgccgccatgtccgggttcgcgcggcgcctcggcgggatcccgtggagggagatcgccggggaagccttctcccgcgtcttcctcgtcgcgcaggccgtctgcgccgtccacgtcgtcaacgcccacgtctgctccttcgcgctggtgatgggcccgagcatgctgccggcgatgaacctggcgggggacgtggtggcggtggacctggtgagcgcgcggctcgggcgggtggcgagcggcgacgccgtgctcctcgtctcgccggagaacccgcgcaaggcggtcgtcaagcgcgtcgtcgggatggagggcgacgccgtcacgttcctcgtcgaccccggcaacagcgacgcctccaagaccgtcgtggtaccaaaaggccatgtctgggtgcagggtgataatatttatgcttctagagattcaagacagtttggacctgtcccttatggtctaattacagggaagatcttttgtcgggtttggccactgaaggattttggtccgatagatccaatgtcagctgagtaggggtaactcagccttatttttcttcttcacttattttcagaatccaggcctctcgctctacctttatctctccgagccgacctttttttacccgtttgctccagaatttatcgaagacggcatgcatatcttgagatttttatgatcaggcaacaaggccctacattctggttcatggtgtctgccatggcacattttacagcaaaaccgagagcatcaaagtttattgctcagttttttaacatgagaattttggccatagtcctcaagggaatcccaagttctcaaccatgctcttgtataaattgaacagtgtaactttggtgtacgaaatttttagaacattattgagatagaccaaaatttgtagaacgctgttgattaattaatcgaagtcgccatgtatcagagttgttatcggacagtggtaaacgcttaccggtttaataagtagaaacaaaattcttgttttgtcagggat

SEQ ID NO: 9330 - DNA, 938 bp, Oryza sativa
  ref <308>: DATABASE ACCESSION NUMBER: AK106678
  ref <309>: DATABASE ENTRY DATE: 2002-08-28
gaagtgtcggttccagagcacgacgccgccgtagttgggcgtcccccgcaccagaggcagcgcgtcgaacaccagcgccgccgggttgatccacccgtcgctcgccgcgtcccacgccgccggcagcccgacgtggacgctcgcgttcgcgtacctcgccgtccaccccagccacgccccgtagaacggccgccgctccgacgagtcgtacgagcacctcctgtcgtcgtagaaccgcacgtggatccgcccgatcagacccgtcgccaccgccgcctcgccgctcgtctcctgcccgtccatgcaccgcaccgtcgccgtcagcagcacgccgccgtgttcgccgaggcgcttggccagctcgtcgtagttggccgacccgccgtggtcgatgtagaggtcgatgccgtcgaccacggcgtcgccgaaggggcggaacacgccatggcggccgccgccgaggtaggcgtgccagaggtggtcggcgacgtccttggccgacctgggcgtcgggagggagtactggtcgccgtcgccgccgatggagaggagcacggtgacgttcttggcgtgctggcagtgcttgatgtcggcgccgacgccggcgacggggtggccggagaggtcggcccagtagcggccgtggccgaagacggtgaggaaggagatgatgacggtgttgtagatgccggtgtcgcaggcctcccggagagagccctcgtccttgttccggccccagaagacggtgagctcgccggtcttgtcgccggcgaccggcccggggccggcgaggatgaggagcactataacaacaaatgagagcggcaatgcacggcgccgttgtgacgacgacgccatttggaaattaatggaattagaattggatttggatttggttgatattctttgatctttcttattgttgtgaacgatttgtg

SEQ ID NO: 9331 - DNA, 2106 bp, Oryza sativa
  ref <308>: DATABASE ACCESSION NUMBER: AK106679
  ref <309>: DATABASE ENTRY DATE: 2002-08-28
aaaaaaataaaaaaaatcttaatcaagagagattaatcggtataccctccgaggtggaattgctcgccgaggaggagggaagccatgacggcgacgaggagggtttgcacgggctggtagacggccacgaacacggggccgccgcggtggatgcaccacgtctgcacggcgaaggcgacgcccgaggcgacgaatccggcgtagaggatggtgaagagctcggagccggagcggacggcccaggcggcggcgtcgcgctccaggaacgcggcgatggcgaggaactggatgaggccgaagaagcaggtgtatgacgtcaccgacagcctcgccgggtagcgcttcagcaccggcgcctgcagcaccagccaccccgaccacgacacgcagtgccccagcaggaacacgcaccccagcgtccagctcttgttgccggcggcgacggcgacggcgagctgttgcggttgcggctggtggttgtggtgggtgttgaagatggcggggcccttgaagagcgtgatgacggaggcgccggcgacgcagagcagcgtgccggcgaccttggcgaggccgtcgcgggaggagaggcggacgcgctcgatgcggagcgcggcggccatggcgaaggtgatggccgggacggagttctggatggcggaggcgaacgtcggcgaggtgttctcgagccccagcaggtagaagccctggttggcggtgatcccgcacagcgccaggaagaagaactgcaccgccaagctcgccgtcatggccggcctctccttcctgcaagcatccatgattgattgattgattaactagttcatcattcgtatcaggaattcaggattagcggcattaggcatcgattaattacttctcgaggaagtaggcgaagggggcgaggaggaagagggcgatgaggttgcggtagacggggaagacgagcttgctgacgcccatgtccagcgccagccgcgacaccacgtggaacccggcgtacccgagctgcagcgccagcatcgccacgtgcagccgcgcgccgccgccggacgccgccgccttcctcccgcccgccgccgcgtcccccatgattgtcgtagctgggctagctagctcgtcgagctacgagaggagagctgagctgaagcagtgagactgagactgagactgtgagtgagttctgctgcacatggcgggcagcattggctgctgaatttatagcggcgattggatcggaaaaagacaggtggtgagctgtgcttctgctgctgctgctgctgcaaatggagttgagctcgtgtacttttctgtcgtcttcttgtctctctagctgctggagttggagatcacaacctgatcatcagtacagtacaatactgtacctgacccagctttgctgtctaccgtctaccacagctcaaaagtctgaaaaacctcttgaatttcgaaacttaataattgtatagttaattttgggggtcctttttagtggtctacttttaacattggcttttaaaatcataaataatccggatataaaagttttatccataaattatttttccgttgcttcgttcatatttttacgctttatcagaatagagctaagagactgaactctctgaatctgctaagctaggctaagtcatctcagctcagtaaactgcctgcaattttgtgccatctccacatacagaaactgatactccgatctttcaggttcaagtagagtccatgttcatgaatcatgactgaaatctcaccaaacaggatgcttttaagggtactgatcaaggtgagctttagttgcccctgttcatcataagagtggttgaatgaaccatggggacaaacacagtgagaagagaacactgccaaggagtacagagcatcaaacatggtgtcaactcatcttcctcaaggacagacatcacaggtacagcatctctcttttttaagacctgcacctacatggatttttgcaggattatcctcctaattacctctgccatcttgtatatagtactagcttgaggtaaatccattgtaaaattgcatttgaaggtaaatataaatttactcaaaaaaaaaaaaaaaaaaaaaaag

SEQ ID NO: 9332 - DNA, 3465 bp, Oryza sativa
  ref <308>: DATABASE ACCESSION NUMBER: AK106680
  ref <309>: DATABASE ENTRY DATE: 2002-08-28
aaacaagcccatgcatcaaagcctccaaggcaggcgccaaccccagcccgggaacatcttctccggttctccctcaccgctcactggctctcgtctctcgccgccgccgccgccgccgccgccgccgtcttgccctcaagcacccgggttcgccgatcgccccacttctcccttcctccctccgccagcgccacctccgcgctactgcctcctccctcctttctcgcgcccgcgcctcctgaaactgggatcccccaatggcaatggattcaagtattcaactctctctctctctctctctctctctctctctctctctctctctctctctcggtgaacattggggccgccatttgccaaagatataagcccgagaggttcagcttctcgtagaagctaaggctgtgatgcgactgggcggatggatgctccggccactgaaccgcggcctcctcctccccaccttgtcctgcccagttgccccacaccgccgtgggttcgcagcctatgcagcagcgctacagtggctggaggacgagctcacctcgctcgcgatcctcccctccgtccccggggtggactccttcgcgtgcgccaggcagttgcagggctgcatcgctcgtggcgacgcccgcggcggccgcgccgtgcacggccatgtagtgcgccgcggaggggtggggcgcctggacctcttctgcgccaacgtcctgctcaatatgtacgggaagctcgggccccttgccagcgcgcgcaggctgttcgaccgaatgcctgagcggaacatggtgtccttcgtcacgctcgtccaggcccacgctcagcgcggtgattttgaggctgccgcggctctgttcaggaggctgcggtgggtggggcacgaggtgaaccagttcgtgctcaccaccatgttgaagctagctattgccatggatgcggcagggcttgccgggggtgtgcactcatgtgcgtggaagctgggccatgatcacaacgcctttgttggttcagggctgattgatgcctactccttatgcagtcttgtcagtgatgcggaacatgtgtttaatgggattgtgcgtaaggatgctgttgtctggactgcgatggtttcttgctattctgaaaatgattgcccagagaatgcctttcgggtcttttccaagatgagggtgtcgggttgtaagcctaacccttttgcactaaccagtgtgctcaaagctgcagtttgcttgccatcagttgtgctaggcaagggcatccatggttgcgccataaaaacccttaatgacacggagcctcatgtcggtggtgctttgcttgatatgtatgccaaatgtggggatattaaggatgcacgtttggcttttgagatgattccctatgatgatgtgatacttctgagttttatgatatcccggtatgcacagagcaatcagaatgaacaagcctttgaactgttcctccgattgatgcgttcttctgtgctgcccaatgaatatagcctttctagtgttctgcaagcatgtactaacatggttcagttggatttcggaaagcaaattcataaccatgctataaaaataggccatgagtctgatctttttgttggaaatgcactaatggatttctatgccaagtgcaacgacatggatagctcacttaagatcttctcatcattgcgagatgccaatgaggtgagctggaacacaattgttgttggcttcagtcagtctggtttgggagaagaagcattgagtgtattctgtgagatgcaagctgctcagatgccttgcactcaagttacatactcgagtgtgctccgggcttgtgcaagcacagcatcaataagacatgctggtcagattcattgttcaattgagaagtccacatttaataatgacaccgtaattggcaattcacttattgatacatatgctaagtgcggatacattagggatgctctcaaggtatttcaacatttaatggaacgcgatataatttcatggaatgcaataatctcaggatatgcgcttcatggacaagcggcagatgctctagaactttttgacaggatgaataaaagcaacgtggaatccaatgatatcacttttgttgctctgctatccgtctgcagtagcacaggattagtaaatcatggattatctctgttcgattctatgaggattgatcatggcatcaaaccaagtatggagcattatacatgcattgttaggcttctaggacgagctggccgtctgaatgatgctctacaattcattggagatattccttcggcaccatctgctatggtttggcgtgcattgcttagctcttgtataatccataagaatgtggctctgggaagattttctgcagaaaaaatacttgagattgaaccacaagatgagacaacctatgtcttactatcaaatatgtatgctgcagctggaagtttggatcaagttgcccttttgaggaaatcaatgaggaatattggtgtaaggaaggtacctggtcttagttgggttgagatcaagggtgaaattcatgccttttcagtgggatcagtggaccatccagatatgcgggtgataaatgcaatgctggaatggctcaatcttaaaactagtagggaaggttatattcctgacattaatgtagtgttgcacgacgtagacaaggaacaaaagactcgaatgctgtgggtgcatagtgagaggctggctttagcatatggccttgtgatgacacctcctgggcatccaataaggatattgaagaatttgcgttcctgtttggattgtcatactgcatttacggtgatatctaaaatagttaaacgagaaatcatcgtgagggatataaatcgcttccatcattttgaggatggaaagtgctcatgcggtgactattggtgatcttctgttgttccttgatgtgttaaaggaatccatacaagttatatgtgatataatgtgtttggcaaatggcaatcttctaggaaaccaagttatcatgcatgctctattgttttgggtgatagttgggcaaggcaaccataagggtaaaatgcagcctttggaagtgaaacgagcttgcctactggcttattcttaggctatataaccttctactacctccttatggaagctgagggattgtttgtgccggatcatcctgtaattgctcatcttgtagagatgaagagtattgtagaaaaggccaatatatcttccaagacaacaaggagacattaatgactgttgtacgcctggtagcagtaccatggatgtgctagacaagataatttttttggacaaggacaatttactagtacgggataagataaaaataggatctgttcttctttactttactataaagtacaaacatgataattgaagtattctggtaactcatcatgataatttttattcagcgtgcggaagttgctgaattgac

SEQ ID NO: 9333 - DNA, 1697 bp, Oryza sativa
  ref <308>: DATABASE ACCESSION NUMBER: AK106681
  ref <309>: DATABASE ENTRY DATE: 2002-08-28
atacaatcagagctccatctctctttctctcccatgtccggccatggccgccaccacccgatctccctcaccggagcttcgcaagccaaaccatcgcgccatcgagttcgcctcgacgaggtgattccatttttcctgtttcccccttctcccccaccccatagcaaccaccaccgccacctctctttgccgccgaagataagctcttctactcgccgttccggccatctccctcactctctccgccagccaccgccctccccgggtgcgtcgtgctcgggaacatgtgtggccgccgacgtcgccgcctttcgtccaccggagagccggcgcccactctctccctctcctctgtagccggcaagaaaaagaagaagagaggaagaagatgacgggagaaagaagaaggagaagaaaaagaaaaagaaagactgacagtaaagactattgtcttttggatggcaacctatggtatttcgagaatcgtataatcaggttgcctatcttggattcatttgcgttggagcaagagtttaattggagtttttgccgaagctgggagttcaatcacataagttagttccctttaaacctaatcttcaagtctagtgtagttagatggtttaattctatagtaaaacggcagagttgagtcatcgtatagcctctgctgtaatagttagccacaaacttgtgaatgtcctattattttatataaagatatctcctttgaagtctttaccaaatgtatgcgatgaagatccagattgttgaacctgtatcaatctactgatccagagcttgatacagttaaacatgtcggtttctgaatcgttagttttgggatccgacaactatgcattagacgaacgatggcggcggcctaagtttgttcaaatttatagtactataaaatgttatatctaattctaagtttttatattttgagatggagggaataccagtatttggggggaaaaaattctaaagtgaagtaaaggtaagaaaaaacgtgaaaatattagttaaaggggtctaaaataaatatttggtaattagagggactaaatcgaaattcactcgaaaaataaacccctccctctcccccatcgtacgcaacgaagccgattgcctagaggcggtctcgccgcgccgcttcccgtggagcccaagtggtggcgagggtttccgccgcctctcgtccgcctcgccgacctcggaccccggcctccatcctcctcgccgacgacagccaacgtgtgccgctccccttggagcccaagtggcggcgagggtttccgccgcctctgctccgctcgccggcgacagccccatgttctcgatcgccgtccccaggtccgcttccggaatctcatcctttgcgggctgctactgcttcgcgcgtcaagccatcaccagctgctccctccgtctccggaacaacaatattctctccgactgctcacgacgggagagcggcgcttcggcgacggcgatcccggtacgcacacgcttgagaggctcccactttcttcattctgctactgtacggttggattcgtgcataacaatcactcatatctctatgtctagcctgcccatgattatttattaagttcgagttggttgaagaatccagtttgttttgtggggaacttttacatgatagagaaatgaatggtcttctattgtgaaac

SEQ ID NO: 9334 - DNA, 2229 bp, Oryza sativa
  ref <308>: DATABASE ACCESSION NUMBER: AK106682
  ref <309>: DATABASE ENTRY DATE: 2002-08-28
atagctcgcaccagataagcccccccgcctccgcctccgccgccgcccacgccgtcgccgtcgccatcgcggtcgtggttgtgttcgtctgttcgtgtactctggatcgatcgattgatcgggcgcgggtggaggaggaggaggaggagggtttcgagggggagtgctagggtttcgagtggaggtggggggaggttgagctcagttcattcttctgtcgccgtggtgggggcgggggaggcggagccggatgctatgctgctaggctgctcgtccctgacgtcgtgggtgcgtcgcctcgtcgcctacgttggagcagaaattgttttggatgtgcgaaacctactccaataatagccgttgatgagccttcaaaaggtttaagaattcaagggcgctcaataaagcagcggagtttgtcggaggacttttggagttcaagcccgccgggaatggagaatagtgccatgcaatctcagcgtagcatgtcttcaatcagtacggcagcacaatcgagcgatcagcatggagctggaagtagcaccaacccaaatgagtttgtaaatcaaggacttctcctgtggaaccagactaggcaacagtgggttggaaacagaaggcacaattctcagcgtcagcaacctcgagagccaaaaataagttggaatgctacatatgagagccttctaggaagcacaaaaccatttccacaagcgatccctcttggtgaaatggtagatttcctcgtggacggctgggagcaggaaggcctatatgattagtgggttaaatgagtgatgaagggtgttgtttgtggggtcaaattatgaatcaccgagaatgtactcagaaaaacttcagcctttcaaagcttgtgggtgataactgcggtattcctggagacaggatggcatccctatcttaagtaaacgtaacatattctttactgctaattgtgttaacataagtttcatattgtgatatcttctcgctgtgcataattggacattgttattactaatcaatgtgcaggctctgtttagtttttttttctttttttccgcgaggtggatatgtgtcgcatctgacgtcctcttggcaatgcctttagctgattgccccttgtccattaggccattaccgtgtttatgcaggctctaccagagggttttggatgtcttcgcctcctttccagatgcctctctccggactcctgtcctcgtgttctttctcgctttatatgcgaaacccttcacagcaatacgatcgcatcgccatcttcaagcagagtaactaactgacaaattcacttcactgcggtttagtggtgcattagcattttatacacactttgctggccatggctttagctcgccaatgcctcagcaaacgcctcgccgccggctgcgctctggcgaggccactgcacgcggcgtcgccggtggcggcggcggctgccaattctcatgggccgctcaactttcgtgccctcttctcgtcggcgggagccgacgccgccgccaccaccggcggctgcgctcctgcgaaaggcgacggtcacagccgtgaggtcgccgtcgtggaccgctcgcgccgccgctggccgtggcgagacctccgcgacttcgtcccgctccgcctcgtcgacggcatcgggagcgcgctgtcgcaggtggcggagacgctgacccggccgctgacggggaaggtgcgggaggacgaggagcggtacaggctgcggttcgaggtgccgggcctcgggaaggacgacgtccgcgtctacgtggacgacggcgtgctcgccatccacggcgagaagcgcgacgtggtggaggaggaccgcggccgcgacggcgacggcgagtgctgggcggcggcgacgtaccacgccggcctgctcctcccggaggacgcggtggcggaggggatcacggcggaggtgagggacggcgtgctgcacgtcaccgtgccccgctcgccggagaggaagaggagcgtcaccgaggtcaaggtgcggtagtagcagcgtggactgagcctggctgcttgggcctcgtttgtatgggcctttatcccggcccatcttgtgtatgggcctggattctgtaattaagtactgtatgggcctactaccataatgtggcattctggagttctttattaatgccacattaccctttatgaatggcctcgttcatagtcttgatgaattttgagtgaatttcaagc

SEQ ID NO: 9335 - DNA, 1904 bp, Oryza sativa
  ref <308>: DATABASE ACCESSION NUMBER: AK106683
  ref <309>: DATABASE ENTRY DATE: 2002-08-28
caaatgccgacctcgcttccggtgctcgagctcatcggcgaggcgtccgcacgtgcgccaagaacccctcatgagcaggtgaggtgatccttcaagaaaccagcaaaagaaatccaaggtcaatgccggaagaacaacaagaagcggaagaggggatcgccggcggcggcggcggatgggcgagcacggcgctgcagccggtgcggtggctgcggatgctgtgccgggagctgggcgcgacgttcgtcgccggcgtggtgctggtgtacgggctgagccaggggttcgccgggtccttcttccgcgtggcgtcggactactactggaaggacgtgcagcgggtgcagccggccaccgtgcagctcctctccgccgtcttcttcatcccctgggtcctcaagcccctctgggggatcatgaccgacgtcttccccgtccgcggctaccgccgccgcccctacttcctcttcgcaggagtacttggaacggcttcagctgctattgttaccatggttaatggactaccgatgacttccgctatactttcctttgtggggatatcaacagcagttgccatagcagatgttacaatagatgcatgcattgcgaagaatggtattgataagccatcattagtcccagacatgcaaagcctttgtgcattctcatcatctctaggtgcacttattgggtatgctacaagtggaatgtttgtccaccatcttggggcacagggtgcattaggtgtgatggctttacctcctgcaacgttggtttttctaggatttttcatatatgagctgaaaatgtatcagcataatgtgaaagagaaggttttgaataaggttcatatggcagtgaaagggatggctcagacaataaagtacccagtagtgtggaagccatccctgtacatgtctctttccctggcgcttagtatcagcactcatgagggacagttctactggtatactagcaaggaaccacctaatcctggattttctcaggaatttgttggtatggtccatgccatcggcgcagttgcatccatggtgggcgtcctggtgtaccacaagtacctcaaggactaccctttccggagcatcctcttctacgcgcagctgctgtacggcgtctccggcctcctcgacctcaccttcgtgctccggtggaacctcctcctcggcgtgcccgacgccgccttcgtcaccctggaggagtgctgcgcccgcgtcgtcggccgcgtcaggctgatgccgatgatggtgctcagcaccaagctgtgcccgccgggcgccgagggcaccttcttcgcgctgctcatgtgcatcgacagcgccggcatgctggcggccaaggccggcggcgccgccgtgctgcgcgcgctccgggtgaccaggaccgacttcgcccgcctctggctcgccgtcctcgtcaggaacctgctccggctgtccacgctcgccgccatctcgctcgtccccacggccgaccagaccgacgtgctcctgccgcgcgacctcctcgccgtcgccggcgacggctctcctcccgccgccggcgacggcgacgacgaggagaggctgcagctcgcgaaattcgctgatcacgtcgacgacgacgacgacgacgactgaacatagttgatcatacgacattgttgcagcgcgttcttgcatgcatcctgtcactgtcaggtgaggatgcagctatagtagctctgatcaatcgatcagatagattcgttgattcgttcatggcgagcgcatgcatgtctctgatgagacgttgccaggtgacagaaatggcatctctctctgtacgggcaacccggagtggaaagatgagctgggatgtacggattctgttttctgttcagtttggttagcataggaggattctac

SEQ ID NO: 9336 - DNA, 1532 bp, Oryza sativa
  ref <308>: DATABASE ACCESSION NUMBER: AK106684
  ref <309>: DATABASE ENTRY DATE: 2002-08-28
gaagcatcgacgccgaacggccgaagcgccgacccctcgacacgctgtccccggtcgcgcctcgcgggctcgcggcggaagggtgggaggcggaggctggagccccgagcaccgagctccgggtggtcagcccttgaaacccatcccctccacggaccacgccgccagccgcaaaatattttgtccatcacaattgcccatggactctgccgttgatggcccgagacaacctccggctagggcggggagccgcctctgcacacgctgcggcgagcggaaggccgccctcaagcgtcccaaaaccttagagcagatatgtagggaatgcttctatgttgtctttgaggatgagatccatcagactattgttgacaataatttgtttaaacctggtgatcgtgtggccattggagcttctggtggaaaagattcaaccgtgctcgcatatgtgctatcagagttaaatcgtcgtcacaaatattgccttgatttgtttctcttatctgtggatgaaggaattactggttatagagacgactcactagaaactgttaaaaggaatgaaatacagtatggcctgccattgaaaatagtttcctataaggacctctatggctggacaatggatgatattgtgaaagcaattggcctaaaaaataactgtaccttttgtggtgtttttcgacgtcaggcactggaccgaggtgctgctctcttaaaagttgacaagattgtgactggacataatgctgatgacattgcagaaactgtgttattgaatatattacgtggtgatattgcacggttaagtagatgtacctttataactactggtgaagatgggccaatcccaagatgcaagcctttcaaatacacctacgagaaggagattgttatgtatgcatatttcaaaaagctggactacttctccacagaatgcatatattcaccaaatgcataccgtggatttgctcgcgaatttattaaagatctggaaaggatgagacctagagctatactggacatcataaaatcaggtgagaattttaggatctccacaacaacaaggatgccagagcaaggaacatgtgaacgttgcggctacatttctagtcagaaattatgcaaagcatgtgtcttgctggacggattgaatcgaggcttaccaaaactaggcataggcaggaccaaaggcattgctggaggtgatggtgactgtgagcagcaagccacacgttcggagaggaacagatcgagtctgcaaggaaaacacgggaacttcgacttctagatatttcaactgtaattttgttaccatgtcattgttggtttacgacacctggatcatttggcatgattcagttgtacaagctaactatttatgattgtgagatgggttgctaaactatcagcaagctgattttacagcatctgtagttctgtacatgatgcgcgaaggccagaagcaccgctcgacacaatggtcggcggcgtgttgttacattatccgtttataagtactgtttgaaacc

SEQ ID NO: 9337 - DNA, 1747 bp, Oryza sativa
  ref <308>: DATABASE ACCESSION NUMBER: AK106685
  ref <309>: DATABASE ENTRY DATE: 2002-08-28
aagccttgccggcttctcttctctcccatcacactcgaggccacgcctccaccgccgccaccacctcctcctcctcctcgtcggcgtcgccgccgccggcgtcttctccacctcctccgcgccgcgctcgcaaccaccttccagattggatgggactataactgaaaccttctgtattaagcttccgcgagggctcacctgcagaacgtgatggtcaccatttactggtgcagcaggcaaaaagttgcatggagcgctacaggctgtacacttttgatttccctgctgttctttttctctggttcaccgcataggatcctcttgaacaagaaacctctcaatttcaaaacagcaccatctaggttattgcgtgagattagcatcagttcaagtcgtgttcagagggttaacaattcatccgcggagtttgttgcaaacctgaatgaccgtaatgtagaaattgtacaacatatggaagacaacgatcataacatcatcaatgcaactgcaaatgtgacttctgactggagcattgtcaaggaggaattcacatttccagctggaagtgcccctttcaatagctgccatgcttctactattgtagagactgagaaggatagttttttggtggcttatttcggtggatccaaggaaggtgctcctgatgtgaagatctggctgcagagatacagtgatggctgctggcatactccacaagtggctgatgaacaggatgaggtacctatgtggaatcctgttctgtttcagctcccttctcatgagcttcttctcttctacaagattggccaagaagttcagaagtggagtggtgccatgaaaagatctctagatggaggaaaaacctggtcggcaagagaacagctaccacctggcatccttggtcctattaagaataagcctttcttggttgaagatgggcgcttgctatgtgggtcatctgttgaaagctggaactcttggggtgcatggcttgaggtcacaaaagatgccggacaaacatggcggaagtatggccctatatatattgaaggcgaaacactaggggtgatccagccagttccctacatgactgccaatgggactattcgagtgttgctgcgatcttttgagacaattggtcgtgtctgcatggctgattctgctgatgggggtgtaacatggagttatgtgcacgagactgaccttcctaacccaaactctgggattgatggagttaagatgaaggatgggagagtactccttgcttacaacaccttctccagaggaacactaaaagttgcagtctccatggatgatggtgattcatggaacgatgtaatgacattggaagatactgaaggcatggagttttcatatcctgcagtgatccagaccatggatgatctcatacatatcacgtacacatacaaccggacacaaattaagcatgttgttcttcaacctagcgggaaagtgaggtggtgagtgtgcaactattgggagagttattgctgccaattgcaaggcacgcaagtttttctctatgtgtgtcacatcatattggctggaccgtggtgctaaattggtcatcaatgattctttttttgggtatatttggtcatttgcataatttcttgcaattgtaacctaattaataatctccctgattcctatcaacaatgatattgaacatctgtacatatgccccaaagtttaacataagttgttccgtatatggctgttcttc

SEQ ID NO: 9338 - DNA, 2347 bp, Oryza sativa
  ref <308>: DATABASE ACCESSION NUMBER: AK106686
  ref <309>: DATABASE ENTRY DATE: 2002-08-28
gaagtcccaagcgctcgccgccgccgccgcctcctcttctccgtcgccggcagccggtcgccgccaccgccgccgatccgagcccgaccgccagccacccgctagctccctctctcgcgtttccaaacccccaaaaaggtggtgccgccgccccgtgttcctcaggcgctaccactaataacaaactagaagaaaagggagggtttcctgcgatttctcctcgatgctccggatcgcctctcgcgcgggtttgctcggtggtaggagatgctacagcgccgccgccaagagcggcccctcgatcgccggggtaagcgacatcatcgccgtcgcctccgggaaaggcggcgtcggcaagtccaccactgcagttaacattgctgtagcacttgccaagaagtttcagcttaaggttggtctgttagatgccgacatatatggaccatccatacccacaatgatgaatctccatgcaaaacctgaagtaagtgaagatatgaggatgattccagttgacaactatggagtacaatgcatgtccattgggtttcttgttgacaaagatgcaccaattgtttggagaggtcctatggtttgtttttatgtgcttctgttaacttctcatttaaagtgtctatacccttagtggacgtgtatttttcatataaactataaagtattttgtctgttctttgcccattcttaatgaatataaaaaaatctgcaaagatttaccattggaagcatgcatatcaatgtggaagtaaactattgcgaagttagaaacatgatttaattttcttccataaattttcagccctcatgcactaacacaatgatgggcacatggagtacatgttttcttttgcgtagcaacaagcaagtccatacgcatgttattgaaatatggttgctttttgtaatttttgtaatcttcgggacaacagtgttggtaggatagaaagagctagtggatgtggacgttttctttaccttttcattccacatttttagtttttctctatcaaaactacaatatatattgaaatgactagttaaaattatttaatattgcccctgaaacctttaaatgctgcatgtttgataattccatggcaatagcacatcatgattcatgaattgcaacaaaataggctattttctagaattttcaaaaaaaaaaaaaaactcatctatttgtctatgcaaatttaacaaacaggttcaatcctacgtgtgaggtagaaaaaaaaagacaaattgtacgtgcaataccaacaaaaatatattattgacatcaataccactcttttgtggtattcctttagttgtgcaattgtttgtgaaattttttgtatggacgcaagacataacctcacctatggctgtgttttctttgagaatttcgtagagcttctttgtatgattctctaggaatatgcacattgataatatgtttaccttgaaagactattgtttcatgcttccattttggtctattgttttataaaatttatgttccttatactacaacatttcttggtatcaggtaatgagtgctcttgagaagattacaaggggggtagcctggggtaatcttgatattcttgttgttgatatgcccccgggcactggtgatgctcagctatcaatgtcccaaaggcttcggttatctggtgctttaattgtttcaactccccaagatatcgctctaattgatgctagaagaggagcaaatatgtttcgtaaagttcaagtccctattctgggtttagtggagaatatgagctgtttcaagtgcccgaagtgtggtgagaagtcttacatttttggggaaggtggaggtcagagaactgcagaagaaatggatatgaaattaatcggtgagatacctcttgaaatcgacatcagaacaggttcagatgaaggtactccaattgtgatatcatcaccagattctgcatcggcacaggcctacatacaggtcgctgagaaggtgatccacaggctgaaggagttagccgaggaacgacagatgggaccagaaatcttgctttgagagttcataccgcccctgtagaactgttcccgttcctcttctggttcgagctgcatcccagtagctgatagcctttcactcaaaataagaagtaaacatttggtaacatccttgtcagccccacaaagtgtagaggccgggtttgataatcctttatctaaaaaaacatccttgtcacccatgtacttttgccaaattttgtaacattgcagaaatattgttgaatcctggtataggatcatatactcatgtaccattttagagaagtaaggaattttcactgcgttt

SEQ ID NO: 9339 - DNA, 1863 bp, Oryza sativa
  ref <308>: DATABASE ACCESSION NUMBER: AK106687
  ref <309>: DATABASE ENTRY DATE: 2002-08-28
gagtccttccaagttccaactctagccctcctcggcgcccatcgccatcgccatcgccatcgcccaccaaattattcccattccctccatcgccagttcgccgccgctccgatggatccaccccagcggatcttcggcgccgcctcctcaccgccgatcggtatcccgcccacctccatcgccgctccggtggatccaccccatccgatcttcggcgccgcctcctcgtcgccgatcgcccaccgcagtctccttcccaccccctccgtcgccaccgccgtcgccgttcaggtggatccacccccaccccattcggagagtgagcttgttcaagcgctatctgacaagtatagattgcccgtgagatttttactgagttccattcctccaacttatttgtctgcttgggagttatctgatggcaaagcacaggggctggtttggtctcatagtgatgcacttgatataacacatcattatcaatctctaggcttacatgagattagatttctctactctgagttcatttctctgagatgtgtccaggacatggagtatatgattgctcgtactccattctctatgcgggtacttaaccctgatgtggctaaagagaaaagccgaatgctgtccaagctgaacggctactgctgtagccttcgggaagcccttcggcaggtccaggctggggggaatctggtggagatgtttaacctgagatccaaatttgctcaggaacatgagctctgcacatgcaggacagagctgctgcggcagatgaaggtggacgctcttaacagagtcttggtgcttggattgggtgaaggggcatcatctgctcactccgctgacatgatttggatccttaaacaccacagaccagatgagtatgctgtggcagttaatgatgatgggaccgtctcatggcccattattcatggcctcgtgcagaacatcaggaacatgatgggcaacaagcttacgtcgaacgataccttggctaactcccgcacttccttgcttggtgtgatcggccgcttccaatttgagcataaagtccaggaagtccttgagaagacacgcagccattcaacagttcatgacagatcctacttcaagatcccaggttgtcatggatatcaggtctcagcttgaggtcctaacacgtctaatgaacaagaagtcgctaatagggagctacccaattaacatgcctggtgacaccactggagaaggggtcttggacattacggtaatccatgagaagaaagaagctgctgccccatcttctgccccagctgccgtcccatgtactgccccacctgctgctccagctgctgcctcaactgctgctccagctgctgcctcaactgctgctccagctgctgcctctactgctgctccagctgctgcctctactgctgctccagctgctgcctcaactgctgtaccagatgatgctaccccagctgaagcatctgatgcttcttcagatgatgctggtgaggaagtggcgatcatgaaatttatggagatggaaggggaacctgaagaacagagggcaaagcgcttccaaagatactgtgcatcccttgacttctgtttatagagtcgtaaacactaaggttgaggcactggattgagattgaggtgaccagacacgggtgtgggggaggggttgcgatttcaattataatctgttgtttccaactcggagtgatactctttatgttttgtcagggaacttgggggtgtgattcaggcctaatcttgcttccatttagaagtggtactcttttatcacgggtctgattatgtaaatgagatgtgaagcatgcaattaaaatacatgtttgccttttg

SEQ ID NO: 9340 - DNA, 1570 bp, Oryza sativa
  ref <308>: DATABASE ACCESSION NUMBER: AK106688
  ref <309>: DATABASE ENTRY DATE: 2002-08-28
gtgccgccgtcgtcgagcttcctcctttctctctctctacaccgtcttcaccaccaccgcgccgccctccccttcggtctgcgccgccacgccaccaccgtggcggggggatgggatgtcatcggccggccgccaccgccggggggagggccgcgcttccctcgctctccttcttcctgcgccggcctctccgcctccacctctcgttccccacatctccggcggccgtcgcgtcgctttctttccaagcagctcgaggagatgatgcaacatcagtatttctgcaaacaccctcggttgctggtgcatcctttcaagtgcttggctctgctgaaggccataagacggctgtaccggcgatcttcgtgttcggggacggcatgctggacgttggcaacaacaactacttgccgtctgacgccccccaggctgactacccctactatggcatcgacttccctggctctgagcccactggaaggttcagtaatggatacaacatggctgacttcattgcaaaggatatgggattcaaaatgagccctccagcttatctatcgcttaacagttcgataaaaatggagaccaatttcaccggagtgaactatgcttcagcaggtgctggcattcagatcatcatgaacgatgaagcaacgattccattcgtgtaccaagtgaagaacttcaatgacacggtaagccagatggaggctaacctaggccaccagaagttgagcaagctgttggccaaatctttattcctgataagcattggtaccatggatctgtctgtaaatatatggagagtattaagatattccagaaagccatcaccattcaacattccatatacactttcctcctacaaggccataatcatgcagttgtatggcctgggtgcaaggaagtttgggatcatcaacatccagcccttagggtgtcagccatggatgaggaagaacttggaaaacaatgtcgactgcaatgactccatgaacagtctcgctagggaattcaacgatggcctcaagcccctcttttccaatctcagctctcagctgagtggtctctcctactccatcgccgacttctacgcattctcaaatgccaccttcatgaaccctcgggcttacgggtttgtgaacatcaacagcacatgctgtattcccccctgcacacctgaacatgaaccaccctgccaaaaccgcaagcagtactggttttgggatctttcttacacgactgagcgggctgctaagctagccgcctctgcattttacgatggccctgcccggttcactgcgccggttaacttcaagcgattgataaagatgaaatgattttataataaagatcttttcgtgttgcaagtccattgacgagtagttgatcaggttttcctgggtgtgtatgtgtgctttccttaattttcatcatcttttttgtatgcctctggattggtaatttggtatatatatgtatgaattccatgctaaggaatgtgtcacaataagttgatcgataagaagaataaacccaactatatataatcgacgtttttgtttcagtg

SEQ ID NO: 9341 - DNA, 1796 bp, Oryza sativa
  ref <308>: DATABASE ACCESSION NUMBER: AK106689
  ref <309>: DATABASE ENTRY DATE: 2002-08-28
aactaaccaacgccgccgccgcgggcaccgcccacctgcggcggcggcggcggcggcgatggcgatggcgacgagtcgcgcacgcagcgaatcgggcgttgtcacgcgtgcgcgcggtggctgccggaatctgtctgttgtcagcgtggtcaccgaacctgaacctggcagtacgcatgctcggctgctcgctcgcacgcgcgtgcagtcaccggcgcaatctaccattgcagaggagtaggaggagggctagggctaggagttggcctctactagctgctgcattcgggctacgaaagcaaccaaaataatggagggaatcatcaagatcgatgtcgatcgaattaattaaggagaattgtatgtgtgtaggggttagggaaagccctcactactctgaactctgaagaaacaatctatgcatagtactgtaccttgacgaactctttctttgcaagtcaagttagagccatcacctatagcaaggtaggtgaaatgattgaccttatgggcgcctctccaaaaatcgtaaacaaagtcccatcagagactcagatacatggtagaggctgacgatcgatccaaacaagaaattccacggccggtgagtgaaaaagataaggataactacagtgcgcagaccctgcatgccatggtgcaaaagcttatagaattcagatgccataaatactactatccctggagctaaaggttggtgggtcgaggagaccatcttgtcaccaagaaagctctcagaactctccatctctaggccagcttagggctggaccagctagcagccattggtagcctgtatcagttcataaggggaggaggtgaaggcaaggaggcagctagccaagaagaagagcagacaccaaaactcaggaaggtgaatatattcttgaaaagatccgatggaagcaagaaggcctacccctaccaggagaagcagatctgctgagttccacaatttttcagaaaggaggagaagggataggatcaatgagaagctgaaggcgctgcaagagctacttccaaattgcaccaagaccgacaaagtttcgatgctggatgaagcgatcgactacctgaaatcactccaactacaactccagatgctggtcatagggaagggaatggcaccggttgttcctcctgagctgcaacaatacatgcactatatcacagctgatccttctcaaattcctcccatacgcccctccgagccgcggccatttcagataacccacgccacccaacagagacagtctaacgtcgagtcggatttcttgagccagatgcagaatttgcacccttcagagccacctcaaaatttcctcagaccaccgaaattgcagttgtacacgccggagcagcagagaagaggtctagctagtagcagtggccacaacagcggttggatcacggagaggaattcatcgtacaacttcttggagtgatgaccacctgacgagttactaagagatccagaagcagatgcagtctagactctactactctagactgcataaccttcattcagttcatggtgttcctggagatgaaacaagttgctcaatggagtgatgaatctactgcatgcagttaactagttaattttgtacgtcaataaatagtggtgatcctgatcttgcttcctcgtcatgttctgtgcatacaagacctaaagcgtttttgtgatctctgtactgtatattagcagacagtctacttcctgctgctgatgcttatgtgctctgacaagcaaatcaacatggctaatttaatcaagt

SEQ ID NO: 9342 - DNA, 2127 bp, Oryza sativa
  ref <308>: DATABASE ACCESSION NUMBER: AK106690
  ref <309>: DATABASE ENTRY DATE: 2002-08-28
ctggaagatagcgcggctggtgaggacggcgctgatgatgacgctgaggccaggctgggtgagcacgatgtccgaggcgctcctcgccgcgtcggtggcgtcggcgacggcgatcccgatgtccgccctcttcagcgccggcgcgtcgttcacgccgtcgccggtcatcccgcagatgtgcttcatctcctgcagcttcttcacaatctcgtacttgtgctctgcaccacaagacagacgacaatggcgactttgagaacctgcaagtccggccatggcggctttgagaatgcataataattcgtgtacctgggaagacgccggcgaagccgtcggccttcttgatgagctcgtcgacggggacggaggcgatggactcgtccttgctctggccgagcagcgccgacgaggggtacatgttcacgcccatcccgagcctcctcccggtctccttggcaatggcgagctgatcacctgcaccagcaatggcaacgcaagcaaatcacaggatcacggactgcatttgcacacccaccatgtgttcgacgaaaagcagctgggcgtgggttgaggtgtaccggtgatcatcttgacgttgacgccgaggtggagcgcccgccttatggtctcggcgctgtcgtggcgcggcgggtcgagcagcggcagcaggccaacgaactcccacggcccgccggggccgtccttcctcctctccggcacctcctgcctcgccacggcgagcgaccggaggccccggtcggcgtacctgtcgattatggcgtgcaccttgctcctcacgtcctgtctgcatttgcacagatccagaatctgcaagatcaacaagcaagcaagtgagcaatggcggcgacgaaagatcgaatcgaatcgggatccatggatgagggtgggttgcctgctcgggggcgcccttgctgacacggtgccatgagccgtcggcgaggtcgacgtaggtgagggcggtgcgcttgtcgacggggttgaaggggaggaagtgctcctcccggatgccggcgcgtgcctccttggggtcgtcgagcatgccgaccatggcggtgtcgatggcgtcctggttctcgacacgcgacgccctggcggtgaggaggatcacctcgtccttggcgacgccctggacgaacacctcgatgaggcccctgtcgacgctgagcttgttcagcgtgagcgtcccggtcttgtcgctgcagagcacgtccatggcggccatctcctcgatcgccgtcatccgcttggtgatggcgccctggtcagagaggcggtgcgagccgatggccatggtgactgacagcacggtgggcatggcgatggggatgccgccgatgagcagcacgaggaggttgtcgatgccgtcgcggtagaggcggtgctggatcaggtacatgacgatgacctcgacggccatgccgatggcgatggcgccgatgcagaagttgccgatggcgcggagcaccttctggaagtggccgacctggttggtggtgtcgacgaggtgcgccgccttgccgaagaaggtgtggacgccggtggcgatgacgacggcgtcgatctccccctgcttgcacgtcgacccggagtagacgcagtcgccggggagcttggtgaccggcagggactcgccggtgagcgccgactggtcgatcttgaggggatcgccgtcgaggaggcgggcgtcagcggggacgatgtcgccgagcttgacgttgatgacgtcgccggggacgaggacgaaggcgtcggtctccgaccacctgccgtcgcggagcaccttggtcttgggggcgaggttcttcatgagcgccgccgcggcgctgccggcgttgctctcctcccagtaggatatggtggagttgatcaacagcagcgcgatgatcccgacgaagtcctgccagtccggcggccgcccgccgccgttcgccagcgcgatcgccatgatcgccgccacctccatcacccacgacagcgggttccacatgaaccccagagacttcagtatcttgctctcctgtgctcatcgtcaaaatcaaaatcaaatcaaatcaaaatcatgttacaccaccactccaaagatcaatcgattatcttcaaacaacc

SEQ ID NO: 9343 - DNA, 1595 bp, Oryza sativa
  ref <308>: DATABASE ACCESSION NUMBER: AK106691
  ref <309>: DATABASE ENTRY DATE: 2002-08-28
actactttctctgttcccctcgccgtcgccgccaccgccaccgtgaccggcaagtgacctccgcccctcgccgcggctcgccgcccggccgccgccaggttgcctcggatgcgtggaggtctggtcgcctctgcgcggctactccctcgccctctcgtccggtggtttctccagcgacgagctcagcaggatattaatgagaacatgttgggtggcaagaaagttaaaattatatttgttctaggtggtcctggaagtggaaaaggaactcagtgcagcaatattgtagagcattttggttttatccatcttagcgctggtgaactcttgcgtgcagaaatcaattctggttcagagaacggaaccatgattgacactatcataacggaagggaaaatcgtcccatctgagataaccataaagcttttgcaagaagccataataaaaggtggaaatgacaagtatatcattgatggatttccacggaacgaagagaatcgtgttgtatttgagagtgttgtaagcttacttagtcttcattgttttgaatagagcagtaggagaattttatttatgtgtatgttagtgttcatattttacattttaaaagcaattacagaccttggttacttacttccaactgcttcagataagcatatctcctgaatttgttctatttttcgattgttctgaggaagaaatggaaaggcgccttttgggtcgcaaccagggaagaagtgatgataacattgagactatcaggaaaagattgaaagtttttgtagaatccagcttgcctgtcattgagtattatgagtcaaaaggcatggttaagaagattgatgcgacaaaaccagcccctgaggtgtttgaagatgtgaaagccatctttacccatatggcttgaagtctgcttagattcatcagaaaggatggcaaacggatgaagttcacaatgtatcaccttataccactcctcgtcatcatttcattttttatcctaattaattgtctaaacaagtcgcattagaagctgtgaaatccatgctatttgcttaggtagataatcttcctcctgaagtaggatacagaatgtctcgcacacagttgttgcccttgattaaaaattttgatcaatacacataatgattgatcagatcatgcatatctatcatcaacagacatgccctcatggcatccttaacgttttgcaggtgtctcagaaaagcatgtacgcatgcagactatctctgcctttaacaccgaaagctcatgtgctgccgacatgtcactagataatcctttgcctgaaataagtagatctgtttcttgttcgtgctggggagccggagcacatgcctagtgtttttgtgcactcgtcgttgccctgtgcacttccatcagttcttaaactgaaactgatgtcacattctctgtgaacaacaaatgatctctgacctagtttcctgattttgatattgagggtgggagtcagcagcttgctgatgcgatcatggacgagtctcccgtagtctgtaaccttctgttgttactgtgtttttctctgaaagctggccttccaatgatcgactggc

SEQ ID NO: 9344 - DNA, 3158 bp, Oryza sativa
  ref <308>: DATABASE ACCESSION NUMBER: AK106692
  ref <309>: DATABASE ENTRY DATE: 2002-08-28
ctgggcaaagaatacgcctcgtcaccctcttaacacgcgactcgctcctcctcctcactcctcctcgcgtcgtcgtcccattccgtcgccgccgccgccgccgccgccgtgcactccaccgcctccgccgcgcactgaaccgaggcgaggtcttccccaaccaccgccggagccgtggtcttccccatctgccgcgactggccgcagcaggagccgacgtcgtccccatccgccgccgccgccgccgcaatccaccgctaccctcgaggtcgtcgctttctttcaccgccacgcactgaaccggaggcgaggtcttccccagacccccacggagccgaggtattccccatctgccgccgccgccgtgcactccaccgcgatttctccgcccatccgctgctccattgcgatttctccgccgctgcaacctctgccccgccgaccgcaccccatcgcgtcgccggtttctcacgcctgttgccgagtccaagttgatccgattggttcctccgtcgaggtcgcccctgccagagaggccaagccgatccagcatctgctccacctactggcccctccccgttctctgctcctgacaccgtcggaaatcaaccacaggccaccagcaactgcacctgcaccctgttgctcgcatgattgtgatgacacataatctcgatctgcaactcactgtctccattttctcaagccggaacattggggatattatggcaggagcagcgtggagtcaaagccctactccgtagagggctcgaggctgcgcggatcgcttcctctctttgaacacagctggggtgtgcgacatggctgtggtggaggatctgcccccacccaggtgaaccctcactttagactgtagattgcaacagctatatgtaaattacaataacgatttctctattaatgaacctgcagtttaatctgaaaatttaggcaaaatgtaaccgttgcagtcctttgttttctttctcaaacacaccattccagtcttttggaatgacccttagggcctgtttggcacagctacagctccagagctcagccaaacagtttcagctccaccaaaactgggagtggagatgggtggagctctctcacaaaataaactagagttgtggagcgttgtttaggaagctccacaactccacgccagacccaactcttgaagctaaatttaggagttggagctgtacgaaacaggccctaaagctgaccaatcacttgtgaaggaatcctctactttgcagaagcagaagcgttacttggcatatatactttgcagaagcagaaacacaacttggcggtggctggtttatttagcaatctctacttggctttgatggccagtgtggtaattaatttcagaaatctccgattcttgttgacaaaatttcttttgcaggttgaacatggtgatttcagacatttatcaatgatggattatctgcttgcctattctttctgttacatcagttgtgggatgtttttctgttaaattaatctaggttgctctcttgatctggtctagacagatcctaagcaaaggttgcaataaggaaaacaaaaggaaaaggtgagagaggggcttagtatacctgttgactgtagctgtgtcaattttagttcaaatgtttattggttttgtcatgtatactgcactgtggttcatgaagaacacgaagaatttgtatttggtctacttaattgatctaaattatgtagaacttcatgatttccttcagtgcaaaatatttattaaaaactgccaaatgtagttttttttctttttttttttatccctataaagaactgctagaaccttttttaccacgtgcaaaataacatttgcaatttttttaacaaagaagcagtcttacatcatgtgtgaggccaggtatcaacattttcttcagtgcaacagtcttttctattctaatctgctactagaagatcatgtgcctcacattttacaggatcattgatgatatgaatgcttaaggatgctattttgaattgttggttttctcagcaaacaaaagtttccatggttttatctgatttatttttattacctcacacttaggatatatagcacattgcattatgttatctgatttggacattcttgaactgtagccctttaaaattaacacttatattttagttaaagaatcaagttttatgacttggtttaagttatacatatctttcttcaaagtttaaaaataaaaattgtaaaatcgtatatgcctgccaccttatcttgcataagttgaggctgtttaccgtccttaggaaaaaattgtccttcaggtattggaagtataacatttgtatttgattttacaatgagggcatgaaactcgctttctgctggactcaaactgaaccattttggttgataccctaacattttgctctaccatataacttatttcactattacaactttatttagactgaaaaaaatttctggagtttggtgcatagctgcctgaagcctgaaggcttacaatttgtttagttgtgcttactatttgaatttattatgttcaaagtagtttcaaaatactaatgattcttagttattttttgggaaaaatcggttatgctcattcaagaatgtatgtctaacaacacatgtgatactcttttccaaaaattatacaaatacttattcagtttgagagtatttcaatgttcctggtttagttttcagttttttctccaagtagtgatattctttggttaattttgttttttttaatgcagctcaaaatatccatgtcaacttgaagatattgtggattgcagattgtgagggttacatttgaagttattgtggatgacacgaatcaattgtgtagatacttgtgttattttctcttacttagtggagttctcttgaatgcatctgaagacaactcttttgctttgagcctttcaagtgtttgttaagttgtggaaaattgtatccattttgtaatgttggctactttgcacctccacaacaagtgtccaagagggggtaaccaaaataggctagatcatgttagaacatattgttcttaaacttgtgtatttgtatgtttcatgcgacatttattggggaaaacacaataaactatcagggtattcac

SEQ ID NO: 9345 - DNA, 1831 bp, Oryza sativa
  ref <308>: DATABASE ACCESSION NUMBER: AK106693
  ref <309>: DATABASE ENTRY DATE: 2002-08-28
ccccctcccctcgccactgccacctcctcctccatcccgcaagcgccgccccactccccgccgcggcacccgtgatgctgcctcgcccctaactctaatcgtcgaagccgaagaccatcgagccagcgacgatctcctccgcggccaccaccgaccggctccgccgcccgcgtcgcgcctctctccaccacgccctaatcctctccttctcacgcgacgccgccggtgcccctccctgccgacgctcctcctcctccccccccctccaaatcaacgccgccgacgatcggcgccgctggaacaccatcgccgtctcgccgactaccgagctgaagacagccaggccagcgccaacttcatcgcctccacacatgccgaagctcatccatacccctgccgccgccgatctacgaaggtctcttcgttggggggactcgtcgccacctcgtccgacatccccttaacaatgatctgggccacccaggtccagcattgatttagtgctggagaagtacggcaagccacattcattctacctatgaatgaggaaatttcatcagtgtcagtgatgagttaaatcactcgaagtttgaagtttgaagtttgaggcttcagtaaggaaaggggcagcatatataaaagatgggcattattacagagtgtttgtgctgctacaatattgtgaaatacagggagactgaaatcttggagataaattactgaagaaccaaactctattttgcacctgggaggatgaccgcgaatggagtgacctcgatatccaagggcggggctgtaatgaggtggtacacccgtggaccatgacggtatggtgtgtgcggcggatgcgggcaaggagggaatcgcgtagctggcgaaggctacagccatcctgcgtgttcttagtgcagcacctttatatacgttctttctagaacaagggcaatttacagctttggtccattagagggaaaaaggtgatcaagaagaaatcattgttctgcttgggaacaaaactgatgttgttgacaagaggtgcgtggttcagaaattttcttgttttctgtagccttttcctgttgtcttgcttatccgatggattttaatcactaaaattgggattcagttaattgaacgttaaacacatagctctcttttccctgttgaagcgcatcttccatgggtctgtaacagctctgcctgctcaaggttggtcgtgagcacaacttacattcacattttcagcatggttttctcctctattactaatcattgaactcattattttctttgatgaaaactctacttgttttttgcaagttctctctgttttattaatttgatatctgaattgtgttttaggagcctatataaaattataaaattatggtgtgaaatatgaacgtatcaataattgtttttcatgaaacttctaacgaacatttttctgtaccttttatatattttgcccttatgatttattcattactcaaagaataagcaatctttgttggtaagtaagtatactgggtatgcattgatatggaaaaactttgagcaaacatttttttcacttccttcgaagcgtaatactacaatgttgtgattctactcttcaatctcagtagacgatgacaacccagagagtttctacagccaaaatgtgatacatcaagtccttcaagttttaagctgcagcagcttttgcaccactgcaccaacctgtttgtatcatttagacatcacttgcttggatgccatcctcacaccgttgtatatgtcagattattttcataaaaccattaaattccatttaaattctttgtacttt

SEQ ID NO: 9346 - DNA, 1801 bp, Oryza sativa
  ref <308>: DATABASE ACCESSION NUMBER: AK106694
  ref <309>: DATABASE ENTRY DATE: 2002-08-28
atctgttataaccatcgcgttggatcgtagcagcagccgccgacccaaacgcaaacgcaaacgcgacgccatgggaaggcaggaccagcagctgcaggtgctgaacgcgctcgacgcggccaagacgcaatggtaccacttcacggcgatcatcgtcgccggcatggggttcttcaccgacgcctacgacctcttctgcatctcgctcgtcaccaagcttctcggccgcatctactacaccgaccccgccagccccacccccggctcgctgccgcccaacatcgccgccgcggtgaatggcgtcgcgctctgcggcaccctctccggccagctcttcttcggatggctcggcgacaagctcggccgcaagagcgtctacgggatgacgctgctgctcatggtgatttgctccatcgcctcagggctctccttctcgcacacgccgacgagcgtcatggccacgctctgcttcttccgcttctggctcggcttcggcatcggcggtgactacccgctgagcgccaccatcatgtccgagtacgccaacaagaagacccgcggcgcgttcatcgccgccgtcttcgccatgcaggggttcggcatcctcgccggcggcgttgtcacgctcgccatgtccgcggggttccaggccgcgttcccggccccagcgtacgaggtcaatgccgctgcgtccaccgtgccgcaggccgactacgtgtggcgcatcatcctgatgctcggtgcgctgccggccatactgacgtactactggcggatgaagatgccggagacggcgcggtacacggcgctcgtcgccaaggacgcgaagcaggcgtcgtcggacatggccaaggtgctgcaggtggaaatcgaggtggaggaggagaagctccaggacatcacgaggggcagggactacggcctcttctcggcgcggttcgccaagcgccatggcgcgcacctcctgggcacggcggcgacgtggttcctcgtcgacgtcgcgtactacagccagaacctgttccagaaggacatcttcaccagcatccactggatccccaaggcgcgcaccatgggcgagctcgaggaggtgttccgcatctcccgcgcgcagacgctcatcgcgctctgcggcaccgtgccgggctactggttcaccgtcttcctcatcgacatcatcggccgcttcaagatccagctcctcggcttcgccgggatgacggcgttcatgctcggcctcgccatcccgtaccaccactggaccatgcctggcaaccaggtcatcttcgtcttcctctacggcttcaccttcttcttcgccaactttgggccgaacgcgacgacgttcatcgtgccggccgagatcttcccggcgcgtctccggtcaacctgccacggcatctccgccgcgtctggcaaggccggcgcgatcatcggagcattcggtttcctctacgcggcgcagccacaggacaaggcgcatgtcgacgccggctacaaacctgggattggcgtgcggaacgcgctcttcgtgctcgccgggtgcaacctcgttgggttcctcatgacatggatgctcgtgccggaatcgaaagggaagtcgctggaggagatgtccggcgaggccgacgacgaggaagcttctgccaacggcggtgccaccgccgtcaactcgtccggagttgagatggtgtaatccttcaggacgcaacgagatgacgaacacttgcatgcgaagctcgtacttgtagcgtgataggaaatgttatacttatatttattagatcgtactcctactagt

SEQ ID NO: 9347 - DNA, 540 bp, Oryza sativa
  ref <308>: DATABASE ACCESSION NUMBER: AK106695
  ref <309>: DATABASE ENTRY DATE: 2002-08-28
tggccagtttgtgaggaccgatcaagcgatcaaaccctagccgccgccgcctcctcctccttctcctcctcctccagatcggcaatcggcatggcgcttcgtgctctcgcctccaagctgaggatcccggcggccgctccccgctggactcctccgccgtctcgccccgtctccaccgctcctaagcgtaagctctctgccacctccaaaacctgttgaaaaaagttctctcgattttcaggaaatgctactcttggaacggattcgtgcacatcaagacaggtttgcgcggaacatgatgatttctcaagcaattggtaatttagttgggtatggcatcttttggtatcttgtcaacgatgtttccaagaacttggcaaattgatcgggttcaacaatgaacctgttatgtatggcttgatgaagcacctgttatgtatcttctaaaggtcctgaagatgaacctgttatgtatggcctagtatgtgctgatgaacatgtctaattattttgtatggatgatgaacctgttcaaatctt

SEQ ID NO: 9348 - DNA, 2273 bp, Oryza sativa
  ref <308>: DATABASE ACCESSION NUMBER: AK106696
  ref <309>: DATABASE ENTRY DATE: 2002-08-28
atcgacacaaaaccaaaagcgaagacgacgatcatggcgcggccgcggcgcgcttcgacggcaacgacaatgcagctggggcttctcctcgccgcgcttctcctcttcacgtcgtcgctggccggctctgtggcggcggccgcaccgccgccgccggcgggggccaagggtggtggtgccaagagcggcggcggcggcggcaccgtgatcgggatcgacctcggcacgacgtactcgtgcgtcggcgtctaccggaacgaccgtgtcgagatcatcgccaacgaccaggggaaccggatcacgccctcgtgggtcgccttcaccgacggcggcgagcggctcatcggcgaggcagccaagaaccaggcggcggccaacccggagcggaccatctacgacgccaagcggctcatcggccggcagttctccgacgccgaggtgcagcgcgacatgaagctgctgccgttcgccgtcgtcgaccggaacggcaagccgcacgtgcgcgtcgaggtgaaggacggcgacgtgcgcgtgttcagcccggaggaggtgagcgccatggtgctcacccggatgaaggagacggccgaggcctacctcggcgagaaggtcacgcgcgccgtcgtcaccgtcccggcctacttcaacgacgcgcagcggcaggccaccaaggacgccggcgtcatcgccgggctcaccgtcgaccgcatcatcaacgagccgaccgccgccgccatcgcctacggcatcgacaagaagggcgcggagaagaacgtcctcgtcttcgacctcggcggcggcacgttcgacgtcagcatcctcgccatcgacaacggcgtgttcgaggtccttgccaccaacggcgacacccacctcggcggcgaggacttcgaccaacgcctcatggaccacttcgtcaaggtcatccgccggaagcacgggcgcgacatcgccggcgacgcgcgcgcgctgggcaagctccgccgcgagtgcgagcgcgccaagcgcgcgctcagcaaccagcaccaggtgcgcgtcgagatcgagtccctgttcgacggcgtcgacttctcggagccgctctcccgggcgcggttcgaggagctcaacggcgacctcttcaagaagacgatggtgccggtgaggaaggccatggcggacgccgggctgggcaagggcgacatcgacgagatcgtcctcgtcggcggcagcaccaggatccccaaggtgcagcggctgctcaaggactacttcggtggcaaggagcccaaccgcggcgtcaaccccgacgaggccgtggcgtacggcgccgccgtgcaggccagcatcatcagcggccacgtcgacgagaacacggagagcatgatcctcctcgacgtcgcgccgctcaccctcggcctggagacggccggcggcgtgatgaccaagctgatcccgcgcaacacggtggtgccgacgaagaagacgcaggtgttcaccacgtacaaggacaggcagacgacggtgaccatccaggtgttcgagggcgagcggagcatgacgagggacaaccggctgctcggcaagttcgacctcaccggcatcgcgccggcgccgaggggggcgccgcagatcgcggtgacgttcgaggtggacgccaacggcatcctcagcgtgctggccgccgacaaggccaccggcaggtcggagaagatcaccatctccggcgacgaccgcaagatcagccaggaggagatcgaccggatggagcgcgaggcggaggagttcgccgacgaggaccgccggcacagggagcaggtggacgcccggaacagcctggaggcgtacgtctacaacgtcaagagcacgctcggcggcaagatggcggacgccatggagggggaggagaaggagaaggtggaggaggcggtgagggaggcgcacgagtggctggacggcaacccggacgccggcaaggaggagtacgaggagaagctgcgggagctggaggacgtgtgcaaccccgtcatgtcggcggtgtaccagaggtccggcggcggcggcggcgcaccggaagatggcaacgtcgacgacgaggatgaccacgatgagctttagtttagtccggctggcggctgctaagctagctagctcctgtttcactaactatctagagttccttttttttttcattgccgtataaaataattttactaggcaaacaattatattgcaaatatattagtatttttgtattacattcatagtttggattcgatcgaaagtgtgttttc

SEQ ID NO: 9349 - DNA, 1617 bp, Oryza sativa
  ref <308>: DATABASE ACCESSION NUMBER: AK106697
  ref <309>: DATABASE ENTRY DATE: 2002-08-28
accgcgccgccgctcgccgccgactccacctccccgtcgcggcggcatcgatcgaccggagccggagaagaagaagaagaagatggtggcgatcagggcgcccaagagccaccgcgccaagagggagctcctcaagcacgcgcccaagctcgttgagaccggcaagaagacgcttgttctccatgggaccaagaccagcgcggtgctgaactccgtgctcgcagatttgttccacctgaagcgtgataatgccgtcaggtactccaagaagaatgagaacatcaggccgttcgagagcggcggcgaaacttcgcttgagttcttctcactcaagacggattgcagcctaattgtagtaagttcaatttattctatctgcaattatagattgttattgttatttctagcgatttggtagtgtcgaggagaggtggagctaaactgtgaactaaactatgaacttgacaccacttacgtggaacctatctgaagcttactccgtgcctattccaagtgcttgtagttccataatttttatttaaatgtggtagtaaccaagtgatgtgttttaagagattatgtttatgtaccgttttgactgtaaactttctttttgttgttcttgttattccagtatggttctcactcaaagaagaggcccaacaatcttgttttgggaaggacttatgatcaccatatatatgaccttgttgaggtaggagttgagaactacaaataaattgaatcatatgtctatgataagaaactggcacctaagcttggctcaaagcctttctttaccttcattggggagcattttgaaagtgttgaagagctgaagcatttgaaggaagtgctgcttgatcttttcagaggagaggtgtgcatcttttttatttgtcgatttgcacattgtgaatagataatacattgagctttggcataacctgtttgctactgatgtaggtggtagagaatctgaatcttgccggtgtagatcgggtatttgtgtgcacagcaatatcccctaccactgtctacttgatgcactgtgctctccgtctgaaacggtctggcacatctattcctagaatggagctggttgaagttggaccttcgatggacctagtagttaggcggcaccgatatccagctgaaagtttgaagaaggaagcaatgaagactgccgatcatgctaagaagatgaaaaatgtcacgaaggatcctgtgcagggcaagttgggcaaggtctacattccagaccagcagattgcaaagatgtctttatcaaacgacatcaaggggctcaagagggagcgccgtgaggccaagaaaaacaaggagcacacgaagaagcaaaagataaacgttgagtgaagaaagctgaaggctattcattttttgttgacaattggccaggtcagattaaagggttctgtggggtaactgctccaactcttgcgttaaccatggggaagtcaccttgctgttagattgagtggtatattagttgagtaccatataaccatcctctagtttttgcctttgtaatgaattccacaacaatattgagcatgctggacttaacatgaaattttaatcagatatatttttttg

SEQ ID NO: 9350 - DNA, 2175 bp, Oryza sativa
  ref <308>: DATABASE ACCESSION NUMBER: AK106698
  ref <309>: DATABASE ENTRY DATE: 2002-08-28
gtgaagaaacctgaaggtgcttatgctcagctgatccagctccaaggggcacagcaggatgctgagatccataatgacgacactgacatgataataagaagcgattcaggctctaggtctataaatgtaaaaccaagaagccaaagcacctcatttaggagatcaattactaaaggctcctcttttgggcatagtggcaggcatcctatccctgctccccttgactttccagatcccatggaattcaaggatgatctgggcatggaggagactacagacaaagtgcctcgtggccagaagaaagcttcaatcagtcgactgttctatctgaacaaaccagaagcttttgttcttgtacttggttctgtaaccgcggcaatgcatggactcatgtttccaatatttggcatactgatctcaagtgcaataaagatgttttatgagccaccatcagaactcctgaaggactccaggttctgggcaagcatgtttgttgtggtgggagcttctgcatttgttctgattccaaccgagtacttcctgtttggattagcaggtggaaagcttgtggagcgtatacgttcactgacattccgaagtgtcatgcaccaggaaatcaactggtttgacaaacctgaacactctagtggatcgattggtgcaaggctgtctgttgatgctctgaatgtgaagcgccttgttggagacaatttggcacttaatgtccagactgtatcaactgtcatatcaggttttacaatagcaatggtggcaaactggaagctggcattgattataacagtggtagttcctttggttggtttccaagcctatgctcaaatgaagtttttgaaaggtttcaacaaaaacgcaaagctgaagtatgaagaagcaagtcaagtagcaactgatgcagttggaggcatcagaactgtggcatcattttgtgctgagcagaaagtgatagaagcatatgagaaaaaatgtgaatctccagtaaggcaaggaataagggaaggtgtagttggtggcttgggttttggcttctccttccttgtgttctactttacttatgctctctgcttctatgttggagcaaagtttgttcaccaaggagtggcaacgtttcctgaagtgtttaggttttggctaccagtggaatctcacgaacaagtgcaacaggcgcagacagcaccaaggctaatgaatcagctgtttctatcttcgaaatccttgaccggaaatccaagattgattccagcagcgaggagggtgtggtcattgcaagtgtgaggggtgacattgagttccataatgtgtgcttcaattaccccctacgcccaaatattcaaatatttaaagatctctccttgtgcattccctctggaaagactgttgcactggttggagagagcggaagcgggaagtccacggcgattgcgctgcttgaaaggttctacgacccggataccggcaagatccttcttgatggggtggatctcaagacattcaaggtcagctggcttcgtattcagatcgggctcgtggcacaagaaccggtattgttcaatgacaccatccacgccaacatagcttatgggaagcaagaacaggcatctcaggaggagatcatggccgctgccgaagcagcaaacgcgcaccagttcatctcggctctgcctgacgggtacagcaccgtcgtcggcgagagagggatccaactgtcaggcgggcagaagcagcgcgtcgccatcgcgagggccatcatgaaggaccccaaggtgctcctgctcgacgaggcgacgagcgcgctggacgcagagtcggagcgcgtggtgcaggaggcgctggaccgggtgatggtggggaggacgaccgtggtggtggcgcatcggctgtcgacgataaaaggcgcggacatcatcggcgtcctcaagaacggggcgatagtggaaaaaggggggcatgatgaactgatgcggataaaggatggaacctatgcttcgcttgtcgagcttagttcaagttcaaggtaaatcttctgaaagcctgaacattatcacctctaatagtatgaaaatactgacttctcctgaatagagtttgtccgctggtactgaaaatggtcatatatatgtaagtttatagtaggaaaagcaaagctatgcattctat

SEQ ID NO: 9351 - DNA, 1526 bp, Oryza sativa
  ref <308>: DATABASE ACCESSION NUMBER: AK106699
  ref <309>: DATABASE ENTRY DATE: 2002-08-28
aaagcacaagatttagctatcctagcaagtcgccaaaaaaaaaaaaaccaacgtagctgcaagcaacaaaacaccagccgggccatgtcgtcgtcgccgatgcttggaggcatcgccgacaggtggcgcgagctccatgggcaggactcgtggaatggcctcctcgacccgctcgacctcgacctccgctcctccatcctctcctatggcgagctcgtgcaggccacctacgattccttcaaccgggagaggcgctcgccgcacgccggcgcgtgcgtgtatggccacggcgacctcctcgccgcggcgggcgcgtccgccgccggcagctacgcggtgaccaagttcgtctacgccacgtcggggctccccgtcccggaggcattcctgctgctgccgctgccgtcgctgctgccgccggcgtggtcgagggagtccaactggatggggtacgtcgccgtggcgacggacgaggccgtcgcggcgctcgggcggcgcgacatcgtcgtggcgtggcgcggcacggtggagagcctggagtgggtcaacgacttcgacttcacgccggtgcccgccgcgccggtgctgggcgccgccgccgccgcgaacccgcgcgccatcgtgcaccggggcttcctgtccgtgtacacgtccagcaacaaggactccaagtacaacaaggccagcgccagagaccaggttcttgaggaagtgaggaggctgatggagttgtacaaggacgaggtgtcgagcatcaccgtcgtcgggcacagcctgggcgcgtcgctggcgaccctgaacgccgtcgacatcgtggccaacggcgccaactgcccgccggcgagctcgtcgtcgtcgcagccgccgtgcccggtgacggcgatcgtgttcgcgagcccgcgcgtgggcgacggcttcttcaaggcagcgttcgcgtcgttccccgacctgagggcgctccacgtcaagaacgccggcgacgtggtgcccatgtacccgccgctgggctacgtggacgtggccgtgaagctgcgcatcagcaccagccggtcgccgtacctgcggtcgccggggaccatcgagacgctgcacaacctcgagtgctacctccacggcgtcgccggcgagcagggcagcgccggcgggttcaagctggaggtcgaccgcgacgtcgcgctggcgaacaagggcgtcgacgcgctcaaggacaagtaccccgtgccgccccggtggtgggtctccaagaacaggtgcatggtcaaggacgccgatgggcattgggcgctccacgatttcgagcaaatttaagctctcgatttcgaaaaatttgcaaaatggattacgtatagaagtgctcgttaatgggcttgacacgtcgaataaatgggatttccccctcatatcacataattcatttgtaaataaaactctgtccagtcaaatgcatgtgttgatttggacattgttacagatacaaaggtattgatttggacacgttgagatgtccagtaattatttcttgatgc

SEQ ID NO: 9352 - DNA, 2357 bp, Oryza sativa
  ref <308>: DATABASE ACCESSION NUMBER: AK106700
  ref <309>: DATABASE ENTRY DATE: 2002-08-28
tccacaccttctcctcctcctcccacactgctgcgcggccgccgccgccgccgccgccttccgcatcgtcgccgtcgattttgcggagctccagtggatggaggtgatggattcggtggccgtgatggaggtctcgccggtgccgaagccgccactggaggcggcgcttgcgctgcgccgcagcgttcggtgcttgaacaggacgcgccgtcccacttacgtggagcaggaggagcccaaggagagtgctggccggcggcgcggcggcaagaggaagcgggaagaggagaagaaggagccggtggcgcagcacgccatgaagccggtcaggatgggcgatgcagcctcggagaggaagccctcctcggaggggaagccgatgcccgcaattgcggcggagccggtttcttgtgccgggttcgcacgacctgctgccgaggatgatgtccttggcaacgggaagagtgcgaaactgcgggtgaaggaaaccttgagggcattcaccagccattaccttcaccttgtccaggaggagcagaaaagagcacaagcggtgttacaggaaggccagaagcgtccatcaaagcggcctgacttgaaagccattacaaagatgcaagaaagcaatgccgtgctttatccagagaagataataggggaactacctggtgttgatgttggggatcaattttattctcgtgccgagatggttgttttgggcattcatagtcattggctgaatggcattgattatatgggaatgaaatatcagggaaaggaggagtatgcaaacctaactttcccactggcaacttgtattgtcatgtcgggaatatatgaagatgatcttgataaggcagatgaaattatttatactggtcaaggaggaaatgatttactcggtaatcatcgccaaattggctctcaacaactgcaacgtggaaatttggcattgaagtacagtaaggataatggcaatcccataagagttatccgaggacatatatcaaagaatagctacactgggaaggtctacacctatgatgggctgtacaaggttgtagatgactgggtgcagaatggagtacaagggcacgttgttttcaaatataaattaaagcggcttgagggacagccatcactgacaacttctgaggtccgatttactcgtgctgaagctcccaccacgatttcggaattacctgggttggtttgtgatgacatatctggtgggcaggagaatcttcctattcctgctactaatttggttgatgacccacctgttcctccaactggttttgtgtactccaaatctctaaaaattccaaagggcatcaagattccatcttattgtaatggctgtgactgtgaaggagattgcgcaaacaacaaaaactgctcatgcgcgcagcgcaatggttctgatttaccttatgtatcacacaagaacattggcaggttggtggagcccaaagctattgtatttgaatgtggtgctaattgcagctgcaacaacaactgtgtaaatagaacatctcagaaaggtctgcagtatcgcttggaggtatttaagacagcttcaaaaggctggggtgtcaggacttgggatactatcctccctggggctcccatctgtgagtacactggtgtgctgaggaggactgaagaagtagatggtttgctgcagaacaattacatatttgatattgattgtcttcaaactatgaagggtctggatggaagagagaaaagggctggctctgacatgcatctgccgtctcttcatgcggagaatgattcagatccacctgcaccagagtattgcattgatgctggctctattggcaactttgcaaggtttataaaccacagctgcgagcctaacctttttgtccagtgtgtcttgagctcccataatgatgttaagctggcaaaggtgacgctctttgctgctgacactatacttcctcttcaggagctttcatatgattatggctatgtcttggacagtgttgttgggcctgatggaaatattgtcaagctgccttgcttctgtggtgcaccgtactgccggaagcgactttattagatctgcacctgtttgcatctatttggaatatgaaccactctagactataatatatagtagtatatgtattcagtgccaggcgtgtaaatggcatgctggaaacactatgatattttgcagaagatgagcattctgatttttttgtagaggtcatgttggggatgctatgatatttagcaaaagaatagcattctatttttgtgtagagaacatgctatgatatcttataaacaattaacctatatatctaagtgctgatttaaccctc

SEQ ID NO: 9353 - DNA, 1693 bp, Oryza sativa
  ref <308>: DATABASE ACCESSION NUMBER: AK106701
  ref <309>: DATABASE ENTRY DATE: 2002-08-28
aagcagcggaccgaggatcggaagaaccagcagatgatgcggcagtcacaggccacggttctgcagaagacgcagcaggtgcgcgccgcccagcagccgcagagccgccaccatcagcagccatcgggtgggtcccggccagcggtgaccgcgactcgccccgccgcagctcccaacgccgagagatttgagaatcgcctcaagaagccgacgaccttcctctgcaaacacaagtttaggaatgagctgccagatccaagctctcagctaaaatggttgccactgaacaaggataaggaccgatataccaaatacagaatcacttcattggagaagaactacatacccaaaatgattgtccccgaagatctcggaatatctcttgacctacttgatatgagcgtatataatactcctcctgttcagccacccatggctccagaagatgaagagctattgcgtgatgatgaggttctcacccctgttaaaaaagatggtataaggaaaaaagagaggcccaccgacaagggtatgtcttggctggtcaaaacacaatatatttcgccacttagcaccgatgcagcaaaaatgtccattactgaaaagcaagcgaaggaaaggcgagaatcaagggagggccgaaatactttcttggaaaatattaatgacagagagaagcaaattaaagccattgaggactccttcagggcagctaaatcacgccctgttcaccagactaaacgtgggatggaagcagaatgggttctgcctttgcttcctgattttgataggtatgatgatcagtttgttatggtgaattttgatggagatcctactgccgattcagagcagtacaacaagctagagagatctgagcgtgatgaatgcgaatcccgggctgtgatgaaaagttttcttgtcaatggttcggaccctgcaaaacaagagaaatttttagcatacatggttccatccccccatgagcttagcaaggacttggatgatgaaactgaagatattcagtattcctggcttagggagtaccactgggaagtaaggggggatgacaaagatgatcccacgacatatcttgtcacatttgatgacgatggtgcaaaatatttgcctcttcctactaagctagtattgcagaagaaaaaagcaaaagaaggcagatctggggatgaaattgagcatttcccagtgccctccaggattactgtgagcagaacagctcatggtggtatgatggaacatggagaatcttctagcatgcatgagaatttgaagagacaaagatcttcggttgatgatgatctctatgaccatcctaagcattctcgagtagaagatatggatcagtatagtggagacgaatattctgactgatcaatagatatagatgaccatcatcctgcaccaacaaatttaatcagcacacatgaatctcaaagatctcatatttatgtgctgtggtgcctttataagtggttatagggtgcagggtggacgagaaaacataccttggtgcttctgggcaagaactaaattttgaagtgcagagtatgcaaaacaaggcagtgtaactggacctaaagactttggtctcagtagtgatggtggaggtctcaccatcattgtaaagaagtcttggggtcattctcaactatttgttttgatgatatagaccacc

SEQ ID NO: 9354 - DNA, 2389 bp, Oryza sativa
  ref <308>: DATABASE ACCESSION NUMBER: AK106702
  ref <309>: DATABASE ENTRY DATE: 2002-08-28
atggagcatgttctcttcgtcatccaagaagccatcaatggcgccgccgccgccgctagacggcggcgttccggtggccgaattctccatcgacggcggcggggacgcgagaggtgataagctgatggagaacgcgcggcgcaggatcgccgccggcgatgggcggccgggcaccacctgctggagcgaggcgtaccggagcctgttcgcgagctgcggcgacatcatggccgacaaggagctgcaggcgaggctcgcgtggcgcctcagcggctgcttccaggaggactccggccggccgccgctgccgccgtgcgacgccgcggcagcccacggccacggccacgccgacatggtgcactgccgcgagcgcctctccgactccgagtccaaggtcttcctcgccttcttcctcgagacgaacaccctctgccaccaactgcaggccgaggcgttcaagcggagcacggagaggctcgtgaacgacctgacaaggtcggcgaggtcggcgcgcgagaagctggaggcgatcgaggagaggtcggagaagatcatgcgggagtccgaccatctccggcgatcgctgtcgtcgatcatgtcgcagacggagcacctcgccacggcgtccgaggacgtccgggcccggatcggcgacgttcttgatcggtcggcggcgatcttcgagcggtcgagggagatcgccgccgcgcaggccgagctgcggggagggcaggcggcgatgagggaggagctcgccgccgggatggcgcaggtggaggcgtcgtacaggagcatcggcgaggagatggggaggctgagacaggaggccatgggcatcgagagggaggtcagggccgtcggcgacgccatggcggcgaggatggtggacttgcagagcgccgccgacgacatcggcgccgccgccgggagatcgctggagaatcagatgctgttgttggatggacaggcaaaagcgatggaagggctcaatcatctctacagttttcaggcacaagctcttcaggagagcagcaaaattgcagggaaaccattcagaagctggcgcaattcgggcagcaacagcaggaggagctcctgtctcggcaagaacagatccggcacgctcacgatgacctcatgaaaaattcagaatctatactggaagctcaggaagagttcagagctaagcaggcgagcatcttcgcggcgctggacaagctctacgtcctccacaacgctgttcttgtggagtcccgtttcatcaaggccttcttcttctactgctgcatcacattcctcgtctacttgctcaccagcgccaagcagaccttcgccattagaggccacctctacttcggtcagattcttcggacttcaacacaaacactgccaacattcagaaaggcagaaacttctctgaatttttttttctgaacatgttcatctgtttcatgttaggcttttgcatcacgctaaactgagaacattcagaaagacagaaacactttttttctgaacatgttcatctgttgcttgctaggactctgcatcatgctacactgagagcattcagaaagactgaaacgttgctgattttttttttctgaacatcttcatctgtttcttgttaggaccctgcgtcacgctgcactgagaacattcagaaagacagaagcgttgctgacttcttttattctgatgaacttgttcgtctgtttcttgctaggactctgcatcacgctcgtgctggagaccgtcgtcatcaagctcggagccgacgacttcagtaagcagttcttgatcatgtccaaagtgctgttaatcagatcggtgttcctcgccgccgcagcagctcagatcttgcactcaattttcacatacaaggattacgaagtactgaaccatcaattactgcagacattgatggagaaagtccgggcgattgaaggcaatggcagtggcggagaccagatgaatccatggagtactgggagtgattgcagcagcattggtgactgctcatggttcttcgacgagcagctgcaggacgaagtggacagcgaaatcgacccagatttcgcgttgccgagagaaatctgtggaaatggcagcattttgccggaagaattcggcgaaaattcagtcaccacgtccatctcgaggaggtacaacctccggccacgcatcaggccgcggtgaacagcacacaagcagtgagagcatataaaagcagttctgtcagacattgtgctcaagaaatgaattatagtgaaaccttttttttagtatatttttcttttccagcttctctgaagataaccacatcagatgaaatggtattggattggttgtacataagctatatttgaaagtaagagagtttgcagtg

SEQ ID NO: 9355 - DNA, 1746 bp, Oryza sativa
  ref <308>: DATABASE ACCESSION NUMBER: AK106703
  ref <309>: DATABASE ENTRY DATE: 2002-08-28
gtgcgctgaccacgctggactagcgctcctcctcgccccgcctcagtccaacgctgctcccgccggcgctccgcctcctccgccctcttcctcctcgccggaaccgatttcgtccccttccggcgtcgccggcggcttttcccgccggtgctcctcctccgccctattcctcctcacattccccgttcgcgccgccggagggtcgtccccttccaccgacaccgccgtactccaccgatgccctcgccggaatcgatttcttccctttccgccgtcgccgcaatccacttcataggttcatcttgcgctgattggttcccgtcagatttgagtaggaactaaaggaaccaacactgttccccctgaaccctaagttgaccatgtgcagcccctatcaatggatttgcagccgtggtgcgaaggcatcgtatcccctcatggcgttgcaatcccagtaggagcttgccatcggccacatctggcgtttcacaatcctgctaccgctgattttcaaatgatttcacgagcgtgtagacaacagcaattatcaaacaaggttcatccctaaatcagggacaagatgagcaagcagctaaccatttcattaaaattgaggtctttgttgtttgcatggatatgaactgaagaattgagatctttgttgtttgcatggatatgaattgaagaaggataatattatactcttggagttcccaaaaggacagtgcaatggccgatgaaggcattctttgatgctctgtctactaagttaaactaaggtgtagtatcctgtgatggaattgcagttgcggatactacaagtgctgcagctgatgtacatgagtacaaaaagaccagaatgtgttaagataacgactgcactgcgactaaagatgtcaattcaaattattcctgacctgaatgaattatctggaattaggtccacagtcttggagcaccagtatcttcgatctttcactggaggtttgctttttcacgtgtaattaaaatgttgcactgcatcttacaaaattatcactctaggaagcttactttttgtatgtcagaatttgtttgatcgttttctccaagaagcttactatttgtatgttctcagccaatttttgcatttactgtctggttagacaattacccgttgcagagcaggtgtccataatggagaggttattatatttttccttttgcacaattctgtttccaaagtatttaaattgtgcctgtacaatttgttcacaggcaagttcacacttttttaatttagttcagatcttagtttccatctgaatatatggtgcaccatagccgtggaaaacggtatatacagctctatagcaagaatttgttggattcatgctattgatacttggctcggtcaatttattttacatgtgcaagggagatcaggtgcatatgcagtgagaagagtcaacagaaaggaatgaggagtaatgaggcttgaaggaataataatatgcaaggtgactcctttatattagtttaacaaacagagtgaaattgattcatgcatattagtttaataaacaaagtgaataactgaagcgaagtaaatgatcacgctttggatttaaatccccaattgatactgttttgtttggggaaaacattttttcctgtcaactttgctaaatgcttttccttatggttttcacacaatgcgtgaactattttttagcactggaataatgtgaactctgttttcatacc

SEQ ID NO: 9356 - DNA, 2083 bp, Oryza sativa
  ref <308>: DATABASE ACCESSION NUMBER: AK106704
  ref <309>: DATABASE ENTRY DATE: 2002-08-28
gaacatgcagtttaaaaaacaaatttcagtggagtattaacaaactcctcttttgcttagtttggcacgcaaaaacaaaaaaaaacagagggatattcgaggatgatgaagaagaagaaaaacaaatacgattgggtcgcgaagaacaagaaatcagaacttccatggacccccacacagccttgcaaatcccaagaaactaatacaaggatcgatcgacgatgatcatcaccaactttattctaaaacctttccgtgtgccaatactcgcagggaaaaggaagaaaccaaattcacaagaacacaaaactagaaaggttaaaaaaacgaacaccgaaaccatacgcaatcaccttcctctgacctctgaattcaggagaaaccatgatcacaaacacagacccccgaaccgttcatcacagaacaattcaagagccaaaaccacgaacacaatcacacggacccgtccatcggacgacagagacaacaacacaggtaacatctgaacaatccacacatacaaggtgaaagaacagcggccaacctttccttctcccttctccggcacggcctccgctccgtctgacccggctgctgctaatccaatcgaaaagccagctaagaaccctccgagaccattccaggatcggtgagaaggaagagaaaaggaagagagagggagataagaagaaccagtggagttcttatatatacatgccggaaaccacacggaggaacgagagggacggagaagaggaggagagaagcttaaacacagaggaggaagaacgagggaggcaaaggcgcgggacccacctggatcggatcgtggccgtccgatgtggcgcgagagtaggatcggacggcgggagatgcgatgcggccggcgtggggcccgctcaaacggaatcgtccccaccacccaacttcctcctcctgcccgataacctgcctcccgtatcgacacacgcgtggaccggtacggacactgacaggtggggccacctctgttttcttttttttctttttgttgtccggtgaagcagcatcagtgtttcctgcgtcgcattatgaaacttcagcaatattttctgcatggtttgcttgctattatagactatagtataaatttctccccaaaaaaaactgcatgcttttaaaaaaacgtgtgaaataagagaaattggaattgtttaatggttgtactgctttaaatttttaggggtggcatgccatgttgtaaaggcaaaaaaaattgttgagctagtacttactttttgtggagtgatcagagagggattaattggttattttggttaggacgaccaaagcttttggattaccaactttgtatgaggctgtaaaggtgtaaagtatcattgagtacttacttaaattttattgtgtgtctgtgtttttccgtgaaatcagagtggacaggttgcataattgctttgatctatttaacaattcttagtatttcagtctttgctcgccataattcaggtcgatttcttaatgatatagcagagttaatagtacatggagaagtaggagtacttgataacaactgagctttcatttggatgcacacatcacacacactattaagcatggactccaaccccaagcttgtgaaaacttatctgcaaaaaatattctaattgcacaagagatggagatagaatcttcagataaaaacaatggcaagccacaggctgatctcgtcatgctgccgacttggcaatctgtggattcttcaaattgaggacaagataaaaaggaagcttttttttttaatctataattccctgtagtttgtggctcacgcattgctctgacttatacggcacaaatttgattagaaatcgttttcataccgagtgaggtggcttgtgtagacggctccataggatgcttttacttcttttttttttcttctcttatctccagctgtctgaatacaaatatactcaaagttgagagtataatctcataattactctaacatatgagttagctttattccaaaaatacttaaagattagaggaaatacatgaagtggtcaactatttcttcatc

SEQ ID NO: 9357 - DNA, 3187 bp, Oryza sativa
  ref <308>: DATABASE ACCESSION NUMBER: AK106705
  ref <309>: DATABASE ENTRY DATE: 2002-08-28
agcacaaagcttttgtgaggttaatgggccttcagtatagaattcaatacaaacaaggatctgaaaacaaggtggcatatgccctttcaaggagagatgctcagacagaattgttagcaatctctgttgggaggcccaaatggttggaaatagtggtagagcggtatgaacaggatgatgaggtaaagcaactattggcacaattgattttgaatccgactggtgttgagcatttctctctacttaatggggtcattcggttccaaggcagaatttggttgggtaaatttgaagatgcacattaagcagctttgctggctttacatgctagtggggtcggtggtcactcaggaataacagccacttataacaggatcaaaaatttgttttattggcctggcatgaagaaagatgtgcagaagtatgttgcttcttgtgagcgtgttgtttccgtcgtttcggaagtccgcggtcgcgaggaaaagagttcggaagatcaaagtgaagaagcaaggcaagtcacacattccccttgagcattttgatcctaatttacaaatgttttactgtttgcaaataaatatgcatgttttgctaattacacgggatcagggtttacctatctgctcgcttgtgccatgtttacttgatatctatcctttgtcaaccctgagtaataaatcgactagctcatgttacttatgtgacttagctagaactatatgcttagccatgcttaattaccactagctcagttgatgggataattacaatattagacctttttagtatcagagtgagctgcgtgctcgagacatctggccatgcttcatggtcgtaattatccaactaaaatgcgactgaatggtgggttgtgggtgcatggttttgctggtcgcacccatggcagttaaggaccggttcgcgggatgccctggaagaacttatcgtacttaccacaagccagcgtgggcaacggctgggcttgtagtgtagctttcctctagccgacgcatccaggcaagggtgggcgtgatggagcggggcgggccctgcgatggcctctgtcgcttccggattcacctaggcacgagaggggactgcccgctgccttgcgaggagtgggggtgaaacctgaggtgtggtgtgcttggttagagggggttatgcgaagggtcctgtcacggcctctttccggtatgtcgtggtggcatgtcggcgcacggaaacgtgtcgtggggctgtgtcttgtgggtacagttgtacacctctgatcagagtaaaactattcgaatagccgtgcccgcggttatgggcggtcgaccaaattcaccgtgattagtcccaccttaataaatcgactcaatgcactgtagttcaggtgggttggttgggcctgttcaacgtggtgtagcgttgatcagtggagatttaatgttactctaaatactcaacagttttactgttttgctcaataaaatgttttacaaccgcctttatgcaaatagccacaaaccatccttgtatccccttgcacgtctgcatcgttggagtggcttgctgagtacggtggttgtactctgtcttgctattattcccccttttcagaagtgtagtgcttctgagctgaagatggggttagaggaccaaagctcagaccccagttgagttttggctgtggagtggagctgaagccccgctaggatcgcctttttccgctgctgctgcttttgtttcggtgtgaggattaagtgcctcttctgtaagtattttacgctttatttacgtttggaactgtatattacttgtcgttttgtgtaccctggctggtcctggacagggatttaatacgcaaaatagtctggaaatttgggttaaatttctgggcgtgacaagtatggacttcatcgaaggtttgcccaaatctgaagggtatgacacaatattggttgtggttgataaattctccaaatttgcgaagtttattcccctttcacatcccttcacagctttgcaagtggccactgcttttattaagaatgtctatgatatctttggcatgccccaagtgattatttcggatcgcgataaaattttcactagtgctctttggcaagaactgttcaagttggccgatgtgaagctcaatatgagctcttcataccatccccaaactgatggacagacagagcgcttgaatcagtgtctggaggcttatttgcgttgtgctgttcattcttgcccaaagcattggtctaagtggttgtcgcaggttcagcattggtataacacagcttatcatagtgccttggataagtctccttacgaagtgttgtttgctaggaaaccaactccatttggccttattgatgttggcgacagcatggtacctgatgtacatgtttggcttcaagagagggctcatatgaatgaagtgcttcatcagcaacttaccagggctcaacagaggatgaaataccaggctgataagcatcgttcaaaaagagttttcaatgttggggatatggtttatttgaaattacaaccatatgttcagatgtcagttgctaaacgtagttgtcagaaactgtgtttcaggtactttggtccatacaagattttggagcgcattggagaggtggcatacaaattggacctgcccccacaaagtcaagttcatccggtagtccatgtgtctcttctcaagaaggcaattcgtcctgatgcccaagttcaagccgatcttccagcaagttgcatggcagaagatgcagcaattttccctgaagaaattttgcaccgtcaactcatcaagcgaggtaatgcagctgtgccctatggattagtccgttggacaggtttgcctgccgctcttgctacatgggagaatctatgacagctgcaatttcgtttcccatcttctccggcttggggacaagcctcttcttaagcgggggaaattgttatgtgttgtgtgtgctgtagcttgtcagctgttgtgttccctgtattgagtataactgggtgtttgggcctggcttgttgtgggccgtggaccgtgtgtgtgtgtgtttacgacgtgccgtgctggactggcggtcgcgtcgagtgcgtgtgtcttgtacccgttaaaaggggaactccctgccgatgagcaggtatcgatgagaagaaatcaaatacaatc

SEQ ID NO: 9358 - DNA, 1890 bp, Oryza sativa
  ref <308>: DATABASE ACCESSION NUMBER: AK106706
  ref <309>: DATABASE ENTRY DATE: 2002-08-28
agctgccacccgcgcgcgccgccgcggtgaggccagtctgtgtccgcctttccggccggtctgggtgccccgtgcccgtgtccggtgtccaaagaactccctccaaacaccggcgccatgggctttgctgaagagaatcccgtcgccgacgggaggctcggacggccgcggccgcgacgctccgccgccgtcgtctgcgagcggccgccgcacaggacgggaccagcaggcggcagctgtttccttcctcggcaagccaggctccacgcaggtgacgtgtctccctgtgcctaccaaatgtgggccccacatgtcagtggacggcaaccgccacgtcagattcgccgcccgcctctctcgtcgccgagagcctatttaaacccgacgccgcctcggcgctaaccgccgcgacagcaaacacctcgcctctctctctctctctctctctctctctctctctctctctctccccctttctctctcgcttgctgctcgctcctcgccggcgacgagggcaggaagccatgttcggcacggagtccagcagcacgggcgggagctcgtcgacgagcacaggcgacagccctcactgctggagcccggggacgaacgttcagccgggcgcgggcgtgggcttgaactcgatttgcttcgcgtcgtccggcgacgggcccgcgcgccttggcgtggcgccgttcgagaacgggcagtgcgtgcggctcctcaaccgcggccgcggcggctacctcttcgccgacgagtcgggggtgcgcgtgcgcaccgactgccgccgcgggctgatcaacaccgtgtggtgcgtgcagatcctggggggagacaccccgcacatcttgctccgcggcgcctacggccgctacgtcgccggcacgcccttgggcgcggacgagggccacatcggcatcctcgtcacgcagcgcgtcttggagacgatggacaccaacgtcatgtggcgcaccgtcccgggcccgagaggcggaggcgttgttctcatcaacgcgagctcgttcaatggaggtctgagggccctccggaccaacggcaagtaccaacgctggaacacgggcgtcagcctccagtgcatcgaccgcttcaacgcgcgcttcagctcgatgatggagtgggaggttcaggtcatccccacgagggtgcagaggccaccgttccaggtgggaggagcagcatggctttgtgggctacagcgccgaggctctggagagatacaagtcggtgttagggtggctgatgatgatgggaacttcaatatcccgggcccgcaaaatctgtcggtccctggaaggagtctgattgaactgggcagtgtcctggaagatcgactcggcagcaactttcgcttccggaacatgtccatctttattcgagcaggcagtcttgggcagcccttccctctgctcactgatcttcccagtgaacttgactacttcgaggtcgtggtgttcatggttggtacaccagggtacaggcggctgcgctttccagatattgatgctgcataggagaaaaggataggaataggaccaggcaacactttcttcccctcccggcctcccctggacagtgtggtcgacgcctccaccattttacagcaacatgatggctttggaagattagaaaagtcccctttggtttttctgaacagtccctggcaatgtatcagtttactgtcactactagcaataagataatcagttaccaaaaaaaaaaaaacagtcctggactgattctttcgcaactcttttggacattaggagacggctttgttcttctgatgtttttggcacttcgctggaagtatgactatgagtatgcttcttgctcataggaatgtgctgaagtcgttagttctctgtt

SEQ ID NO: 9359 - DNA, 2110 bp, Oryza sativa
  ref <308>: DATABASE ACCESSION NUMBER: AK106707
  ref <309>: DATABASE ENTRY DATE: 2002-08-28
accatggcaacctccgccgttgatccggccgcaggtggcggcggcggcggaaaaatggtctgaatcgacccgccgaagaagatcttatagagtggcggtgaaactgttcccatgcgccactgcgtgagtgcaggtacgccacatctcaaatcggattgctccgatgagggtcacctccgggagctatcactattcgagatctgctgccgtggagttggcttgttcaaagcgaagtgtattctgaccgctagtgtagataaggtaattagatggatactctgttcagacctggaagtgtcaaggttctttctcccactgatcatttccatgactactatgccaaagctatagacatctgccttttctgtgatctgcgatgtcagccattctggagctaaatatccaggtgtgcctctcattctggtaatcacttgactcttatctcgatcaataagcttgcatagaccaaaatcagaaagtttagcattgaagttgtcgtctaggaggatattttgtggttttacatctaagtgagcaattctcatcatgcactcctcatgaagataagagagacccttggctacttgagtaataatcttgtatcgtgtccaccaatctagagcaggagcaggagaaccttgctggtgatagagccacctgtccaaggatcctttgggcatatgctcataaaccaaaagcctttgtgatttctctgcacagaagccaatcagcctcactagattgatatggtgaatgctgccgattgtctgaacctctgccataaattctctcattccctgaccactttgatccaagcgtttcaccgctactctttcacctccaatctgtcccaggaaaacagacccaaaccccccttgaccgagcttgtctctgaatcgatcagttgcttcttgtagctgctgaaatgtgaacctcctcggcattccttgaaggggtagctcctcaaactcttgttcctcttcttgcatctcctggtgtcttcgtattcttcgtttgatgataatgatggaagcgatgataatggtgagtactgaagtagagccgatcacagagaccacgatagtggcaacaagccttcctcctcttttggatgaggaatccaagcctgaaggcccaatagcaataggtgcaggaggaggaaccggagatgaagacgtgagatcagttggagggcagaagatgatctggtagtttgtccctgacgggcaagtgaatgtagtgctggagctgtcatccaaactgtagctatatgcgtcagggcacatcctgacgaatggcagtgagaaggtggtgggttcgcaggttttggtgccagtggtgccagtgcagcagtatttgtcttgcttgaacacattgcaggcgctgttgcagcctccaggcgccttgagctcgctggggcactgcgacgtgatgttggccgggcagcgtggccccttgctgcacggtggtgctccgtgcctctgctccggagccggcacggggaggaagtccatgggcacgttgaagccgtcggtgagggagatgtcgaagaaatcctgtacgctggtctggtccaccgtgaactcagcgagcgtctgaggtggcttgccgctgttcttgcacttgagcacgccgccgcagtctcccgtctggcacgatccgttgccattggcatcgaatgagcagcctgtgcgcgcccacacacgccctgcgccgctgttggcgggcacgtcgagcgcccacgactcgcctgggtcgagccgcatgccgccacccaccggcacggcggccggccacacggtgaaggagcatcggttggtgatgttcagcgtggctccggcggcgtagttggtgctggcggcaacgaggagcagcagagtcacaaggtggtgagtgcggcgactagtactgatggtactccccgctgccatttgtgttgtgattcgattgcctgactccgtttgtagagcggaagaaggagacagcagatcgatcagtatgttgtgtaagttcacatggtctgcgtgttgaattgttcaacggtcttcggtcaacgacctagcaattgttttgatttgcctgcaagcatatcatagatcctgtgattact

SEQ ID NO: 9360 - DNA, 2787 bp, Oryza sativa
  ref <308>: DATABASE ACCESSION NUMBER: AK106708
  ref <309>: DATABASE ENTRY DATE: 2002-08-28
gaggcttgcagcaggacgcgggtgcttggcggcggcgcagcagctgggtgcgagagcaagggcgaatggcagcgtggatgcaacgcgtgcaggcgcggcagcccagcgtagcgtcggcgcaccgtggcatcctggtatactactgctattccattcaagtggcggtgcatctttctcctcctccctaccaggtgatgctttcctcttgcggggctggatttggtgttggttctctattccagctgctcccattggttgaatttggtgcacaagtctgaccctttaatctgttctgccccttccgatgtgaatcattggctatcgacagagaatttgttcgaatttggctcttcgagttcccaactataaaggatgatgtttttcttggccagattagtgtttctctcctctcctagccacgagggggggagggagaacagattgtaagcagcaagttgagcagcaaagacaaccgatgcagtggcgtggagttcgagtttgacagttcggtgcccaatccagggttgcagtgctggaacaaggcagagtagttgctttgtctttgtttttctttgtatgttgcaaattcgcatcacatcaaagtacgcatcagtatgatctcaggattctatggatgagagtacacatcaatatgctctctggggatgagccacatgatcttgggatcagattcatctgagcaacacaagatcttggctaattggtgtatatttttgatagcttttttttttttgaagggagatttttgatagcttattaatactgaacatctggatatatgccttataagagcgaggaaacttaagtctatggcttagctaataaagattgtaggtttttagagtaggaacaaggttagcatttctgtcattttattatacacgcgttgttctttttggacgtgagatttagttgtctgtttgtcagtcaatggactaaaataatgtaaactaggcatataacaaccatttaaatttatggatttatggtttgatgcaatttagcacatgctaggtcctcttctcaaattagtaggagtttaggacaaagtataatggtgctaccttactcatattatactggattgtcagaatcagttgggccattcattggctcctcctcccctcctctatgctcactttgtcatgctctgtagcggtggtggcgtcatatcagagatggagcaagaattgttgccgcactgaatgctccataatgcaagaaaaccagtatagagaagccagatacatccgcataaagcaaagacaaacatagcttattttgtcggcttataactatgttagttttgcagtttttggttagagctttgctttttgtgataactctgttcttttgcagagtagatgaatataagcctgtagtctgtgatctatgtgtacacataacctctttttttaaaaaattctcataatatggatccaaatttcataagctataagaattattgataatattcctgaagcttttgttctggcttgctactcatttaatagaagttgtcttccattgcctgagtgctcgactataaagaacctaaatattagttcttatcaacctgtgacattgtagtgattttgtgctagctgatgaatagtggatagtagcaatgtagtttaatttcaggaaggaaaagagtgatgcatagggaaggaaaacctttgttcaaaataaatatatatcattagatctctcaaaaccttgctgttttgtgttctgctattcattcagcattttagctaaaggcctaatttttataaccaaactatgattacgacgttgcaattttccgttagttttattgttgcatgtacattgggtaagcactcgccttacaatgtggggtgcactctcctgcagtggatttgcctcgcctgtgcttgcatgtgcttcattctatgcaggtagaacaagaagatccagcttctacacaggtagtatatgtgtgcctataactttgctgtaatcacctcagtgagtagtctgctgatccatctttttgttcaactgtggcaatggctgcgggtaagccttttagatattgatttgtcaaaataaactgacacaagctttcagagatgtgtgatttcatattttccatgataaaaaataatgttatttccattgcttcaaagatatactatatgttgtgtgttaattccctttgcttcaaagtttcttcagataaagctgcatgaagatgaaaagacattttattcagtactatcggttactttacatttatttatgccatgctttttttattggttcaggaagatgtacacagtacactgatctggtggagaagaacaccacaaccacctcagctaacatgttcctttgttgcacctgaaaagggataattcgcatatatttcatcttaaaaagaaactgagctgaagaaacttatgaatcagataacattttttctaggcctgaatttgtctgcttaattttgcaggcacggcgaagcagcgttggaggtggctgctggctcctatgatgttgcccatgtctcctgctacaagtgcaaccggtgcaactgctaatgttaagagattattgactgtagcaagcaccaacgtgcctatctgggatgaagtgatgaataaataaaagaggccatccagtgtgacggttcaatctctgtatatttggctgttgataattactggtcatcttgccagtgtgccctgtgtaatgttgttcagtgaaatataagataatttgtttatgagtttccctctc

SEQ ID NO: 9361 - DNA, 910 bp, Oryza sativa
  ref <308>: DATABASE ACCESSION NUMBER: AK106709
  ref <309>: DATABASE ENTRY DATE: 2002-08-28
ctccctcctcctctccccttcccatttcgccgatcccacccacggcggcgccgccaccgccaccgccaccgcccaccggactttgtgtagagagctcgatgggaatccgcggcggcggaggagaccggccggctcatggaggggaagatgcagggccacgcgtggaggaggccggctcatgcttcttcttctccgtcgatggggacagcacgtaatggagttggcatgattgaattacaggatgttcctgctcactgaaacaagtaaatgatgacatgaaaggccgaaagcagtgtgtttctacccaggtttgatccaagcttgtgtcggctgaaaattcatcatctcttatcatgtgctagcccgccttgattgattgatgctactggacagtttgggattggtaattttctgggagtgccttatggggaccatctcccatcaattgttacttgcctcctgaattacatttaactgtgctatcttgtttgcaattcaggtaaagtctctgtttaggctgtatcaatcatgcatgtgaactagttaatgcaaaggacctaggaattgatgaaagtattaggcatcagcatcaatggattagcagcagcttctatcatcctgactcaattctgtactcccagggacagcagttgcctgctgatgttgctaggccactagtactatgtagtagtatacattacattggatatctcaatcatttgattaaactgtataatttttcggcgaaagctacctttgaatggtgatgtggttagtttgtagatcatgcactgactaaattaagttttcctctaatgaaaatggtagaaggtttactctgtatgtaatggaacacatgtaatttttgtatgctttaatatgaaaatacccatgcagtttatcagtttgt

SEQ ID NO: 9362 - DNA, 3529 bp, Oryza sativa
  ref <308>: DATABASE ACCESSION NUMBER: AK106710
  ref <309>: DATABASE ENTRY DATE: 2002-08-28
gtaccttggaagctgaaaggcgcaaaaagcttccagaagcgtccccaaaaccgcccacggcgatcgggggcgcgcgcgcagccggcggcggcgaagaggctgcgaggtctggccttcttcccctgctagatcgccggtcgacggagatggagatggaccacgcggcggcggagaaggcgcggtggcgcttctcggacggcggcgtcaccgacctcctgcaagcccgaagtctccacggcaccgctgacattaataagagagtgcaattccattcttctctagtacaaaggcttgctttggagaaggaaatggagggtcacctaggttgtgtcaatgctattgcatggaattcaaagggctcacttctgctatcaggttcagatgacactagaatcggcatctggagttatgctaatcgagagttgttgcatgacattgatacgggtcattcagcaaacatattttgcacaaaatttgtccctgaaacatctgatgaagtaatagtctcaggagcaggagatgcagaggttcgtgtttttaatttgtcccgtttaagtggaaaaaggcctgtagaaatttctatggaaccatcagcagtttaccaatgccactcaaggaggatcaagaaattagctgttgaaattggtaaccctaatatagtctggagtgcaagtgaggatggaactctaagacagcatgattttcgggagtgcagttcctgtcctcgtgcaagatctactaatcaggaatgccgtaatgtgcttctagatctacgatggggagcaaagaaatctttagctgatattcccagacagccattggcactgaagtcttgtgatatcagcactgttcgtccccatcagctccttgttggtggaagtgatgcatttgcacgactgtatgataggagaatgcttccaccattgagcacatgccaaacaaaaaaggaaccacctccatgtattaaaatgttctgtccaatgcaccttgctgatactgtgagttccctgttcttgagtgtattgttattgtcccaactgtgtatggtaaatatggtagcagttgttgctgggtatactccctcgtgtcataaaatgagtagcattttgtaccatcaacgcagtttccaaaacacacatttgacaactagtttctgttatatggttttatgaaacatagtaaaatttaagacaaatcaaggatatcaatttcatacttccaatctacacaagtgaatttgacagctaaattttataaagttcgaccacatgttccccaaaacatttatttttttactggatgcaataccatatatatgcgatttgctgtgctggctatatacattttatatgctgactcaaagttgaccaaattaaatgtaaatcttgaatttaaagtttaaaaattcagggtaggagattgatagaacacatgaagcttttttggctgtttttctttagcatgagaattttcatgtaatagtcagtgttgataattctgttattgcgagcagttttatgatttgttacatgtgctttatggataaccttgtattgcacggtcatggataaattttaaatgtgcttttcaacataaactactacttctggaatatttgtattttttcccagaaaaattggcctataaagcttaaagcattcaagctagagtaggcaattttgttctagtttaagaattttgttatttctgaagcaactcgttccttcaatatcaattgacatttggcctacgttgtaaccagaggaagtcaaatttgcatctaactcatgttgcgttcagcccaaatggtaaggaggttctgttgagctacagtggtgaacatgtatatctatttgatgttgacctagaaaatacgagttctgtgagatacacagcagacaatgtacaggagcaattatgtctacccccttttaacaaagagccagcaaagttaatttcaaaacaacagaagtttcctgtaaacagagcttcaagaaatgtgtgtagggtgagttgtgctctctctctctctctctgcaattcagaccacactgtttgcttgatctgctggacatgttgaaccgctttgcctttaatggcacccgtttcaggtagatacgttcaagaaacttatgcaagttgcaacaaaatctcttgagatgggcactaacttgatgcttggggttgaagcatgctctacaatacttctggcagtggaccataatattgatgataacatgaagcatgattgcttgtgtactcgggcaggattgtatctaaagaggaggtggaaaaatgatgtatacatggctataagggattgcaacagtgcaaggtgtatagattccagatcatttcaggcgcatctgtatatggcagaagcactattacagttaggaaggctgaaagaggcatctgaatatgtggatgcattaaatactattgttccaccttattctcagtcagtgaagcaagtggaaaatataaaggagcagctttttgcagctgaacttgagaagaataaaaaggatcaagtagggaatacctacactgatgcacgacatgggcggttacgctcattaagtgatctactgtttagatcagatgccagtggctcgtcatcacaggagggtcgagaagattcagattatgatgatgaaatggagttggactttgaaacatcagcatcaggtgatgaaagccgtgatagtgatccaggtcttgtccggggtagtttaagtttaagatttcacagaagagatagtcaaactgacgaacattctggtgaaaatggatcagctgagtccactcagaatggtgattctgcctatcagccagaagttgccgttgacatgaagcaaagatatgttgcacactgcaatgtggggacagatataaagcaagctagctttctcggtgaacaaggggagtttattgctagcggaagtgatgatggtagatggttcatatgggagaaacgaactggaaggttgattaaaatgcttgcaggggatggagccgttgtgaactgtatacaatctcatccatatgactgtgctgttgcaacaagtggtatagataacacaataaagttatggacaccggatgcgaacgctacatctatgattgctggacccgaaattgatgtatcaagtgtcatagaaaacaatcagaggaagctctcccggaaccgtgaaattttgctacctttcgaatttttggaacgatttcgaatgcatgagtttggtgaaggaagtttacatcctttggagtgtgcacagagctgatttcctattgcttaagttttgctgagcttacgggaaaaagaaggaaatgcatggaaggtgacttcatccaagagataagctgttcatgttttgataggagtgaaactgcaaggccttgctgcagttttaggcttgcattattgattaatgttggcacacctccttatgcggtgtctaagcaggcgtgttgttgcttgagatgagaataaacagctaaatgctgttgcctgctggttgggtat

SEQ ID NO: 9363 - DNA, 644 bp, Oryza sativa
  ref <308>: DATABASE ACCESSION NUMBER: AK106711
  ref <309>: DATABASE ENTRY DATE: 2002-08-28
tgatgcactgcgacagatcacctgatctcagaacagttggagcgaaactgaaagatatcctgggggtccaaaacacctcccttaaaacaagaaggcttgtggtggatgtctgcgacatcgttgcgaaacgcgccgctcaccttgctgctgcagggatacacgggatcctgaagaagcttgggcgcgacgtccccaacaccgacaagcagaggacggtgatcgccgtcgacggtgggctctacgagcactacaccatcttcgccgagtgcgtggagagcaccctgagggacatgcttggggaggatgtgtcctccaccattgtcatcaagctcgccaaggacgggtcaggcattggcgctgctctccttgctgcggctcattctcaataccgtgaggctgaggagctctagtggatctcttctcttggcagctgttatgctttagttgtttggattttcctgagattctgaacccccaggagcaattgcattctatagagttgcaccagcaccgtgctggtgtttagaactttagatggaggcaccaacctttagtagcttgcaagtcctgtaaactgtataaacgcagaacacagtattgtccttccaacaaatttccggctaaatttatccggagcaacagag

SEQ ID NO: 9364 - DNA, 1779 bp, Oryza sativa
  ref <308>: DATABASE ACCESSION NUMBER: AK106712
  ref <309>: DATABASE ENTRY DATE: 2002-08-28
tataagctaggttttaaagtttgaagaattggaagtttcaactgattctctcttgaagggacccggacacctgcagtgttgcagctattaatccccatcactagtaaaattgctattaactatcgatgacattgagattggcagctttgtggtagaggatatattttgcatagctccgtcacggcagcgatcaccacttcctcgagacctggcactagtgggaccgcaggtgccaagaaggcaccttgatctaaattggccaaggccaagggaacatggacgctgagagcctgagaaggcttcttctgccgagaagggcctccatcagcgaccgcataaagtcatctcttctgttcaagagagagaatcgaacaggctgtgtttagtttctgaaattaaggagaagtttgaagaaagttggtagtttaaaaaaaagttaggagtttatgtgtgtaggaaagttttggatatgatgtgatgtgatggaaagttgggagttggggggaaatttggtgtgaactaaacagggcccaagatgactccatctctatcggagcaaagctcggaacagctagatgaagccagctctcatccgatctctaccattgtgactcctctccctgtactgccgctagcaccgagcgcctctcgaaccaagtcacccagattggtccttgaccatcttgccaaggcctaccgagtactggagaccactgcccaggaagccccctttgaactcaatcatctttacgtggagatgggttcggcaggggacaaggtaaaaaagatggagtatggcgagatccgacaacaacaaactttgtgaactagtacgggacaacaaggccatccgcaagaagggcgaagatgtgctgatgaaagagaaggagcccttggtatccctctaagaaggcttggacgataacttctcacactttaacgagatcgccaaaggataaggtcgtggggtcgagcctcccaagttcccgatgagacgttagttttggtgtctctcagggagctcgcgagatcactctaagggatctccgcagacatctccaactaggctttataaggcgaacggaacgacctaaggactagcacctgccacgtccttgtctgtctcaagctcactcaacatcaaggagatgctaacgaagggtgggctgacgataggcgggaggatgtcatggctgagctggagaatgccgaggactcaatcattagtatttatggcgagtaaacaacctagatgtgttttatgaacaattttttttatgtgacgtcggaagcgtcgagcggagcagcgacgtagcaggtcgtggtcatcgtcctcctcgcctcgagaggtggccctggtggtggatctctgcgtcgccggccagcgccccgctagcggatcttgagcaatggccccggtggtgactccatcaactctatgaactccctcggtcggcacttcaaaccggcaggggcggcgacggcggtccggatcgctgtctttccgagtggtggcggcggtggctgatctgcttgtggcggccctcggcggcgacgacccctacggttcagtggtatcaccgatttctcctcattgagcgagccttgtgccaacctttagcaaagaaagcactcgtttatctagtgagaagtaaagaatcaaccagagctatgggccccacctactttcttctccatgtgggcgaatccactgtgaaaggctaaacagagtttatgaagaattttttttgaaataatatgattttaatggaaaatcgc

SEQ ID NO: 9365 - DNA, 1627 bp, Oryza sativa
  ref <308>: DATABASE ACCESSION NUMBER: AK106713
  ref <309>: DATABASE ENTRY DATE: 2002-08-28
gaggaagagagagagagagagagttgttttactatttaaaaattgtgggtggcgagagagagagagagaggcggaggcggcgacaatctccggcgaaatcgtcggcggaggcggtggagatgtcgctgcggcggcagtgtgggagggggaaggtgcggttgtttcgtcccgtcgcgccgacggcggaatcggcggtggaggcagcggaatctgcgtggaggcggcgttttttctctccacatcgtgcttgcagttgcggggggaagtgaaggctgcggcttaggtggttttctctccaccaaatctggcgcccgtgcggtgttagttcgtcctctccgtggagctcctctgcgtcctctcggcgagtgcaaagtttgtggtggtggatctccggcttgatttgaagagatcgaggtacattcagagaatagaggctgcaggtagcaggggggagagcatgcatgtcagcatgtatatgcatgcatgctactgatcagtggtgacaggcagatgagtgctgaccgatcgattgatcccttgattggctaatctatgtcgtcttggattggctaatccaatgtgattttcagttaccatgttgctaataatctgaagctctccctagtcattgatgttattacctttttttttttgcaaatattgtggcatgtctagtaacattttcctctagtagcaaataatggtcgtctcaaaatgttccttaagtaacacatttgatttattgaattacatctagtctagttaaaacttactttttcccgtggcatgtgagtaacattttgagaacaatgaaattaagtttgcaatttttttgtacttcctactagttgttaagttacttccaaaatgtactgacttacttctaaacacataaatgttactttctactagttgtttagttgtaattggttagattttggtgaaactaatagtcaaaatgattttccaggaatagctaggaagaaatcccatgtaacgaaaggcgcgttggacaaactagagtcaagtcagaaaaaaaggagtgtatcgcaacgcaggaagaagagagatcatggtggagatgatgcaacgcaacctcctccaaaaaggagtagaacaaagtactagaagagaaagagaggcaactaggaggaatgcatcatgttgtgtacacataccagcagcacttgaaaagaaatttattcgatatacgaaggaagtcagaaagggagacagattcatagtattcgtatctcggggaagacaggattcatagaattcatttctcacagaagacaaaaagaacctaaaaattctctagccacagctacgttcgggatcgacgctggtccggatttgttagattggagggggggtgaggcgcgtagcgcgcttcctttaggtgggcccacgctagctgtcccacgccaagcacggtgtgcgtggcacgacgcgcgcgcggctttcctttttttgtcagaggcgcgcgcgctaaaaaggaaaccgtgttttccttttttttgtcaggagcgtcgcgcgttagcgctatcgcgatagcgatctcgttgtagtctcgtccatatatgacatttcttaacttagaaaacagttcactttagatccctct

SEQ ID NO: 9366 - DNA, 917 bp, Oryza sativa
  ref <308>: DATABASE ACCESSION NUMBER: AK106714
  ref <309>: DATABASE ENTRY DATE: 2002-08-28
aatcataatcatcatcgcctactccctctctctctctaaaacctcgctgtctttctctatctagcgggtcgcggtgagtcgtcgtcgtcgtcgccggcgatggggaagggaggcgggctgagcaagctgaggtgcatgatcaggaggtggcactcgtcgagccgcatcgcgcgggcgccgccgtcggcgggggagctggaggagggctctgcggcggcggcggggagggcggcgtcgttccacggcgcggacgaggtgcccaaggggctccacccggtgtacgtcggcaagtcgcggcggcggtacctcatcgccgaggagctcgtcggccacccgctgttccagaacctcgtcgaccgcaccggcggcggcggcggcggcggcgccgcgaccgtcgtcggctgcgaggtcgtgctgttcgagcacctgctctggatgctggagaacgccgacccgcagccggagtccctcgacgagctcgtcgagtactacgcctgctgagaaaggccgccgcgccgcgccgcgcggcttacctccccccaccaccaccggccgtgacggcggcggcgacgcgccggagttggaagcttccagaagctgcggtaaaatctttcgaaaaaaaaaaaatctgtgttttggtaggggtagaagtgaaatttcggacgccggggtcgaagtgaagagtacgaagcggcagctagcgttttttttttacttaaccccggcgtcggtgctaattggggaatttaccatttgttactgtgctgttaattctctgatcgttcatgtattagctattgggtttctcattatttctttattttgccccaaaataagatctatgggcaaacatgcccatcggtccaatgtacattccagtgtaaaaaattatcatgtaattgccgagttaatttgtc

SEQ ID NO: 9367 - DNA, 2202 bp, Oryza sativa
  ref <308>: DATABASE ACCESSION NUMBER: AK106715
  ref <309>: DATABASE ENTRY DATE: 2002-08-28
catcttgtcaattgcagggagtggcgaattcttggatctcttgaaatgcttccagtgcttagggaattgaaattggttaagatgtggaatctagtggaactctcaattccctctttggagaagttgattttaattgagttgccgaaattggagaagtgctttggtacttatgggacagaattgacttcccgtctcagagtattgaagatcaaggactgccctcaattgaatgagttcactcctttccagagcttctcttctttcagaaccgagcagaagtcatggtttccatctctaaacaaactcaccattgggtgttgtcctcatataagcaaatgggaaatacttcctctgagagagatgcaatcactgaaggagttggagttagtacacctgcatgcagtcaaagagttgttagtccttccactggagaagttggttttgattaagatggcaagcctggaatattgcagtgggctaacttctccatccctgcaaatttccacttccttaggagatcgaaatgagtcgctatctggtcttcatgatctcacaattcatgattgtcctcgtttggtagtttcacatcctctcccgttttctgctcagatgcggcgcttctccatcagcgggattccaactcttccaacaatggagttaacatatgatttgaaaatcaaatctgaagagttggttatgcttgatgacaagatcatatcattccataactttgcgcgcataagatcattctgtctagtggattgcccaaatttagtctctctatctactgaaggtctcaatcagtgcacagttttagagaaattgcatataaagaactgccctaatttgatcattccaagcagctttgtcgtcccatctctccaatttatctccattcaggcatgtggcatatcagggcattgtttaacagaaatgctttctcatgtgcagtccctccatagtttggaattacacgagatcccacaactaaaatttgtttcgttcagtcatcaagctgcggagaaggaaggcatgagcagtttggaagctacagcagcaaggcccttagccagagatgataaacagctgttggaaattccatctaatatcatccattctctaaggtggctagacatctccaactgcccaactggagtttgttgcaggggagagagtactcctaggatacacctctcttgagcgtcttcgaattcagcgttgccccaagctgatgccgttgttggtcatgagtgataaggtggatgttgcattactcccaccatctcttgagaacctggagattgatatgagtcctgagctctctgctgcgtgggatctcaaactgcaggagcatggacagattatcccactgcagcctcatccgtcactcgaagaactcgatatctctaacctcacagacaaggaccagtcccgtttgctgcaattgttcccaaccatcacagcactgtacatttggcagagtccagagctgacatctctccagctgggatactccaaggcactgcgggagctgaagattatagactgcggctcacttgcttcgatcgagggattcggctccttaacaaaccttaggtccctggcggtatccaactcacctggagtacctgcattcttggagcttctgtcacatcagcaactggcctctgcggagatcttgtcccgactggaaaccctccaggtcggcgatggctccgtcctcaccgtgcctctctgcagacggctcgcgtctctgcgacggctatccttctggtcatgggatagcaggcgtggcgagacgatgatcgacctgacggaggaacaggagagggctctccagctcctggcctccctccatcgcctcgatttctggcacctgccgaatctccgttcgcttcctgcaggcctacgacggctggcctccctcgagtggttagacgtcgaagactgccccggcgtcgcgaggctcccggagatgggccttccaccgtcgctgacacggctgcatgtacgccgttgcagcgaggagctaagtatgcaatgtaaaatggcagcaagggagaatctagatgtccatattgatgatctacctgttgactatgtcataatttgaggaaattagggaatttggggattgaactatatctattgagttagcccaaaggtcatatattgagtaaaatagagatgggaattgccaat

SEQ ID NO: 9368 - DNA, 1369 bp, Oryza sativa
  ref <308>: DATABASE ACCESSION NUMBER: AK106716
  ref <309>: DATABASE ENTRY DATE: 2002-08-28
atcggcgcgaccgcgcatcctctcccgcatctccctctcttccgcattcgccgcgactcccccgcacctccctcccataccgcatccgcgcctctctctcccctcccgctccgtcgtcaagtgcgccgccgccgccaccgaggccttcaatcctccatcgtcaagggcgccggctcgccacgctctccatcgccccgacacaggacgccctcatctctcccctgccgtcgcgccgtcgccgattcacctccgccaggtcgccgcctatccccagcagccgccagtccacgctcgccctcgccgttgcacagatcgacaccgccgccgacccgatgctcgccctcgcgcattcatcgccaccctatctggcccctctgcccatcgcgccaactcgccctagcgccgtctcgccgcctcgcgccatctctgccggtcgccggtgcaccgcatcaagtggtcgccgatcccatcgccgaccgctctccatcgggacttcatcaaatcgccgccgtgccgcctgacaactatccccgccagtctctgtagcgcgctcggtctccatcacgtcaactcgccttcacaccaacaccgatcctctccgggccctgacgtccggtgtctagagctctacgaagctaggaggggagcaaaggaggtgctgggactgatggaaggggagctgttcaggtgcttgctcggtcatctggtgaagatcaagataccatccatgtgctggataggtctcagataggtgggcatcaagttcagctttcatggagcctactcctcatcagaacaagcaggttcatgtacagagttaattgcttggccgttgatgcatgaagtagggtcaattgagctgaggtagaaagtgataatagaaaagtgtgccaatcaaagagctgttgtgggttcccagtgacaaaaaagatgagtctttagaaggacttctagagcaaagtgttacagcaaggtttgttgaaaatttaggagttggcacaagaatggaagaagacggaacatatctactatagtatatgcgagattatgcaatgcaatacaagaaggggagaagatgggaactctgaattatcgaagtcaccaacaataacttttgatgaagtagtacaacaaggttttaggcatatgctgcactttcttttctgctccaatgcgatggtgacggaagaatcatagttgtaagcaaaaaatttagtggacaatatgaatatgcacatctgaaatttgtgtttcttttttgtatagatagtctttttgaaggagctataaccttgctctgcatcttactctgccactgagaccgctaaccatcttgtttggagataacacttaatgtatactatgattt

SEQ ID NO: 9369 - DNA, 2114 bp, Oryza sativa
  ref <308>: DATABASE ACCESSION NUMBER: AK106717
  ref <309>: DATABASE ENTRY DATE: 2002-08-28
tgcaaacaagtttaggttatgctcgtttgagaaatggagaggtagacattgttgtgaagcttcagtaagctgttcttaatgttgattgggtcaatggctcctccagtttatccaattccatctttgcagttactactaatcttgtaactgagtatattgcaatacacaattggctacgactgacgatttatgttgttgtatggtccatcagattcagatttcaatagttcagatgcaatttgcattcagactggtttattggcgtaaaataacaagctgtgcaagttcataattccatattcgcaagaggaggggttccaactgggcctactgtcatcccttgcaagacaaactgggcccgctgtcatagacacgacccacctcctacctcccgcctctacataaaccctccgcctccgtcgacgccgcgaaaacctagatccccatctcgcgccgccacctctccccctcctccatccgcgaggcgaaaccctagccgaggacctcctccccttccgcgccagccatggcggccgccgacgtggcgtacgcgccgccgatgaagtccggcaagatcggcttcgagagctcgcaggaggtgcagcacaggatccgcatcaccctctcctccaagagcgtcaagaacctcgagaaagtctgcggtgatctggtgaagggagccaaggacaagagcttgaaggtgaagggccccgtgcggatgcccaccaaggtgctccacatcaccaccaggaagtctccttgtggagaaggtaccaacacctgggatcggtttgagatgcgggtgcacaaaagggtgattgatcttgtcagctctgcagatgttgtcaagcagatcacctcaatcaccattgagccaggtgtggaggttgaagtgaccatcagcgaccagtaaaatgctgctatccaacagtattacaggcacacaaaaactcatctcgtgaagaaaagaagaaacgagttccctcaacagtcaacacatggatgatggacagacagacaacagaacctagacctcactcttttaaaagctcagttcagttcctgacgaaagtgcttagaacgtcgaagtagttggggaaggtcttgcgggtgcaaccagggtccctgatcgtcacgggcacgtcggcgcaggcagcgagggagaaggccatggccatcctgtgatcatcgtaggtgtcgattgccgtgatgttcagcttctccggtggggtgatgatgcagtagtcaggaccttcttcaactgatgctcccagctggcacaacaccaaaaaagaagatgatgaatttaaacatcattgaaggagaattcaacttatgaacaaactacttgaagaatgaaaggacacgggacctaatgaatttacctttgttagctcggtccgaattgcaaccatcctttcggtttcctttactctccaggaagccactgtggaagacaatggataagtatgatgaacaaacatgcaatttagctgaaaccgttcagaaaattgccagcagcaaacttcatagctgaaactacagtagtactgtttaccacacaaaacgaacctttcttatatttctaagttattttgaagaaagtttggttatttgttttgtcacaatgctaagcagtaattgctagtatgatagaacaggtataataggccttaatgtttaccatctctgatagcagttggaccatcagcgaagagtgcaacaacggcaagggtcatggcaacatcaggcattttgttcatgttgacatcaacagctttcaggtgtttcttcccataaggctcacgtggtggaccagttacggttacactggtgtctgtccatgtaacctttgctcccatcatctcaagtacctcagcaaatttgacatcaccctgtaatattaacatgtaggtcagggaacataacagcacagcaagccacaagagaactgtttagtttgaagattaagctagggtatatagcactctctaggtcaagcgtatttgattaacagtggcataatacagattgtgctatattctgaatatgtgactactgactaaacttgactaaacggtagaatgtcaaaacaggcactacagttatacctg

SEQ ID NO: 9370 - DNA, 1841 bp, Oryza sativa
  ref <308>: DATABASE ACCESSION NUMBER: AK106718
  ref <309>: DATABASE ENTRY DATE: 2002-08-28
gagcggctcgatccccaccaccaccagcagcggcagcctcggccggcgcggcgcggcgaggtggggaagcgaggaagagtgggagggctctcgccatggcgtcgaagcagatggaggagatccagcggaagctggcggtgctggcctacccgcgggccaacgcccccgcccagtccctcctcttcgccggcgtcgagcgctaccgcctcctcgagtggctcttcttccggctcctaggcgacagatcgccgttcacgcagcagaactggcagggggatagcctcgaccgcgacgaggagaacagcaggatccaacacctggccgagattgcgaatttccttggtataacgccttcggttgacacggaggcaattcagggtagaggtagctacgatgagcgtgtagagcttctctgtctcattgttgatctagttgaagctagctgctatgctgacaatccagagtggagtgttgatgagcagctggcaaaagatgtgctgctcgtagattcaattgcagagaaacaagcccaaatattttctgaagagtgcaaactatttcctgcagatgttcagatacaatcaatttaccccttgcctgatataacagaactggagttgaagctctccgagtatactaaaaagatgtcaaatttgcaactgatggttcaggagttagcatctaagtatgactataatccgaatgaagactatgccgagacagagttaaaactgagggaacatttgcaatcgttcctagaaacagtaaaatccttcaatatgatctacactaaggaaattcatccttggacacatatgatggaggtccctcaattgcatggttttggtccagctgctaatcgcttgttggaggcatataacacacttttgaagttccttagtaatttgaggagcctacgggattcgtatgcagcaatggctgcaggatcgctttcagcatctaatgagccttcatctgtcaccaaaattatctccgactgtgaatctgcacttacattcttaaataacagcctttccatcctttcaacttctgtggcacgggagcagggtgagactctgaattcacagtagcctgatatcaggatacttgaataaccttgtagcaagtcgatcatttgctttttgtggcttgtagtattgccgttgtgccaattgtcgttgtgttcttgtgtctgtagttcgtaactgcatagatgaaaactttaacattagcttatattgaaatatcatgccgagagctctctttcaaggctgtgtacggctgcacgttgcagcggctgcaacgctgtacaaaataatgtgcgaggcggccgcagccgcagtagtgcagccgtaacaggccccaagtttgtgcagtacttgtatgttttttcttttttctttttttccccctttgattctttagacagtagtaaatttcgctaagcaaatgtaccttttttccccctgaaaacggttctaaatttgacacatcaatgatgaattgaatcaagtcacagcctgcacgttgagcctcttcccggcgcttcgttttccggatgctgctgcctgtacagatcttcaaaacttgacaccatggttctgaatcttctgataaacgaagggaaaagcctgcatttctacagagccacagcgatgcacgcacttgtgtctgtgtacgtataatcaggcttgacatatttgctttcaagagttcaagaccaagcatttcccagtccgatcgcagccacacgacgtttcagttttggacgtcacaacgccgccggcgtacgattgtacgagctgagggcgatggactacccaccacctactccctctgtc

SEQ ID NO: 9371 - DNA, 1680 bp, Oryza sativa
  ref <308>: DATABASE ACCESSION NUMBER: AK106719
  ref <309>: DATABASE ENTRY DATE: 2002-08-28
aaaaacaccgagccaggctaggacaggttgagacttcatcagcttaattgttcatgcaatgccaggttcactaggcagaagcagaggattctgcaggttagcataaaagggacgtgtaacagagagagacacgacacaggccatgtcataatcagggtaggtccggcattaaacgaaagattagggcactgtttatctttgcactcaatgaatgagaacagggcaagaaaaaaaagttgggagctgatttcgtttgcactgaatgtgatcgggggaccaacacagttgccgacagcaaccgtcggagaggtccatgaggtcggcgacctgctccgccgccgcctcgtcgaacagccacttctcgatcgatgacagcggcggcgctgcctggttcatcagctgctgcttgctctcgtcgccgtagccgccgccatagccgccgtactccatgaacgacgccggctgctgctgctggtgctgctgatgaacgtcgaagcagcagtccaggtcggcgccggacatgcagtcgaaggacgacagcaaggggttgccgccgacatcgacggcgggcttgacgtcgtcgtaatagccgctgtcatagtgctgcagcggtggcggcggcggcgacggggagttggtcttcatgaagccgtcgagcagcttggagatgttgtccatgctggaggcgtatgaggaggatgggcagtcggcgaagggggagcgcctagcaatggctgccatctgggtgacatcggagttgctgctcaccgtgtagctaccgccggcggcggaggggaaggtggcgtcggcgaagatggggtggcggttggaggatgaagtggagttggcggcggcggcgagcttcttcttgaggtgggtgttccagtagttcttgatgtcgttgtcggtgcgctgggggaggtaggaggcgatggcggcccagcggttgccgagaagcgactggaggtggacgatgatcccctcctcgtgcgccgtgaagttgccgcgctttatccccggccgcaggtagttcgtccaccgcagcctgcagctcttgctgcacctcatcagccctgcatccatccatccacccacagcttcagcttcttctcagttcatcatcgatcaccatggctacttggctagctatagttcatctacaaaagaaagtaagaaactacacagaattggggaattaggacgtaccagtgttgatgggaaccgatctccagttgccggggccgtgttcttggatgtaggagacgaggatgatgtcctcctcgggcgtccatggccccttcttgatcccctccttgtcgcagcacggcggccggcccatggctacaattcctcactcactaattaactctgatccttcccggatcgatcgatcgagctaactactctttctggaagctgcagctagctgatcgatcgatcggtcgtctctctctgtgctacctgagcttccgacagtgtgcttgagtgtagagatatatatagctaggagactggggactttgggagtgagtgagctccttttcacttgctatctctgatgtaagccactttctgatcgatcgatgtgatgatttactttcactttctagcaagtcagttgatctggttatcgatcgatcgatcgatctgtctgtatgtaggatgctttctctttctgtc

SEQ ID NO: 9372 - DNA, 1644 bp, Oryza sativa
  ref <308>: DATABASE ACCESSION NUMBER: AK106720
  ref <309>: DATABASE ENTRY DATE: 2002-08-28
ggctgcccacctccacctcctctcgccgccgccgccgccgcccgacttccccgctcgacgccgtacgctgctgggccccacccaccgtcgaccccccctcggtgcgcgagcgctccggtcggcctgcgcccgccaacggcgtccgtggactgctgcacccgccgccgcctcccccgctgcttacgcgggcgcctcgccgcggagggtgaatgagtgttgaataagtcactagtgtttatggacttcaaaccagcaggagattgttctttcagtgctcacgctagtcctgccttatttcatagtggattggcagatcataacataccaaagaaatgctgatggaccctcctgttatgcaagtagattgccaattacagaatgatttggagaaaacaacacctattacctacaatatgacacatgccttgtcacatgatgatcatgggtggcaaggttctgatgctcatcctgcaagtgagacagttagctgcaagcctgttgaagttaacaattgttctcgaacaagcatatatgagaacctggatggttcttctgaaaagtctcatgctaacttgtcagatttacctcagaagatgcatgccgagcccccaaaagagatgaatggttctgatgcatacttcaatgatgttagatttcaattgagtctaagcactgaaaatgatgcccctcaaagcacgtctgttgacgtcaatcaacagagtgttagtaatcaggatgcacctcattctcgggaagagacgcatccacctgccaatatagtgactgtacttaggccatgccagtccaatggagatgctcagccttctcaagacaaggacattactgaagaacaagtcaaagggaacaaggaagttggatctgatatggtaagtaataaagctggaactgatacattagaatgtcatgcagtccagaaagaattgcagtgcacacttcaagatctgtcagaaatagcttgcagcattgatccagtacgtaaaatatcttctccacaggaagagaatgagacatctgtctcacctaagaacaacatggatcagcttgttcttaacaacagttgtaatggcaatactcattatagaagtggtcatcccaatacaggaaatgttggtgcagaagatcagactgttgcactttgggtaaagtggagaggaaaatggcaaactggaattcaatgctttagagtggactgtcctttatctactctaaaggcaaaaccaacacatggcaggaagagctatatcattgttttcttcccccgtacaagaacttattcttgggtagacatgctacttgtccgtccaattgaggaatatcctctgccactggttaatggaactcatcgcaaatggcgaaagctagtgaaggatctgagtattcctcgacgattcatcatgcagaaacttgctatttccatgctaaattttagtgacgagcttcatacagaggctgtagttgagaatgctcggatggccacaacttggaaggagtttgctcgggaagcatcttgctgtagagattatactgatcttgggaagatgcttgtcaaacttcaaaatgtaaatctaagcactctattccttaaagatatatcatggaacctcctttcaattttcttgtagc

SEQ ID NO: 9373 - DNA, 1215 bp, Oryza sativa
  ref <308>: DATABASE ACCESSION NUMBER: AK106721
  ref <309>: DATABASE ENTRY DATE: 2002-08-28
ttggagctgagcagaggcagcaatggggggagaggtggtgcgtcactggaacgctgacgtgaacggcatctccctccacgtcgccgagcagggccccgccgacggcccgccggtgctcctcatccatggcttcccggagctctggctgtcgtggcgccaccagatggccgccctcgccgcccgcggcttccgcgccctcgcccccgacctccgcggctacggcgactccaccgtccccgacgaccccgccgcctacaccgtcttccacatcgtcggagacctcgtcgccctcctcgatcacctcgccctccccaaggtgatggtggtggggcacgacttgggagctcaggtggcgtggcatctctgcctcttccgcccggacatgctgctcgccgtcgtcaacctcggcgtccccttcttcccccgggggcctagctcgctctcggaggcattcgcagggcgcgatggcctctacatcatgcagttccaggaaccagggagagctgaaagagcatttgcccgttatgatgttgcaactgtcctgaaaaagttcttctccattgaaatcgatgacctcaccgcaccccctggagtggagatcatagactttcttgaggcacgttcgacaccgcttccatggatctccgaggaagaacttggccagtacgcggaaaagtttcagaagtctgggttcacaggacccatcaactactaccgcatgatggacacgaattggaggcctactgcaccctggcaaaacgcgaaaattatggtgcctacaaagttcatttgtggtgacaaggacactggtctcaagtcctttggaactgagcactttgtcaagagcggtgctttcaagtccgtcgttccaaatcttgaggttgtcatcattgaaggtcaccatttcatccagcaagagcaggccgagagagtgaattcggagatattgtcctacttcgataagttcactggtgagaaggcatgaacactctgttcacccaaaccatgcaccagaagataaattatatgatatactgtaggatgctttgagatttctaggagctcttctctctttgtttttttcctgaactgaaaatggtggagctcaaaataccctgccctgtacttgaataaatgttagagctagccatttgctgccttggataaataatgtataggttgttgttaagtcctataatatattttacaattcat

SEQ ID NO: 9374 - DNA, 1987 bp, Oryza sativa
  ref <308>: DATABASE ACCESSION NUMBER: AK106722
  ref <309>: DATABASE ENTRY DATE: 2002-08-28
aaaaccccgcaccaccgcgtctcaaaaaaaaaaaaaacgcaccaccggcgcggtcggcctcgccgatagagaggccgcgcgcggagggcgaaatgtggaagaagatcgcggccggcgcggcggagggggagacatggaaggcgctcgcggccggcgcggcggaggggtggcgcggtctgctgccgaagacggcgtccgccaccaccaagctcgtgcccgattcttctccaaagtcggcgacgccgaccgcggcgctcaacctcgtcgccgacgcggtggcggcgtggcgccgctggcttcgctctccatcagcgagtcccaccgcgaggtgtgtataccctcctcatcagctgccgtggagggcaccgccggagaaacaagcccccccgtctccgacgcagcgttggaggtgtggcgtcgttggctacgcgcgtcgacgcggcgctcgctctcctcgttcatggatcaagcttcgtcggagactcacgcgcccccaccaactccacggccgtctccaccacgtgttctcccgcctcctccattgtctgctgcacggagggcgaaggggtgtcgcactgctgctttgtcggcatctctgtcacgcaactactcgacgtcgtcgacgaactcgcagtcccctccggagccccgcgacagctgcagagacgacagatcattggacatatggtatactgctaaagaatttgtcaagaagtatccagttgtactctttgctcagcctacagatacacactctcagttccacaggtgggtataccaggagtggttcaaacccacggtaagaagcttgcttaagtgtgtcagtgatcaccatgcttccaatttggagtttcaggagattactacggagaatgtcaagatattttgcaatgctgatgctcctcaatttattccccgaatcaaaatctactgtgagaccagaaaagcgacttatgaagggagaaagcagaattttgtgcagacaggggaactgataacagagttgataaaatcttctgtggacaatccaactgaggttttggacctgctctctgaggacatgaaagataagctcagtatgttgaaaaatcctgacctgtctcatgatgctgatccacggcagtgtggagtttatatccttgtgaatcatccgtccatgctacgaagggagatgcaatctccgttttaccttgcctgttatgatttgctaatgagtgtggataaaagaattgcaaacagggcattcaggaaactgccttataagaactggcagtcaagagccctgcaacaccccctgctcaaagatcatctcatcaatagacggtctagctatggcagagacaagtatcaccaagcaagatatcatcggaatgtggcaagtcacaaaacatcatggaaatccaagtacaaagctgaagaggtcgacgagattatccaccaccgctttccgatgattttaacacgtctgatgaaggtcctgtcaaagatgaagttgctgatacgccttaccctccacaacttctttggataaagaatgctgtagtgaatctactgcagtagcaaagctcaacttcttcatgtaggaaaggccatagtgatgcaactttttaacaaagctgaatctgcagataccccatgacttcttcggctaaggaaggccactgtcaagctattgctgtaacaaatctgaatctcttataccagaactggtgttgtctgccgcaccctcacaacttcttggagtggggccgaaacaaatgcaaaagcacttcatgcttattacgagtaggttttgtctcattaactttttgttctttaggccccagttatatccaattgtctgaatccctatgcaggttaatttcctgggttcatgtaacaatgcaaacccatgattttgcttcatatcaacatagctaaacatgatatttttctgtcgacatttcttctgatatgccagaaatatatatttttcttttgacttgat

SEQ ID NO: 9375 - DNA, 816 bp, Oryza sativa
  ref <308>: DATABASE ACCESSION NUMBER: AK106723
  ref <309>: DATABASE ENTRY DATE: 2002-08-28
acactcccctcgtttcgtcgtgcacgagccggagcaggagacgaagggtttcagccatggttagcctccgcctccccctcatactcctctccctcctggccatctccttctcatgcagcgccgcgccgccgccggtgtacgacacggagggccacgagctgagcgccgacgggagctactacgtcctcccggctagccccggccacggagggggcctcacgatggcgccccgcgtgctcccctgcccgctcctcgtggcgcaggagacggacgagcgccgcaaggggttccccgtgcgcttcaccccgtggggcggcgccgcggcgccggaggacaggaccatccgcgtctcgaccgacgtccgcatccgcttcaacgccgcgacgatctgcgtgcagtccaccgagtggcatgtcggcgacgagccgctcacgggggcgcggcgcgtggtgacggggccgttgatcgggccgagcccgagcgggcgggagaacgcgttccgcgtggagaagtacggcggtgggtacaagctggtgtcgtgcagggactcgtgccaggacctgggcgtgtcaagggacggcgcgcgggcgtggctgggcgcgagccagccgcctcacgtcgtggtcttcaagaaggccaggccaagcccaccagagtaaacgaggggaggggagggggggggggtcactcatgcgttgcgtggtgcggtggtgcctctgtagcgtgtataggtagtagggtgcgtgcgtgcgtgcgcatgtgctggttgaataatgtgtgaagaggctagcaggtattgctccgtggttctgttct

SEQ ID NO: 9376 - DNA, 1673 bp, Oryza sativa
  ref <308>: DATABASE ACCESSION NUMBER: AK106724
  ref <309>: DATABASE ENTRY DATE: 2002-08-28
aacgcgcgcgagagacggacagacaccagctgctgcaaccgcgcggagcatagcgagagctttagccgagtcgacgccgccgacgatccgcttccactccacctgccaccaccgcccgtcgaccgcgccccgcaagagacctcttcgccgtcgcctcgcgcccacgacgtgcgcgcgccgcgcggtccggtcatcgccgccgcctcttcaccgatcgatacggcggcagccgcgatcgattcccgcgcgagcgcgtactacaacgtggtacgttacgtcccgtccgcgctcctccccgcgtgtgctccgcgcggcaaaacgccgggacgcccgcttcgcccaaccaccacccgcaaaatccccaagcatcggagagttttgacggacactggactggatccgaccaaacaacgggagcaaccaatccaatccagcaagtaataatccgtactagtttggtaggagtacttgagtactgacatgacgccacagattcacagctgcattcattgtccacggtgtcaatcaacccccaaatccttcacaactccaccggtaatggtaaagaagcagcacagctactggccgaggctgactctactgttccatcatttttcctactctctccgtcatcaaaaagaaaaaaaaaaaggacaaaccctgatttccgtgtccaacatttgaccgtccgtcttatttgaaaaaattataaaaaaaattaaaaagacaagtcacgcataaaatattaatcatgttttatcatctaacaacaatgaaaatgcgaattataaaaaaattttatataagaaggacagataaagttggacacgaaaaatcagattttactttttttttttttttgacggagtgagtactgcagagccagcgaaatgacaccactgccaccactaccaacacgagttgcacgaaacgagagcaaactcgctggggcccacccgtgcccaacctgggccccaccatcagtgacctgacatgaggctgacccgcccccatcgcttccagatggcgccaactccgaaagaacaaacaaccatagctgggccaccactgatcagagctgaccaccttttggccccacatcacgggggaagggccccaccctccagcataacgtacgcatcggatcctccaacggtgggggcccaccggcatggggcggtgtccccaccctgcagggacagattccagtgagatgagatcgacaaccgtggcctcactctgccggcgatgtccgagcgcactgaccactgttccttcccgccggcgagcggtcgcgagtcagctcagctcagtctcagtcgctgagagctgagcagagctgacccaaagagggcggcagcaatttcacctgtgctccggtcactgtagcattggccttttggcaccaggcagcagtgacttgcagtaggagtagctgggtaccattggtccggttgtggtgttgtcattgctggcctctggtttgagacaggatattcatgacaggggctaaagcgtactacggccccgtgatgtgtgttactcctactcctactactagtactagttggagtagcttctccttcaatactgtcaatgcatgacgagtacagtacggcatgtactattcatattaaaaatttatgaaaaagtttaaaaaaatagtcacacat

SEQ ID NO: 9377 - DNA, 2258 bp, Oryza sativa
  ref <308>: DATABASE ACCESSION NUMBER: AK106725
  ref <309>: DATABASE ENTRY DATE: 2002-08-28
tatttgcttatggacagacgggcactggtaaaacatttacaatggaaggaattgaagatgctcgaggggttaactacagaactctagaggaactctttcgaattaccaaagaaagacaaggcctttttcagtatgagattactgtcagcgttttggaagtgtacaatgaacaaattcatgatttgctgctgacagggactcagcctggtgcaacagccaaaaggctagaagtaaggcaagttgcagaaggagttcatcatgtgccaggacttgttgaagcacgtgttactaatatgaatgaggcctgggaggtcctgcaaactggaagcaaagctagggttgtcggttcaacgaatgctaatgagcatagcagccgatcacactgtatgcattgtgtaatggtcaaaggagaaaacttgatgaatggggaacaaacaaaaagtaaattgtggttaattgaccttgccgggagtgagcgagtggcaaagacagatgctcaaggagaacggctgaaagaagctcaaaatattaacaagtccctttctgcacttggagatgtcatatctgctcttgcaactaagagccagcatataccgttcaggaactcaaagctaacgcacttgctgcaggactcgctaagtggagactccaagactttgatgtttgttcagatcagcccaaatgagaacgatgtgggtgaaactctttgctcgctaaactttgcgagcagagtgcggggaatagagcttggacaagcaagaaaacaagttgatgttggtgaactgtcaagatataagctgatggctgggagagccaaacaggacagtaagaataaagatgctcagattaagagcatggaagaaacaatccaatcgcttgaagcaaagaacaaggccaaagacctactcactatgaatctccaagagaagatcaaagagctggaagcacagctgctggttgaaaggaagatagcgaggcagcacgtcgacaacaagatcgcccaagatcacctgcatcagcagcagcaaagcaagaagccagaaaactcaccgtgcccgacgagaagccccatggcagagaggaacctcaactccacagcagagaagccagtgacgttgctcaaagacctcggaatcgcgaggcagatgttctccgacagcaacacggacacctacagcatcaaccacctgatgtccatgtcgtcggagaaggagaacaaccctgccggcggcgcgcagcctacaaaagccagaagagtctcactctgcggcggagctcaccagcagccggctgctcctcctcgccggggctcgctgatcccgctgccgcggcggaactcactgatgctgcctctaccattgcccaagcccgcaacacccgcggcggcggcgtcgccgctggacatgatcaccgagcagtgctcctcgccgctggtgatcgcccccaacgacatcaggggtggcggcggcggcggcggacggaacaagaggatcatcaacagcatcctgcgtcgcagcctgcagaagaaggtgatcatcaggccgccactaatggcagctcatcagtcagggaggagggccggcgccggcgtggctggtacaaccacccatggcggcggcggcggcggggtgatgagagcgcggcgtgtgccggtgagcggcggccggggaggaggaggggtgcagcacaacagggagaaggagagagggtggaacaacgggaccagcctcaggcagctcaactagagtgatactccctctatcccatagtataatggattttgaaaagaagtgatatatctaggactatgaatgatagtcatagatacgtcgcgtccctctagaatcccttatattatgcgatgaagggagtattatgcatcgtcactcagctcagacgggtgagtgaaggagagacttatagaattgggagtagttttaggagggtttcaggtgttgatacctcattagattgtgtggtgtcgtgggtgtgcttgagttctcgagtattgtgagagaactctttgctgatgtttcattgtgttcatagattgatgattggattggttgatctggctgccagatcttagattgctggagtgtttgatctggctgtcagattctattttacgaaactgtttcttgctcggatcaggtttacaagtgttttccagttcaagtttgatcaaattctgtaatgatctcaagtgttttccagttcaagtttgatcaaattctgtaatgatctcattttctttc

SEQ ID NO: 9378 - DNA, 1693 bp, Oryza sativa
  ref <308>: DATABASE ACCESSION NUMBER: AK106726
  ref <309>: DATABASE ENTRY DATE: 2002-08-28
aaccatgcatgttaattaactcgtgcacatacatacgccacgtactagcatctgtctgatctgccaccatgtccagggcttgcttgctcctcgtcgtcgccgccgtctgcctcgccggccgcgaggcggcggcgttcaactacgccgacgccctcgacaaggccatcctcttcttcgaggcgcggcgctccggcaagttgccgccggggcagcgcgtcgcgtggcgcgccgactccggcctctccgacggctccgccgacggcgtggacctcgccggcggctactacgacgccggcgacaacgtcaagttcggcctgcccatggcgttcacggtgaccatgctgtcgtggagcgtcatcgagttcggcgacatgatgccggcgcgccgctcgtcgttcctcggcggcatcttcggcggcggcggcgtcgcgcagctcgacaacgccagggccgccgtgcggtggggcgccgactacctgctcaaggcggcgacggcgacgccggacaccctgtacgtccaggtcgccgacccgtaccaggaccaccggtgctgggagcggccggaggacatggacacgccgcggagcgtgtacaaggtgacgccccagagccccggctccgacgtcgccggcgagaccgccgccgcgctcgccgccgcctccatcgtcttccgcgtctccgacccctcctactccgccaagctgctcgacgcagctcaactggtgtttgatttcgcggacaaatacaggggatcatacagcgactcgctgagctcagtggtgtgtccgttctactgctcccactcctaccatgatgagctgctgtgggcggcgtcgtggctgcacctggcgtcgccggagaagaaggacgtgtacctgtcgtacatcgggtcgaacggccacgcactgggcgccgagcaggacgacttcaccttcagctgggacgacaagcgcgtcgccaccaaaggattcttgcagagcagagcggacgggctgcagctgtacaaagcgcacactgacaactacatctgctcccttgtccccggagccaacggcttccagtcccagtacacgccagggggtctcctgttcaaagaaggcgacagcaacatgcagtacgtgacatccaccgccttcctcctcctcacctacgccaagtacctctcctccagcgccgccaccgtctcctgcggctccaccgccgtctccccctccaccctcatctccctcgccaagaaacaggtggactacatactcggggcgaatccggcggggatgtcgtacatggtggggttcggggcgaggtacccgcggcacgtgcaccaccgcggcgcgtccatgccgtcggtgcgcgaccacccggcgaggatcggctgcgacgaggggttccgctacctgcactcgccggagccggacaggaacctgctcgccggcgccgtcgtcggcggccccgacgccggcgacgccttcgccgacggccgcgacaactacgcgcaggccgagccgtccacctacaccaacgcgccgctcgtcggcgcgctcgccttcttcgccggagcgcacaagatcttcacgccatgatcgatgaactcgatctagcttacgattaagcttaattatgtacgctacgagatgcatgtgagtgacgatggtgtcacttcgattaattgattaattaattggcgggtgaatgc

SEQ ID NO: 9379 - DNA, 801 bp, Oryza sativa
  ref <308>: DATABASE ACCESSION NUMBER: AK106727
  ref <309>: DATABASE ENTRY DATE: 2002-08-28
atagtactccgcccgccttgcggaaacaaatcgaagaagaagaaggaagacgcagccgcgtgcccccccatccatggatctggagatcgtgggccggcacgcgctgctgttcgacgacgacccgacggcggaggtcgtcaactccggcggctccctcgtcccctgggccgccgtcggcgcggacgacctcctcctcgaccgccacgacgtccggcacctgctcgaccgcgtgcctcctcgcccccgccgctcctactccgcggccctcctctctgccccctctctggatggcgtctccgaggctgaactcgaccgcgagcgcttcctcgacctcaccgccgacgatttcggcggcgagggctctcaagatgcggtctcttcaggtatacgtctgttcccgctcctcttgacctgcctatgcactctttccctatcctctatcctgtattgcaactattctgcgtatccatcagctgccctttcacctttagttgcaattgggcgatgcgagctctaagaatccagtgtttatcatcttaagagtgctagcaagaaattagactctcaacaacaccgcctgatgtatcatgtagtagaggttagaaaccaaacagttttttctagtcccctttgctctcactgggatccacagagaataaaaatctgctgtagggatcaaacaagagtgaaggactgaaggtaccagacaatatgttgttgatctgtgtgcaagagttgcctctgcaattgtaaggacatacagcaaagataatttgttatgtcataatgttgtttggtttc

SEQ ID NO: 9380 - DNA, 2386 bp, Oryza sativa
  ref <308>: DATABASE ACCESSION NUMBER: AK106728
  ref <309>: DATABASE ENTRY DATE: 2002-08-28
attcacatgcagcccacctttggattctctctaatctgctctcattttgatgcattcaggtccccacaaacatgaactctatggcccccgtgttgccacacactgaaggggccacattggcttctccgtctggggatcgacgcgccggttgcgcggtgtaggccggcggtgacaccggtgggaggcgcaacagcagttgaccccgctgctaaatgccagtggtccaggggagcaagcataatccccaagcaatatggtctttcaacagcggccatatagtgaatccagcagaagatatgcatgctgctgtatcctaaaccggtgcatattttcgtcccacttcgattcttaatttctcgcaagtattataaggtcgattaaactaggaacaatcattcaatgtaacttataattcttatgtgcttctaaaagaggggaatgaaatgtttagtgatgtggcgctccaatgatgaagtactaccggcattttctattcatggttatttcagtgtcctggcgaccttattgcatctcggcgcacgagtgtctttgctattggagtgctgtgagcctgtgatgtgcgaaacagctgcatatctgtgcgactctggaaaataaatatcagggaggaaaggttgctggcaagtactcctacctcagaccaagtttgatttaaggacatactatgctcccagcgaaagaacacagcaaggcatggcgcctttcgtttcatccctgcatcggactatatttattgtggtttgccttgagctttccttgtgctggagagtgcagttgctgcgtgttgctggtgactgtccggatgaagttgccatgcaactgtgacctttatcatgttgtcaactcaacttcaaagtgcacacgcatgcagcgctgaacaacttatggtacaagcatccaaagtgcatgcctccaacaaaaagtgaaagaggtgacttatcttggttaggcctaacaagttaaggtttttccacactgcatttgccactacacagacgagcaagcagagcagcatgcatccgagctccaagaacggcatcaatggcgggagcagccatggaggtcacgagtcatgaccgcgatgagacggcggcggcggcgttgagcccccgcgcgaggccgtggacggcgccgtagccgcgggagccgaggccgatgcagccgaagaggaggagcccctgccggtacggcaggtacgtccgccgccgcatctcctccgcctccgccctcctcgcctcgtacagcctctcgtgcgccgatctcctcctgctcctcctccccgttgctgcccctctccctcctctcgcgctcgccgccgccggagccggagacggagacggggacggggacgggctcctctttggcggaggaggcggtggcgcggtgtcgtggtggtggttcttgccgccgtccgacttgctccggtggaggagatccttcaagaacgcccaccggcgggagcctcgtgaggaggtggacgaagcggaggaagccgtcgacgaggacgacgacgagcgagacgccgccggcgtggcgactgcctcgacctcctcggcggtctccggcgcgggagaaggcgccctccagcgcgtgcggaacggggacatcgaccgcgccttccgtcgaaccgaccggctgcggatgcggccacgctcgtcggcctccgcaccatcctcctccaccgccgccgcatcctcctccgccagatgcgacgcgtggccgtcgccgtcgacgagcggagccagaggctgtggctggaggagcatcgcggagagacggacagcgcggatctggccgttgtggaagagctcatccgctgacgacatcgccgccgcggagggagacgggaaccgcgacgagaagtcgaagtcgaagtcaccgaggcacccgccgccgccgccgccgcgggtggggctcgccggcgcgctgaagaagcacggcgcgccgtggggagaagcgaagtggtgctcccgctcccgctcccgcgtcgggctggacggcgcgctgacgaacggggtggagcaggcgctgtcggcgagagggtcgccggggatggcaatggcggtggctgcgtggtcggcggcggccgccatggctggctgggggtggtggtttggtgcggcgagcgaagtggtgggagtgaggaggagtgggacggtgggagtttttaactgctcgggtttttttcgattcagccccttggttttacataaattttggggtttcagtgtgttagtggagttgaggggttctaaggtgattaggggtgagtttcggggggtgaggtggtaatgtaattgtcccggtgatcagatctgaaccctcttggattgcgtaattgtaggatcgtcctcttttgtggtgt

SEQ ID NO: 9381 - DNA, 804 bp, Oryza sativa
  ref <308>: DATABASE ACCESSION NUMBER: AK106729
  ref <309>: DATABASE ENTRY DATE: 2002-08-28
cttgtggagtcactcacattcagatgatgcggctgcgacgagggcacatcacccagcttctgctgctgatacttgctcccgttcgcctcctgcaggagatcaccattgaagaggctgcgacaaccctagctcctcctcctcctcagaccatttcctccatgataggctccctccgtggccgcggccgccgcctcctcgccgccgcgtccgccctcgcgctcctcctcctcctcctcctgtcccgctcgccgcgtcgtcgtccccacgggtatggcgtcgtcatcgacgccggtagcacgaggagccgcgtccacgtcatcgcctaccgctcccccgccgcctccgcggccgcggccgcgctcccgtggatcgactgggcgcgcacggcgtcgatgaaggcggccccgggctgttgtccttcgcctccgatccgggcagcgtgggtcggtcgctggcgctgctcgtggagttcgctcatggtcggcggcggcgaggcccggcatggtcgggtgaggcaaggtgggaagtcacgcgggcggcgggtgaggctcatggtcggcggcggcggcgagggccggcatggtcgggtgaggcgaggtgggaagtcacgcgggcggcgggtgaggcgggcggcgtggctggtgtggcgggcggcggagataatcctctttggcgtgcgttctttttttcgttctttttggcgtgcagtttctttttccggagcgagacgcagtgttaatccggtgctaattgcaaccgcaggattaatccggcgctaattgcagtcgcggtgttaattacact

SEQ ID NO: 9382 - DNA, 1999 bp, Oryza sativa
  ref <308>: DATABASE ACCESSION NUMBER: AK106730
  ref <309>: DATABASE ENTRY DATE: 2002-08-28
ggctcccctccttcctcccatccaaagcccacatctcctgcagatccaaccgcatctccgctcccccctcgccgccgccgaccaccgcagcgctccctcgccgccgccggaggcccacgccgcgcagtcgcgtccgagaagctcggagctttttcaggcaagaggcaggggccccccctccaaaccctaaccgtagctcctcctcctccaactcgtctcctccgccggtggcggtggcggtggcggagatggagatggagatggagatggtggtggccgtgccgtcgccggaggtgcccgcggaggaggagagggcgctgatccgggacatcaccgtcgccgccgaggcccacgccaaggaaggggacaccttcttcctcatcacccacaggtggtggcaaagttggattgattatgtcattcaagatttggctaattcaacgaataatggttctcatcatcatgagcatggttctaacgttctgagaagaccaggagcaattgacaatacagatttgatagatgatactgcatctgaagtctcgaatatggagattgaactacatgatacattggttgagggtcgtgactatatactgcttccccaacaagtctgggaaaagttgcacggttggtatggtggaggaccaacattgccaagaaaggcaatcaatactggcttgtctcaaactgatttagccatagaagtttatcctttacgtctgcagttacttctggctccaaaaggagagcaagctgttataaggataagcaaaaaagatacagttggcgaactccataagaaggcttgtgaggtttttgatttgatacctgatgaggtctgcatttgggactactatggccgaacaagacattctttgatggataacttggagaaaacccttgatgatgccaacattcaaatggatcaagatattctagtggaggttactaccgatgcaaatggtagtttggatggtggttgcattggttcaatccaagaaaatgaatatttagaacgagaatcaacttccttgattgcagatgcttcgaaatcaggattatcaaatgagaattttgcatcaaacaattatacttccagaagctacagctctagtcttacacaaagccagtacctgcgatcttcgaatggggacttagataacatgcatggtactagtgccatgatcaccagaggatctcctttaggtcttacagggctactcaacttgggaaatacatgtttcatgaatagtgctatacaatgccttgtgcacacaccagaattcgctagatattttcgtgaagattaccaccgtgaaataaattggcaaaatcccctgggtatggtggtaagtactctttctactagcatggcgttggagccttacgtttgaacttaaagtgctacagagatagtgatattattttgtagcatggcgttgaagccttacgtttgaacttaaagtgttacagagatagtgatattattttgttacatgcatttggtttgatgccagtcgaatttgctgattttagatttctacatagtatgcaacaaccgagagatttttgatacttggtgaaattagtgaaattgacaattttgtttgttttgattcagtaacaattccctttttttttgacgggaaagtaacaattcccttggatatatactttttgtgggttgtgcattctgttatgctacctgcgttcaaatttctactttttttcgttgtataagtgacttatcaagtttatttgatgcttctgttcttttttatgtcagcctttgtcagttcatatggttgcgcttgaaatcaattttctgatttcttcttttgaccaaaaaatttctaatttcttacagcaaagagaatctcagatgcgtgattcccttgtcatattaagataacggatacaagctacagttattagaaataattattttttggaacattttttgtgcactgatttggtgcgtgtgtatcatgaaagc

SEQ ID NO: 9383 - DNA, 1679 bp, Oryza sativa
  ref <308>: DATABASE ACCESSION NUMBER: AK106731
  ref <309>: DATABASE ENTRY DATE: 2002-08-28
accggctccaccggaccagagagattcgccacccgccggagaaatgccgccacggaggcgagatcgccggaggccccgcgacccctcaccggagacctcccgtgcgagcacttcagccgcctcctcctcgtcggggtcccgcttccgtcccgccctcctcgcgcctctcctcctgctgcttctgctcctcatcctcgccgcgcttcacttctccggccgtctctcccttccccggcctcaggcgccgccgcagaggacacgcctctccgtcctcgagcgcgggctcgtcaggcgcgacgtctccgccagcgagatcctcgccgagcacgctacggtctcggagaaccggtcgcgccgccacttccgcaaccctgtcctcgcctatgtgaccccctggaactctaaaggttatgacatggcaaagttgtacagcacaaagtttactcacatatcacctgtgtggtatgacttgaagagcgatgggaataagctagttttggaaggacaacataattttgatgccaaatgggtctccgaacttcaaagtaatggatctttggtattgcctagagttgtcttagaagcattccctggggttgtactaatgaaaaagaagctaagggacaaagctattgatctaattgtcaatgaatgcaggtaagtacctatattgttgtatgtccagatattgttatagttataattgccagtttgtcatctggctgtcagtgaatagggataaggggtatgatggtgttgtgctggaatcctggtcaagatgggctgtttatggagtgttagatgattcagagttacgcaacagggcacttcaatttgtaaagcatctggggaaaactttgcctttgaccagttcaaatttaagtacgcatcaccatttgaagttaatttatgttgtccctgctccacgaatgaaagagctcaacaatcaagagttcagaccagaagatcttctgcagttggctgactcagtagatggtttttctcttatgacatatgacttctcagggccacaaaaccctggccccagtgcacctttgagttggatacagtattctttaaaaacacttctcgcagcgaaggggtctgcttctcatgggcattctcacatgatattccttggcatcaatttttatgggaatgactttctcctttctaaaggtgatggtggtaatgctatcactggaagggatttcatttatttacttgataagtacaagccatctttgcagtgggatgagaaaagttcagagcattttttcgtctattcagataaaggtttgagacatgctgtattctacccaacgctgatgtccctttctttacgtttggatgaagctcaagattggggaacagggctttcaatttgggaaattgggcaaggtttggactattttttcgatgttctttaggaatatctcacgtgtgttctttttattttgggagcaatgtcagttagaccacaactattgcaaagtattacaaggtcacccgtggacattatttgtttagcatcaaaactgtcacttcataactgattacatccttctgggaaatgtttccaaacaccaaatttccccttcagtgtactgctgcaaaatttagattaagtgatatgagatttttcatcttctttacagaataaacatggttgcttgttt

SEQ ID NO: 9384 - DNA, 1831 bp, Oryza sativa
  ref <308>: DATABASE ACCESSION NUMBER: AK106732
  ref <309>: DATABASE ENTRY DATE: 2002-08-28
aatttctccgcaatccttcccacgcgcgtcttctcccctttccgcgtgtgccctctcccctttcagcttcctccatcgcgcctctcttcccaaccgttctccccgcttccatcgccgccgcccccgcccgctactcgcgtgcttcgcccgtcacacggtgactcacaccgatccacgccgccaccgacgacgatctcctccgcgccgcccctccgtgcaacccctaactgccgcccccattcctcccctcaccatccaacctcgccacctgacgattcccctaagcgccgctctccccgcttccatcgccgccccccgctgctcgcgcgcctccgcccatcgcgccgatccacgccgccaccgatgacgatctcctccgtgccgcccctccgtgtatcgtctaactgccaccccatcccttccctcaccatccaacctcgccgcccgacgattcccctaagcgccacgcgctctcatccgtcccatcaccatctccttccaacctctccggccatccgccctcatccctcccctcgccatgtccttccaacctcatcggccatccggacgtcgccccctgcccgtcggagatcgacggccgccggttccaccaaccaccgcaattgaccccatctctcatctctgtgtttactgaatatttggtattatacggtgtttattcatctctcatctctgtgtttattcagctatgttagggatgtggaacacaattcttcgtgttactcactgatttaactgaaattttgattactgaacacttgcagcatagtgtttgattttgaccaaatccactatagtgatggcagatgaacagtgatactacttcaacatcagaaattttctgcatgttgtgaggattgttcagctggcttgcacacattaagatatggataacaatattgggggctccacaccagcatcgttaacaagatcacgcccttttgctgatattactaatacaagtgccggggataaaaaaagaacgtaacagtattgggtctcccccctcttatctttaacaacatcaagagttttttttgtcagttatattcagtccatcaagatgtcacttgcgtactaatttcgcaagatttcctccctcagccctgtttgccgatattactaatgcaagcgcggggggatttacaaataaaccatgtcagtaagagatgcacatcctccaatttgccgcaaaaggaaatatgcaaaatctgcaagaaggtggtgctaatctcagcgcattagaattaagaaggaagtgatgtgaccatggctactatggatacaaccgttgctcacatatagatgaacaacaagatattaagttcaagtcctccaagtgctggaatccgattctgctacactgctgacttcaaacggccaccaaatctgcatacgacctccgttttcggcccgtgagtacttgatggaaagctctcggagtcgtctttccaacggatccagcatcatccccgaattccatcttgttttgacgcaatcacaaaaacaaggtgctgcgtcacctgtcatgggcctttgggcttgtaacttcgtttgggaccccggcccaagtggggcccagtggggtgcgccccaatctggtagagcacgaccctaggatcctcttggtcgttctcgcacccctataagtagccagataccccttcagggttgcttagggttttgattaattgtaagtttagccattgctacttagcttgcagcgcgcatgtcggctagaccgtccatctgcttgttcgaaacctcactttatcgtgtatcaattcatctttgtgcgtcttgtctatct

SEQ ID NO: 9385 - DNA, 1917 bp, Oryza sativa
  ref <308>: DATABASE ACCESSION NUMBER: AK106733
  ref <309>: DATABASE ENTRY DATE: 2002-08-28
aggtgcatagcacaattcaggttgcctcattttccccttcgtgtctacactcaaccatgttagctcgccgggaaccaatcgatgttttctctgctatccaacaccggctgcagaagattgacacgatggtcgaagagatgcaaatggatcttcggaccttgcacaggtacggcggcgacggtgatgacgatggtcacggcgacggcgaagatgaggatgacgttcttgatctggaccacatcgagctctgctccttcatggagcagatcaaatcagccgtgcagctggtgcgagcagctctgcaggagaaggtgatgcggatgacgaccaacacccgcggcggcgaagacgacgacggcggcggcgacgaggcgttcccttccggctccggccacctgaagagcgtcttggagtccctggacccgcagctgaagcagtgcgccctttgcctcgccgtgttcccgagcggcaaggcgatcaagaggaggctgctcatccactggtggatcggcgagggcatcgtgcggtcggccgccgccgggaaggcgtgcttccaggacctcctctcccggggcctcctccagccggcgatgctccgcccacactgccacacggcgcactactgcagggtccacccgtcggtccgggacctcctcgtcgcggccgcgcggagcttcagctacttcgccttcgaccgagacggcgaacccaccgacgagtgcctccccggcacgacacggcgcgtcactctgtgcaggacccgtggtagtagccgccatggcggcggcggcggcgagtatgtcacggtgtacaacctgagccagcgatacttggagatggacgaggcgtggctgggcgagcagcgggggatggggactctccagctcgggcggtggcagacgtcaccggagcaccacgtcgagatggtccggccggatggtgtcctgggcgccgcggcggcggcggcgtgccggaacctcaggtaccttagcctccggggcatctcgctcgtcgagtcgctcccggagtccatcggcgacctccgcgacctcgtcgtgctcgacttgagggcgtgccacaacctcgagaccctgccggcgtccatggcgtcgctggggaagctcgagtaccttgacgcgtccgagtgctacctgctcgaccaaatgccccacggcgtctgcaagctccaccggctccaggtcctaaagggcttcgtggtcgccagcgccgccggtggcaagaagatccccccgtgccgcctcgccgacctcgcggcactgccgctgctacggaagctgagcgtcagcacggggcgccagcttcccgtggcgcccgacgacgagctgccgcggctgcacgggttcgcggcattggagtcgctgagcgtgcggtggggcgccgccgcagcccacgccggcggcggcgggaggatggatctgtccctcctcccccgcctcgcgaagctcgacctgcggcgcgtgccggcggaggagctgcaggaggtcgtgcacccggcgcgcggcggcggcctgaggaagctgtgcgtccggggcgggaggctccgcgcgttcggcgacgacgtgacgtgggacgtcgtggagacgttgcgggtgaggttcctggagcgtctggactgtgagtggcggcagctgaggagcacgttcggtaagctccggttcgtcgacaagcggcggtgtcccaagctcagctcatggcggtgcgacgcccagggcatctggagaagggaagaagacgacggaggcgatcgaaactgagcaagctttcaaaatgcgaccatcggccttatcgagaaatccattcgattaggaactatttacggattgtttggcaagaggagtgaaagtttggacgggaaaattgatgatgtgattaatatggggctataatttttagtct

SEQ ID NO: 9386 - DNA, 2037 bp, Oryza sativa
  ref <308>: DATABASE ACCESSION NUMBER: AK106734
  ref <309>: DATABASE ENTRY DATE: 2002-08-28
aaaaacgtcccgcgcggggggcgggaccaacaaccacccattccaccaatgcggacaccggcgctcctcccccgcggcgtggaagccgtcgtcgtcacctccggccacctccgccgcctcgacccgcacgtccatgcgccgctgctcctcgccaacaccctcatctccgccttctcccgcgcctccctcccccgcctcgccctcccgctcctccgccacctcctcctctcctccccgctcctccccctccgccccgacgccttcaccttcccgccgctcctccgcggcgacgccttcgcctcgggagcactcgtgcacgcctacctccgcttcggccgcgtccgcgacgcctacagggcgttcgacgaaatgcgccaccgggacgtgcccgcctggaacgccatgctgtcagggctctgccgcaacgcgcgcgcggccgaggcggtgggcctgttcgggaggatggtcatggagggcgtcgccggggacgcggtgacggtctccagcgtgctgcccatgtgcgtcctgcttggggacagggcgctcgcgctggccatgcacttgtatgcggtgaagcacgggctggatgacgagctgttcgtctgtaacgcgatgatcgatgtgtatgggaagctggggatgctggaggaggtgcggaaggtgttcgatggaatgtcgtcgcgggatcttgtgacatggaattcaatcatttcagggcatgagcagggcgggcaggttgcttctgctgtcgagatgttctgtggtatgagggacagtggggtctcccctgatgttctaacgcttttgagcctggcatctgctattgctcaatgtggggatatctgtggtgggagatcagtgcattgctatatggtaaggcgggggtgggatgtcggtgacatcattgcaggaaacgctattgttgatatgtatgccaagctatcaaagattgaggctgcccagaggatgtttgacagcatgccagttcgagatgctgtatcctggaacacgctgatcacagggtatatgcagaatggacttgccagtgaggcaatccatgtatatgaccatatgcagaagcatgagggtctgaagccgattcaaggaacctttgtcagtgttttgcctgcatactcacatcttggtgccttgcagcagggcacacgaatgcatgcactctctattaagactggattaaacctggatgtatatgtcggcacttgtgtgatagacttatatgctaaatgtgggaaattggatgaggcaatgcttttgtttgaacaaacgcctaggaggagtacaggcccctggaacgccgtcatatctggcgttggagttcatggacatggtgcaaaggcactcagtctcttctcgcaaatgcagcaggaaggaatcagtcctgatcatgtcacatttgtttcactattggctgcttgtagtcatgctggcttagttgaccaaggccggaatttctttaatatgatgcaaactgcatatggtattaagccaattgcaaaacattatgcttgcatggtagacatgtttggaagagctggtcagttggatgatgcttttgatttcattcggaacatgccgattaaacctgattctgctatttggggtgctctgctgggtgcttgtaggatccatggaaatgttgaaatgggaaaagtggcctcacaaaacttgtttgaacttgattcaaagaacgttggatattacgttctaatgtctaatatgtatgcaaaggttgggaagtgggatggagttgatgaagtaagatctttggtcagacgtcagaatttgcaaaaaacccctggatggagttcaattgaggtgaaaagatcagtgaacgtattttacagtggtaaccagatgaacatccaccctcaacatgaagagatccagagagagctacttgatctgttggcaaagataagaagtctaggttatgttcctgactatagttttgttctacaggatgtggaggaggatgaaaaggaacagatattgaataatcatagtgagagattggct

SEQ ID NO: 9387 - DNA, 1895 bp, Oryza sativa
  ref <308>: DATABASE ACCESSION NUMBER: AK106735
  ref <309>: DATABASE ENTRY DATE: 2002-08-28
ttttttccccgttttcccgagtcccccacgccctctaccgagctctccacgccgatccccttcgccgccgctcgccggcgatctccagccgcccgccaccgccgctcccgtcgctgccgcgctgcgccgccaccacctatagcatcacaccaccccaccgcaccccggcatccactccatctccctcctccaccgccggaaccaccttcccatcgcgaggccgagccactaccgccacacaccgccttcagccggccgctgccgctgcgttagtcgtcgccgcacctcgccgcttgcgccgtcggcaacgccgtgccaagctctaccccggcctccgctccgtttccccattccaccaccgcaaccacccttccaccgtgcatcccgagccacctccaccatacgccgcctccagccgtgtgccaccgtcgccttagccgccgccgcgtcgctccgtcttcacctctcgcctcgcagcgccgtgcagcacctcggtcaccgttgttcatcgccggaaacccaccggaacgtggtacctctcggtcgccggtcttgccggccctcggccgcggctccgccatggtcgggcgtcgtcggaccgccgttcccgtcgcctcccgtgtcggccgccgccatcctttccgccgccggtcgcctccccatggtcgtcccgtcgccggcgctcctcgcgtgtagtttccgtcgtttcggaagtccgcggtcgcgaggaaaagagttcagaagatcaaagtgaagaagcaagaagtgtagtgcttctgagctgaagatggagttagaggaccaaggctcagaccccagttgagttttgcctgtggagtggagctgaagccccgctaggatcgcctttttccgctgctgctgcttttgtttcggtgtgaggactaagtgcctcttctaggtccagatagctagagaggccattgagagatcatcatcggagctagctagctagccatggcgacctaccggccgggcagcaataccctcctcaagtccgactccatcctcgagtatgtgctggacacgacggtgtacccgcgggagcacgagcgcttgcgcgagctccgcctcatcacgcagaaccatcccaagtcgttcatggggtcgtcgccggaccagatgcagttcttctccgtgctactcaagatgatcggcgccaggaacgccgtcgaggtcggcgtcttcaccggctactcgctgctcgccaccgcgctggccctccccgacgacggcaaggtggtggccatcgacgtgagccgggagtactacgagctggggcgcccggtgatcgaggacgccggcgtcgcgcacaaggtcgacttccgccacggcgacgggctcgccgtgctcgaccagctgctcgccggcggcgaggggaagttcgacttcgcgtacgcggacgcggacaaggagcagtaccgcgggtaccacgagcggctggtgcggctgctgcgcgtcggcggcgtggtcgcgtacgacaacacgctgtggggcgggtccgtggcaatgccgcgcgacacgccggggagctcggcgtacgaccgcgtggtgcgcgactacatggtcgggttcaacgccatggtcgccgccgacgaccgcgtcgaggcatgcctgctccccgtcgccgacggcgtcacgctgtgccgccgcctcaagtgagatcgaccgatcgatcgggcaatcttagaaatgcgctagagtgtctataccctctcggtctcaaaataaaacaacctcgtagtagtatgatgtttattttaggacattgtaataggtggttgatttattttgcgtaggagagagtacgttgctctactgttgctgttgatcttgtcgtacaataattgaagttcaaattcaacgtcaacttttcc

SEQ ID NO: 9388 - DNA, 2273 bp, Oryza sativa
  ref <308>: DATABASE ACCESSION NUMBER: AK106736
  ref <309>: DATABASE ENTRY DATE: 2002-08-28
aaaatgccttcctggcttcccgtgagcatccgcggtagctgctctgcttcttctccatgcccatggtcgactttcactgagagtggtgtgctacaaacagtaaacagttggtggcacacggccagccagtgtgagactgagagaaggagctgatcgagatctagtacgtacgtagcaatatggtaggaggaggtgggtacaggcagaagctgatccaggtatggaacgattggcaggtgagcgtgctggtgctgctcagcctcaccctgcaactcctcttcctgagcacggcgggcgcccggagacgggcgcagccgagctgggggaagaaaacctacttctgggctctctacatcggctccaggttcatcaccacctactccctcggcatcctctcccgcgcctccacgggcgacgccaacgccgacatccaggcgttctgggcgtccctcctcctgttccacctgggaggccccgacgacttcaccgccctgtccctcgaggacaacaagctctgggatcgccgctgcctggagctcttcatccaggtctcgaccacactctatgtcttctcccgctacgtgctcgaccccggattccgccgcttcatcgtgccgttcgccctcatcttctccgccggggtggtcaagtacgtggagcaggtcgtcgcgctgcaccacgcgacgatggaggcgctcatcaagtccgtcctgggaaagcccgacgctggcccggactacgctgacaccattaaccgattggacgggattatgagatccggcgcattgccgtccctcgacatcaagaacgaacgagttgaccgcccaaactctgatccggaggccaacatgcaggtgaaagattacagcgaagatgagcgggtggccatcaaaaccatccggtcagcacactctctgttctcgagattcagtgtcctgttcgcggacggcatcttcagcttcgaggacaggcaggagagccaggccatgttcttgcgcaaggacgcgaggtgggcgttcaagatcgtggagatcgagctgggtttcgcgtacgatcggctctacaccaaggcctcggtgtcccgcggggcgaggctggcggtgcgtgtgtgcagcctgtcgctcacgctcgccgccggcctctgggcggcgctggcgatcctgcgggcgagccagtaccggcagcggcaccggtgcgtgacgtacgcgctgctcgccggagcggcgctcaacgacgccgcgatactcgccgcccacgccttctccgtctggtccctggtgcacggcgactggctgagctggtgctccgtcatgctggtgaagcggaggaggtggtcggcgagcatggcgcaatccaacctcgtcaccttctgcctccggaagctgccttccaacaacgactccgacccggcgccgctctcgtcgtcgtttcttctccggcggctactcctcggcggcggccgaggaggaggagtgcaacaacaagacgcatcgcctgctcctgctctttccaccacgttagcgtccatggacgaattccagaagctgttcgagaggcgttccctgctcgaccaggtccgttctggaagcttctggagcaagtacaagcataccaagtatgtcccggtgagcgagaagctcaaggatttcatctacgcccagctagaggagaaggttcgccgtctcagcgagtacgacaagaggatggagagggagcgtgagcgtgagcggaagcgagtgagagctccatctccatctccatctccatctccatctccatctccatctgcatctgctacgactccaacccaaaccggaacgtcgacgacgacgacgacgagtagcatgtacagcattttgacggattgcaggggggaccaagtgatgaaaaaggagcggatcagcaacctgagctggagcctggagaagaaggagttcgacgagagcctactgatatggcacatcgcgacggacctgcggttccgcgaggaggcacaggcggccggcgccgccgcctccgcggcgagtgcggcgaccgtcgatcagcgagagaccaggaagcacatggagatcgcgcgggagctgtccaactacctctactacatcatggtggtgtagaaaatctaattgttgtattatgttattttctccgatctattagatcgatcctctatatataagcgtatacaggagatagagactataagagtagatttatctctaaaactttatcttatcttttaagattctatctttaaaatatatcttatatct

SEQ ID NO: 9389 - DNA, 1598 bp, Oryza sativa
  ref <308>: DATABASE ACCESSION NUMBER: AK106737
  ref <309>: DATABASE ENTRY DATE: 2002-08-28
aagaacacagcacacaacactagtcatcttctctctctagctttgcagaatgcagagctaaccaccaccattgtcagcatttcttggttttcttctcctgcttgtttccttgtcttgtggtgcatcacatcgtagctgcctcctcgcattgttgtgtgcaagaaaggtcgtcttcttcttctccttggctgtctgaattacctgaaaccagccttggatacattgtcgtgtccaagagctgaaagagcatggagatgatgagcttggaggaggaggaaacaatggcttctcctaccacctcttcgtgtggcacatgcaaatgcggtgccaacgacgacaaggcgaagaagatgaagacgaagaccaagaagtgcgagctagtgggctatgaggagctgcccgaatggctcaaggacaacgagctcatccatggctactaccggtgcgagtggccgatgaaggagaccatccttagcatcttctctatccacaacgagaccctcaacgtctggacgcacttgatagggttcttgctgttcctctgcctggcaatattcacagcgatggtgatcccaagtggtgacaatcttcacagcaacagcagcagaagcaggagcaatgcaacagctatggactactactacatccatggagatctgatggtgatgagcaacatgacaagggtgctgaggcatgaggcacttgcagcagcagcctgtctcctgctgcatgatccagcagatttgtctcaacatgagcagatctcaaccagctgtccaaccaacacatcctcctgttacacctcctcctcctccttctctcacctccacaatgtgcggcaacatgccatccaggacgccggcaaggtcactgccgccaccgccgccgccatcgccgagccgatcacacggtggccggtgttcgcctacctgggcggcgcgatggcgtgcctgctggcaagcacggcgtgccacctcctcctgtgccactcggagcgcgctaactacgtcaccctccgcctcgactacgccggcatcgccgcgctcatcgtcgcctccttcctccccatcgtccactattctttcctctgcgacccctggctccgccgcgcctacacggccgccatcgcctgcgccggcgccgccaccgtgacggcatcgctggtgccggcgttccagtcccccaggctgcgcccgctccgcgccgcgctcttctccgggctggccgcgtcgggcgtcgtccccgtcgcgcacaagatggtgctctacggcggcacggtgcgggaggcggcgacgtcggcgcggtgcgaggccgccatgggcgcgctctacgcgctcggcgttgccgtgtacgccgcgcgtgtgcccgagcggtggttccccgggcggttcgacctcgtcgggcacagccaccagctgttccacctcctcgtcgtcgccggcgcctacgcccactacctcggcgccctcgagtacctcaagtggcgggacgctgtcaaatgctgacgtcatctcgccatgacaccgagagtgtgaagtggattcattttaccaaagaaaatgagaattttaactgagctcactggtggtggtttggac

SEQ ID NO: 9390 - DNA, 1923 bp, Oryza sativa
  ref <308>: DATABASE ACCESSION NUMBER: AK106738
  ref <309>: DATABASE ENTRY DATE: 2002-08-28
attttcaaaatttgtattgggccgttcgcttgagaagcgcagaacatccagagttccagacgtagtacacctatatagggaaaggattccttcatcttttagagctctgcatcctagcgtccagtaacgtccagtacaagcacgacgaatcctcagcaaaccacgagactttctcctcgccgccggagagcaaacggctacatgtccagactccgccgcgccgccctcgccgcggcactggccgggacggcggccgtggcggcgaagctgtcggggatttccgtccgcgtctcccatccgccgcaagacggcgccgccaccaccacccgcggacacctgggcctcgtccgcgcgcaccctgggctgcgggacctcaacgcggccctcgccggcagcagcagcggcagggacgccttgttcctcgacgcggcccacgcgctcgccgccggtgcactccgcgctccgaccttcaccggcaggtacctccgtgagtatgccaagaaactagcggccgcggagtccacggtcgtctaccgggtcgagatgggcctggcactcgtacacgctcgggacggccgattcgaccaagcgctcgccgatgtcgcccggctggtcgcggacagaccaggcgacccccacctgcggatcacctccgccgcgctgcgcctcctgcacggccggatggggaccccggccgagtggctcaacggcctcccagaggacgccggatggagggtggcgttcgaggtcgtattcgccatgcccgggtcctcgccgctgtacacccaaggtgccgccgacagggtagtcatgttgctagcggccaagctcgccgaggccgtgctcgtcaagaatttcgagcaaggtgagtggtccgtcgcggacaagctggccatttcgttgctgctcaccgcactacgcctcttcgtgtccaagtacagccgttttccgtacttcacgaggccgaagtcgacgccgccgccgccttcctccggtggccgcgaaatcaagcccgtcaacctgcagccggtgttcctcgtggaatgctcccaagcgatgctcgcgtcgctgctccgagcgcggccgctctgcggcgagcgactccgagaggcgcgcgccaccgccgagcgcgccctcgccgacgccgaggcggagggcgacgacctcgcggcggtcgacgtcaacctcctcctcgccttcctcgccgccagggacggggacttcgacgacgcgctgcggcggtacaaggcggccgtgcagaaagacccgtcggactcccagccgtacgagctcgccgcggcgctctgcgccatcaacggcgacgccgcggagtcagaggcgtggcggcgagacggcaagcagcacggccgcgctactgtcgctgtcgccgtcgccgagcttgagctgccagccctcctcgacgagctggtggtcgcggcggcgctcggctccgggattctgacgaccctcgacctcgagcgtgggggacgacggcgcctcgtgttggtcgccgcgtggagggaggtggacgcaaggctcgcggcggcggtgctggacgacgacctgacattgccggagcgcgtgcagctccgcctgctccgccgtttgctgcgcggcgagacgcagctattgctggacactgccagccatggactgatgaagaactccgcgcgtgagagtgactgaagtttcagaattgggaacgcgctggacatcttgattcgtgtctacattgttggggaagaggatgggaagttaagacagtgagaaataaaggtggatcagtatgagaatttgatttttagtctcaatttcttttaaattagcggtgggaactgggaagtgatacaagggcaatcataaccctccatttaggatggtgtctatggtattaactacattcacatgtaggacttttaactt

SEQ ID NO: 9391 - DNA, 1961 bp, Oryza sativa
  ref <308>: DATABASE ACCESSION NUMBER: AK106739
  ref <309>: DATABASE ENTRY DATE: 2002-08-28
aatataatgatgctagccgagcaatctgcgcgggtcaccatgctagttgctgttaaaactgcagcagatcaacagcctggagttgaccaaatctccctgagacgtctctcccacacatcgctcatgccatttgaggtgcattggatgggatcccactagccctagctgaaaacagtggtttgcccccttttgatacgtcgactgcagtaaatcctcagcaagtgaagttttttttttttttgcctcctgaactacctttgcaagatagcaatcctcatcatggtattgactgcaattgcattcgaacaaacggcatcagagaacaaaacaagcagcagcagatcgtgctgacaactcaggtggtgaaaatgattctcaagattgatgacattatcacacagtctgactgctgaatgctgatgacaacctgcccagctggggtgatgcaacatggtaagaaaagcaaggcaatttttcctggctctaattaatcagcatttggtgtgcttgagctttcgaccggacagcatgctctcgatggaagccttccagaccttgcagtgcatctggttgtccagcagcagctgcaccgtccctgctgccgtgctcagcgccacggggaagaacttccgacaatccaccaccgcctcgccaccgccagagactgccaacacctcatctggaccaagcacaaacaacagggttcaggcatcatcaccgacaagcagaacgaagatcaatacactagtggcaagcagttcagctggttcatgcaggtaaatttttttaattattacagtgctggtatgttgtgaatgctccatgcaggcgcttcttccccagcctcagagccaccgtgccgcactccgggaagacggccaccgtcctcagccgcaaccttcctctgtattggtgctcatcatcatcatggagttgctggtgctgctgctgatccctctgctgacgtctgctctcagcttcagcacagctgctcctctcagacctggaaaaagcatacaagaagctcagcatcatagcatcacggtggcggtgagggtgagcagctcggcgggggagcggctgtcgaggccggccttcacggcggaggtgacccgggacctgtcggcaccggcagactccgcgaactcggcacagacggtggccaccagcgcggcagccgaggcaagcaccgtgctcagcttcctgtcagccccagcacccccagagctgctcctcagctcgcaagctgacacgacgccggcgatcgcagctgcgagctgggccaccgagacggcggcgtgggcctgcgccgtgtgcagccggagctcgtcgcgcctcttcctccgactcccggcgatggggatgctgtccatcaagtatcctctcagaattgccctcatgtgtcccatgttcagctgctcattttcagtggaaaccaaaagctttcgtcaattcacttcactgtgccagatccgacaaagcatgatggccttgtcttgaaatgaaaaatctgacaaaatactactgccaccgtcctaaaaagattttatttctgtctatgcacctggacaaatatttattcatgtgcatagccagaaataagatctttttggaatggactacaatacactgcaaccaaacagggccttagagcaggtacaatagcaggctataagccggctataaccatatatcgagaagaaaagagaagagagagaagaaagcgggctacagatttatagccggctgcaacacatactccaagatgttatgtgtgtatgagaggtgggaccgggtattaatggtgtagtatatttttatagttaactattatataaatgagctattagattggctatagatgttttggagccagtagttggctatactattgaccttactcttagtgttgtcacatctccctgtgctacatatgcccttacccaggtgggttggttctt

SEQ ID NO: 9392 - DNA, 2126 bp, Oryza sativa
  ref <308>: DATABASE ACCESSION NUMBER: AK106740
  ref <309>: DATABASE ENTRY DATE: 2002-08-28
aaaaattcagggtccggcggcatccatccgccactatttccgccgctcagcttcgcctggacgaagcagagtcaccgtcaccggccatccgccgtacccagtagtcggccaagaacgtcttggcggcgtcgaggctggggaagtagggcggctcgaggaacatctgcgccagggggtccatctcctccgccggcgagaacagcgcgcggttggtcgacgactccgcggtgcccatcaccgccgccacgagctgccggtacgcgaagaagaacctcctcaccgccgcctccacggcctggaacgcctgcagcagctccaccttgccggcctcctcgccctcgccgcgccgccggctgtggaacagcctcatggctgcctcctgcaccctcggcccgccgttggggtccacctcgacgccaagcacacatggcacacgcttcttgaggtccctcgtggcgttagcgacgtgcagcagcgccctggagcggaagcaggaggacgcgtcggagcccggtgccgcccgtattgcgagctggctcttgagccgcaggaagtcgtccgggtccatcagcaggtgcaggtcctcgacgtcggcgagcagcttccagacgcgttccaggatccagcagtcgctcgccgcggcctcccagtttcttgcttcgatccggttgtttaggcgggtgagaagctgtgaggccgcgcacagccaggactcgagtatctggtggatagtgaacagcgcctcgttctccttgttgcggtagccggtcttgggctccggcgcgatcttcgccttgagggcgtgcagctcgtgcggcctcacgacgcggtcgtactcgagcaccggcttgccggcgaggttgggctcgccgaggccgagggtgaacacgcagccctgcatctggctctcgatggcgtacttgatcctggccgccacggtctcggacttgtcccaagcggcgagccgcgggagcaggctggcctcgctgacctggcacaccaccgcggcggcgctaccgggaatcttccacacctcagacgcgctccgctcccgcgggagcacgcctttggacgcgctcagctcggccagcggcgggcactgctcgccctcgcagagcgcggccaccagctccacctcccttgccgcgagcgcctccagccgccgcgcgagctcgcggcggctggcgtagccccgcgggtcggagagcgcgacggagatgaagcggaaggtgatctccagcgcctgcagcgccggcttgacgaggccctcgtcggcccactccggacagcacctatccttccacagccttgcgagctccggaagccgcaggtactgctcgtactcctcgaccgccgtatcgtcctgcaccctcagaggcgcagccaccgcccccgacgacgacgaggaggacgcgcgctgcttatcttccggccgcaccggcgatacaggggacagcttgggcgttgccatctccgcgctccagttgagttgaactctccctcgatatgatcagcgtctagtttgaattttccaactgtatactccctccagttatcgatcgctaatcctcgcttgtctttgagtttggcctcgagaattagcagatgagtcgtctttatatactgctgcgctaggtggaagtggagtattacagctgtacaaggggagcgtgccagcatggcgtgtgggccacgctgctgcagcgtgattcgaaattcaattttggaaaccgcgggtgggccgggccctgtgcctgtggctggcgttcgcagagaaaggcaataaataatcgtgcaaagtgagaaaagaaagagatcttgagcttatccggatgaaggagaggtgacctctagttgtgtgaactgtgaacggcggatgcgctcgtggcctcgtgatgtccaggtcgtcgtgaatcgcgatgttctcttgcgttggggcagctcacgccgacgttgtattcgatgtaatgcttaacgcggacatctctatccgttgcgcacttgcgttgcccaccctaggtaggccggcacgaacgaggttcgctgaatggataaacggcgtctctgtttctctcgctagtctcgtaaaagaatactatcaaatgaaaacttcgttcgcttgccct

SEQ ID NO: 9393 - DNA, 1640 bp, Oryza sativa
  ref <308>: DATABASE ACCESSION NUMBER: AK106741
  ref <309>: DATABASE ENTRY DATE: 2002-08-28
ggactagctccactcctgcccagccaagaatcaccgatcctgccatggccgacgccgacgccgacgcgtgccccgccgtcttcgcctcgcgccaccccaccgagcaggagctcatctcctcctaccttcaccctcgcctcctcctcaccaccaccaagcccgccgccgccgtcgccgctggcggcgtaccgagcttcatccaccacgccgacgcgtacgccgccgacccggccgacctcacggcgaggcacctcccggcgcgcgccgcggacggctccagggcgtggtacttcttctcccccgtgcggaccaccaccgagcgcgggacgcggcgggcgcgcgcggtggagtccggggacgggtgctggcactcggagtcgggcgtccgtgccgtcgtcgacgccgccggccgccgcgtcgggcaccggcagttcttctccttcgtcaagaagagggaggaggacggcaagcgggttcgcaccgggtggctcatggtggagctcggcgtcgacaacgatgctgcctcagcctcctcctccaatgagctggtgctgtgtaagatttacatgacgccacgcatgccgccgccctcgccgccgagcgccgtgacgtcgtcggcggcggcgaccatggagctgatgccacgcgcgccgccgccgtcggcgccgagcgccgtgacgtcgccggcggcgacgaccatggagctgatggctggaggagtacacaagaggaggaagatatccgatgagatcgcagctgccgcaacaccgccgcatccacaacaacaacgacgacagcgctgtgttccagacaacgacggatcaaaagagagctccggcgaatcatcatctgtggtcatactcgatgacgacgacgacgatgctgatgctccggaagatggtggtgctgtcagatcaaaactgaggtcggacgatggcgtcatgctggccgatgctcgagacgacgaacaacacgccgcaacatccgactccatggccggaacatccggtggcgccgtcacgggaggaggacacggaaagcttcttcccgacctcaacgtcgtcgcaaccgtggcgcacgacgacgaaggccgccacgcacggggcgcaccgcggccacaagacggcggcaccagcacgacgacgacgatggtggccagcgccggcgccgagcgcggcagcacgacgggccacctgccggccgccaccgccgggtaccgtcgaacgctgatgctcttcctggaggaggaggacgacgacgccgtggaggatgagcagcagcagcagcaggcgccgccgctgccacccgcgacgtcgacggcgacgacgacgacgaggacggcggcggaagccaatgtgcagcggcagcggcagccaccgtgttgtacatttgtggtgcacccgtgcgcggtgcacgcgaagatgcgacacggcgcggcctacgggtgcggctgccgtgtgaccggcgctgtccggagaggcggttaccatctgccgaggcgtgcagtacatactacgactactggacagtagtttatatacgacttgttgctccctcccgtcctcacaagaatgcgattgtagcattcaaattttgtactgtacaatagagaatataacaagagtgttgtacttcccatc

SEQ ID NO: 9394 - DNA, 1842 bp, Oryza sativa
  ref <308>: DATABASE ACCESSION NUMBER: AK106742
  ref <309>: DATABASE ENTRY DATE: 2002-08-28
gtcggtcgatctcccgtctccctcctcgcgacttcgcccgccgcgccgaccagccgccgatccccatcccggcgtgcgagcagcgccgccgccgccgccgccaccgtcctgctgcttccgccgccgccaccgtcctgctgcttccgccgcatcctctccccgccgctcaaccctccccatgccccatgttagatccgccgctgaaagggacaatggctctggtggtgatgtcaccccgggaactccaagcccgacccatggtgcccgtgtgaggcagcggaagcgctccagcgatgctccatctgacgtgaacaaaaccaatggcgctaatttgctgctaaatgaccagaacaagtacaagtcaatgcttattcgcacgtattcttcgctctggatgatggcaggatttgtgtttttgatatacatgggacatctatacatatgggctatggttgtcgttatccaaatctttatggcgagtgagctcttcaatctgctgaggaaggccaacgaggacaggcagcttccagggttcagactacttaactggcatttcttcttcactgcgatgctttttgcgtatggccgtttccttagtcggcagcttgtcaacacggtgacttcagacaagttattgtacaagcttgtgagtggcttgatcaagtaccaaatgtttatttgctactttctttatatagcagggtttgtatggtttattctcactctaaagaaaaaggcgtacaagtatcaattcagtcaatatgcatggactcacatgatcctattgatggtatttgcacagtcatctttcactgtggccaatatatatgaaggaatgttttggttcctcctaccagcttctttgatcgctatcaacgatgttgctgcatatttcttcggcttcttctttgggaaaacacccttaattaagctctctccaaaaaaaacttgggagggctttctaggtgcatcagtgactaccatgctttctgcatttgtgcttgctaatttcatgggtcatttccagtggttaacatgccccagaaaggatttgtcgactggatggcttcattgtgatcctggctctatatttacaccagaaagttatgatttaccaggatggatcccttggcgagaagtggcaattatgcctattcagtggcatgccttagctcttggcttgtttgcttcaataatagcaccatttggagggtttttcgctagtggttttaaaagagctttcaaattcaaggattttggtgatagcatacctggccatggtggatttactgacaggatggattgtcaaatggttatggctgtgtttgcttatatctattaccaatcgtttgtgatggtacaggacttatctgttgagacaatcatggagcagatactgagaaatctcacgttcgaggagcagcatgatctttacgagcaactaggcaagttactgacgagagggaactgatgctaacatagagacatcatgcacgaaatcaacaggactatgtgcattgttttttttacttttagatcatcatgtacagccctaacaccctaaaaacaaaagaatgataacgcttaggattgttttttttttcctcgatcgatgtaagggtatgatgttttccgagtatacaggagtttgttcttgccttctctttgtatttttctttcggttttcatctttgtggctgcatgagaaggcaaatgaaggcccagtagcaaactagcagccatgacattttttttttctttcttgtcgtcgatgggttcttgacttcttgtactttgtagaacgatattaatcccattatttccttgctttatgggtgcact

SEQ ID NO: 9395 - DNA, 1270 bp, Oryza sativa
  ref <308>: DATABASE ACCESSION NUMBER: AK106743
  ref <309>: DATABASE ENTRY DATE: 2002-08-28
cacattcacagcgcagaccacacacgatctcactacaatagtgctagctacgacgagagtgtactaggacgatgagccaggagcagccgaggaggccgtcggagaaggcggccggcggcggcggcggcgagcaggggatccggtatggcgacgtgttcccggtgaccggaagcctcgcggccaagcccatcgccccgcgggacgcggcgacgatgcagtcggcggagaacctcgtgctggggaagacggtcaagggcggccccgccgccgccatggagtccgcggcgagtcgtaacgaggagatgggcgtcgtcgggcatgaccaggccacggacgccgccgccgagcagggcgtcaacgtctccgacaccctcgtccccggcggcggccgcatcgtcaccgagttcgtcgccggccaggcggtgggtcactacgtggagcaggacgatggcgccgccgtggttgcaggagtcgtcggcgccgcccccggcgcggtacgggtggaggaacctgcgaagataacaatcggcgaggcgctggaggcggcggcgctggcggcaggagggacgccggtggaacgcagcgacgcggcggccattcaggcggccgaagcaaaagccaccggcacggacacctacatgcccggcggcttggcggcgcaggcgcagtccgccgccgtggccaacctctggacggcgcgcgacgccgacaagaccaagctcggcgacgtcctctcgaacgcgacggcgaagctcgcggcggacaaggaggtggagagcggcgacgcggcgagggtggccggagcggagatgcgcaacaagcccggcgcggcggcgaggccgggcggcgtggccgcgtccatggccgcggccgcgcgcctcaaccgcggcccaacgacatgagtggatacgatccacgcatcgatccatgtgtatcaaacagctcgtgtcgcgacgcgagcgcgatgtaaaattaacacgcttcggtgtacgttttatatgcttccatcccttctagtttccgttgttgcattgcatatggccatatgggtggctgaagctatgttagaatctgtcagaagccgtttcttttcagttagcctgtagctgttctctagctagttctttggttcggttggactgaattggatcgtgggagtacggtcaggagtggatccagatcaatcaggtgttttttttctgttatgcatgtaacaaagtctgtaatcgaggagaataaatagaaaaaccagaaaagcttacgctgcacc

SEQ ID NO: 9396 - DNA, 1705 bp, Oryza sativa
  ref <308>: DATABASE ACCESSION NUMBER: AK106744
  ref <309>: DATABASE ENTRY DATE: 2002-08-28
agctgcttggccgtcgcgacgcagccgcgtctgttcgatcagttcagctcgcgcggttttaggtggggaggaatcctgttcgatttcgccggttgcttgtggtttcgtgtcggaggcgggggcggcgatgatggggaggtcggtgctggagatggtggtggcggcggcgcagggcggcggcggcgcggcgggggagtcggtgttgggcatgttcaggtacgccgtgctgcccatcgccaaggtgttcgtcgtctgcttcatggggttcctcatggcgtccaagcgcgtcggcgtgctcaagcccagcggccgcaagcttctcaatgcgcttgtgttctctctgctccttccttgcctaatatttgcgcagctcgggagatcaatcacaattgacaagatcatggagtggtggttcattccagcaaacattgctctgggtgcagtctctgcatctttggttggacttatagtggcattgattgtacggccgccttatccatacttcaagttcaccatcactcacattggaatagggaacattggaaatataccacttgtccttatctcggcattatgtcgcgaccaattaaatccgtttggtgactcgaacaaatgtactcaagatggaaatgcatacttatcatttggtcaatgggttggtgccattattgtttacacatatgtgttcaagatgcttgctccaccccccgggcagacctttgacagctgcgatgaggagagagataaacttccaattaaggctcctaataccatgtcaagtgtagcgaaatatccatcaagtgctcatggcaatacacatgaggaagagcccctgctatctatagaggaggaggaggaggaggaggggcaggacgttcattctttaggttcaaaaataatgattcctatcaagggcatggttagattcctacaaaagaagcagctcctccaaccaccaatcattgcatctgttcttgcaattactctcggtgttgtgccattcttgaagaatttgatcctcacagatgacgcgcctctattctttttaacagatagctgtctcattcttggggaagctatgattccgtgcattttgcttgccgttggtggcaatcttgttgacggccctggtgaaggaagtaggagacttggggttcggaccaccgtcgcgattatatttgcacgcttgatattggttccaattgctggtattggcatcgtctcatttgctgacaagcttggatttattccaaaaggagacaagatgttcaagttcgtcctgttactgcagcactctatgcccacatcggtactatcaggtgctgttgcaaacctaagaggttgtggcaaggaatcagctgcaatcttgttctgggtgcacatttttgctgtcttctccatggcaggatggattatcttatatcttaccatgctgttctagatactaactgcactatgacataatatgatatgttcatgaaatacatgttgctgcaaagtgcaaggtgattggaagtgcgaccctgttggatctgcgggttgcattttccgggccgtggacaattgcgagaggcctgctattgtatgttttgtttggttagctgctgaaaacaatagatgaggcaaaggaattgtgtcagcacctcttgtacatttgatcgtaaaatgcaggatatctccaactaatagagagccttgtatcccc

SEQ ID NO: 9397 - DNA, 1614 bp, Oryza sativa
  ref <308>: DATABASE ACCESSION NUMBER: AK106745
  ref <309>: DATABASE ENTRY DATE: 2002-08-28
tggccacaactcgaccgtgttcgccgagaaaccaagccacggtcaccatggcgcacgccggcgatgccacggcgccgctcctctcctcgccggccaagcccggcgacgagccccgccgcaacatgtacgccttcggctgcgccaccctcgcctccatgaccaccatcctcatgggctacaatctcgcgctgatgagcggcgcgcagctgttcgtccgggaggacgtggggctgagcgacgcgcagatcgaggtgctcgccgggtcgatgaacgtgttcatgctcgtgtccatcctcgccgccggctgggcggccgacgtgctcggccgccgcggcacgctcgtgctggcgaacgcgtacctcatggccggcgcgctcgccatgtcgctcggcgccacctacgccgcgctcatggccgcgcgcttcgtcaccagcgtcggcgtcggcttctccctcgtcgtcgcgcccgtgtacaacgccgagatctcgccggcctccgcccgcggcgtcctctcctcgctgctcgatatgttcgtcaacgtcgggatcttgctgagctacgtgtcgaactacgcgttggccggattgccggtgcacgtcgggtggcgcgtcatgtacggcatcggcgtgctcccgccggtgttcctcgccgcgggcgtgctcgccatgccggagtcgccgcgctggctcgccatgcgcggtcgccacgccgacgcgcgcgcggtgctcgtgcgcacctccgactccgtcgaggaggccgagctccgcctcgaggagatcaagcgagccgtcgaggcgccgcaggagtccgccggcgtcggcgtgtggcgggagctcctcctgcggccgtcggcgatggtccggcggatcgtcacctgcgttgtcggcctccacttcttccagcaagcgtccggcatcgacgccatcgtgctgtacagcccgctggtgttcaagaaggcaggcatggcgtcgaacacctccgtcctgggcgccacggtcgccgtcggcgtcgtcaagacgtgcttcatcctcgtcgccacgctcctctccgaccgcctcggccgccgcccgctcctgctcgccagcaccggcggcgtggccgtcaccctcacctcgctcgccctcgccctccgcgtcgcgtcgccgtccacggcgagcgccgcggcgtgcgtggcgtccgtgatggcgttcgtggcggcgttctccgtcgggttcgggccgatgacggcgacgtacaccgccgagatcatgccgctgcggctgcgcgcgcagggcgtgagcctcggcatggccgtgaaccggctgacgtgcggcgtggtgagcatgactttcatctcgctcgccggcgggatcaccatggccgggtgcttcttcctctacgccggcgtggcggcggtggcgtgcgtgttcgtgtacgtgcggctgccggagacgagggggcggagcttggaggacatggacgtgctcttcgccaagtgatcaacgtactatttcattactacattttttatggaagagtatgaagaatttatttattcttaactttgattttctccatccaagaagggacgatgtaacatttagcaaccaaaatgcattggaggtgttatcagtt

SEQ ID NO: 9398 - DNA, 1232 bp, Oryza sativa
  ref <308>: DATABASE ACCESSION NUMBER: AK106746
  ref <309>: DATABASE ENTRY DATE: 2002-08-28
cgttgtgttcagttgcagtttgcaaacttgcagtatcatcttcacttgtaagaactgaaaagatatcaatggctatcagccaggaggagcagcacgccggcggcgggagggactacgccgagccggcgccgcagccgtttcttggctcgtcggagctgcggcggtggtcgctgtaccgcgcggcgatcgccgagttcgtggcgacgctgctgttcctgtacgtgacggtggccacggtgatcgggcacaagcggcgccaggacgagggcggcgacggcgaggcgtgcggcggcgtcggcctcctcggcgtcgcctgggccttcggcggcacgatcttcctcctcgtctagtgcaccgccggcgtgtccggcgggcacgtgaacccggcggtcacgctcgggctgctcgtcgcgaggaaggtgacgctgctccgcgccgcgctctacgtcgccgcgcagtgcctcggcgccggcctcgtccgggcgctcaactcggcccacttcgcgcggcacggcggcggcgccaacgtcgtcggcgacggctactccaagggcgccgggctcgccgccgaggtcgccggcacgttcgtgctcgtgtacaccgtcttctccgccaccgacgccaagcgcagcgcgcgcgacagccacatcccggtgttggcgccattgcccatcggtttcgcggtgttcgtggtgcacctcgccaccatcccgatcaccggcacgggcatcaatccggcgaggagcttcggcgccgccgtcgtctacaaccagcccaatgcttggcacgatcagtggatcttctgggtagggcctcttgtcgggtccgccattgcgacgctataccacgagcatgtgctgagggcgagtactctcaaggcgttgggctcattcaagggcgccagacaatgagttcttggatcaagtggtgatcactaatcagctagccatgcctggattgaagtgcatccagagacaacgggctcagatggatgatgatgatgataatgctcatcctccttaaatgttgcacaagcacagtctttttttcttcctccatgctcctcccttttggatcatgtgctgtgctgtacatgaattagccattaaatgttgagaagctgtactgtacttgaattagctgttgtactgaattgggctttggatattttctccgaaacacaattgggtttcagtttttgatgagcaattttcattgtgatgttaacatgg

SEQ ID NO: 9399 - DNA, 1835 bp, Oryza sativa
  ref <308>: DATABASE ACCESSION NUMBER: AK106747
  ref <309>: DATABASE ENTRY DATE: 2002-08-28
ggctttgctttcgacgacggcacatgtagatcaacagaagcagatactgccactagcgcatattacacgcgtgcagatgtacgcctacgtggggctcgtgggcggcgcagctgcgctcgtgctgctgctgctgctgcggcaccaggcgcgcaggtggaggaaccctcgctgcggcgaccaactcccgccgggctccatgggcctcccgctcgttggcgagacgttccagttcttctcctccgacgcctccttggacatccctcccttcatccggcacaggctggctagatatgggccgatattcaagaccagcctggtggggcacccggtggtggtgtcggccgacgaggaactgaaccacatggtgttccagcaggaggggcagctgttccagagctggtacccggactcgttcgtggagatcctggggaaggacaacgtcggggagcagcagggcgccatgttcaggtacctcaagaacatggtgctcaggtacttcggccccgagagcctcaaggaaggcatcatccgcgacgtcgagcgcgccgtctccagctccctctgcacctggtccaccttgccggccgtcgagctcaaagaagccgtctccactatggtgttcgatcttgctgcaagcaagctgctcggcctggagccgtcgaggtcaaagattttgcggaagagcttcttcgacttcgttcgagggctcatctccttcccgctgtatctgccagggacagcttactactcatgcatgcaggggcggaggcgcgcgatggtggtgctagagcaagttctggaggagaggaagcaatcgacaggattgcagcgaggaggagaagcgcagcagcacggcgacttcctggattatgtgatccaggagatcacgaaggaaaagccggtcatgacagagaagatggcgctcgacctgatgttcgtgctcctcttcgccagcttccacacgacgtcgctggcgctcaccctggccgtcaagctgctcgccgaccaccctctcgtcctggaggagctcacggtggagcatgaaacgattctgaaggaccgtgaggcaggcagcgagctagatagaatcacatggaaggagtacaaatccatggcattcacatctcaggtcataaacgagacggtccgtttggccaacatcgctcctgtcatcttcagaaaggcacttaaagacatacggttcaatggatacacaattccagcaggatggggagtgatggtctgtccaccagcagtgcacttaaatccatatatttatccggatcctctcaccttcatcccttcaaggtttaaggataaaccagagataaaccgtggatcaaaacacttcatggcattcggcggaggactacggttctgcgttggagcagacttcagcaagctacaattggctattttcctccatttccttgtgacaaaatacaggtggataccgctgggagcaagcagggtagtccgaactccaggactagaatttcctgatggctatcggatcaaagttatccagagacattaacaaggcctaactccatcagcatccgaaaatactacaaatgctatttacaatggccagtatcaacaatataaagaaaacatgctcaaatggttccaaatataagtcaattttaggcttatgcacaagacttgagaaaataactctcatgcccttcatgtatactatcttgaaaaagacgacaaattttatttgtgagagggatagcattcttgttttttgagaatgacaggcatagaagaaaacataaacaatgtctagaattccaaaacgactttatgttgagagatgtacatttatt

SEQ ID NO: 9400 - DNA, 1206 bp, Oryza sativa
  ref <308>: DATABASE ACCESSION NUMBER: AK106748
  ref <309>: DATABASE ENTRY DATE: 2002-08-28
aaaggagaggtggaggagaggaggggaggggaggggaggtgagggacggagctggtgggtatgacgtccggggcggcggcggcggggaggacgccgacgtggaaggagagggagaacaacaagaggcgggagcggcggcggcgtgccatcgccgccaagatcttcacggggctccgggcgctcgggaactacaacctccccaagcactgcgacaacaacgaggtgctcaaggcgctctgccgcgaggccggctgggttgtcgaggacgacggcaccacctaccgcaagggatgtaagccgccgccatcgtcggctgggggagcgtcggtggggatgagcccctgctcgtcaacgcagctgctgagcgcgccgtcgtcgtcgttcccgagcccggtgccgtcgtaccacgcgagcccggcgtcgtcgagcttcccgagccccagccggatcgacaacccgagcgcctcctgcctcctcccgttcctccgggggctccccaacctcccgccgctccgcgtctccagcagcgcgcccgtcacgccgccgctctcgtcgccgacggcgtcgcggccgcccaagatcaggaagccggactgggacgtcgacccgttccggcaccccttcttcgcggtctccgcgccggcgagccccacccgcggccgccgcctcgagcacccggacacgataccggagtgcgacgagtccgacgtctccacggtggactccggccggtggatcagcttccagatggccacgacggcgccgacgtcgcccacctacaacctcgtcaacccgggcgcctccacctccaactccatggagatagaagggacggccggccgaggcggcgcggagttcgagttcgacaaggggagggtgacgccatgggagggcgagaggatccacgaggtcgccgccgaggagctcgagctcacgctcggcgtcggcgcgaaatgacggccattattgccgagcaaaaaagatggttcctttcgtggacctcgagcaccagctgatcatggttgttgttagatcagtactggtcaatgtgtatgatcatgactacgcatcgatgctgcgatttgggcgatttcattctagccttaggttaatcttgttgttcaattcattcttcctggacttgggaaaaaggaagcagggaaaaattgttcatcacggctgattttattcacggcttcactgttc

SEQ ID NO: 9401 - DNA, 1688 bp, Oryza sativa
  ref <308>: DATABASE ACCESSION NUMBER: AK106749
  ref <309>: DATABASE ENTRY DATE: 2002-08-28
atgcacgaaagtagcatgatgtggcgcttacgtggcagtgatagacgtatcccggcgccgccgtggcgtcgaaggggtagggcatgttgttgtggacgagcctgaacgccaccaccaccgacgtgacgtacgccggcgggatcttcacgacgttcttccacgtcttctcctcctccggcaccggctgcagggccccgacggcgtgctggtcgaggttgcaggcgaaggtgtcgttgtgcttcagcatgcagctcttgaaggtgtccgggtcgacgagctgcagcatctggacggcctggaactcggcgaggtggaggtgcagcgggtggttgtcgggggtgaggttgatcacgtgccacagctccgtcgtccccgatatcggcgtctccgtcggcggatcctccagccggagcccgttgatgtagaggttcatcgtcttggcggtgttcgggtcgttgctcgtcatgttctcgtacaggacgatgtacctcgtcttcatcgtcggcggcagcgccgtcaccttcgcgaacggcacaccgatctccggcaccaccgtcgagttttccggctcctgcatcggcatgtcgtcgccgacctgccacttggcggagacattgaacgccatcaccttgccgtcgagtgtcgcgttcgccggagtgccggtggggaacgggtagggcgccgagttgagcaactcgatgtcggtggcgttggggttcaccacgagggagaagtcgacgatgacgtcgaagatctcggccggggagaggaggaggttggagacggtgaccgggcgggagaggtacgtcgcgtcggaggcgatgacggtgaaggggagaccattggagaacctgatgttgaggtacctcgcgttgctggcgttgaggatgcggaggcggtagcggcggcgctggacggcttggaacggccacgccttgccgttgacggtgatgacctcgccgaagtactccggctgccactgcgggtggacggatggcacggcgccgacggtgtccatgaagatggtgccgtcgacgttgaacttgcggtcggcgatgacgaggtggaggtcgaactcgccggaggggaggttgaagggcatctcgagctcgggccactcgacgatgtaggcggcgaggaggccggcgaggaggctggcgcgggtgaggccgagggcgtggtcgtggtaccagatgttgccggccgccggctgcacgttggggtaggtgtaggtcttctgcgtccatgtgctgccgttctcggcgaagtcccgggtgaaccaggcgaaggcgtggccgtcggaatcgggggcctgggcggcgccgtggaggtggacgacggtggggacgccgccgttcttgggaatggcggtggggacggtggggtcccacgggaggatgtgggcgtcggggaggtggttctcccacgtcacgtagagcggcacgttgtagcgcgccacgatggtgggccccgggaacgtcgccgtctgcagcgactgcccgtacacgaacaccggcgtcggcggcatgtcgcggtggaattgctgcacatatacatacattgcaaacgatttgtttaacatttcaacttaaatttaaactgtattgtacactttttgttgtttcactgttcaaaaacgaggcttgacattcgttcaaaaaaaaaacgaggcttgaccatgaatatct

SEQ ID NO: 9402 - DNA, 1866 bp, Oryza sativa
  ref <308>: DATABASE ACCESSION NUMBER: AK106750
  ref <309>: DATABASE ENTRY DATE: 2002-08-28
gcggaccaccgcgcgcgagcagagcatctcctcactctctagcttgctccagtttcgcgtagctgcgtgacagttcaattgaactctctggattcgttggttacttcgtctgagctgctgcagcgttgaggaggaggaggagcaatggcgctcacgacgttctccatttcgagaggaggcttcgtcggcgcgctgccgcaggaggggcatttcgctccggcggcggcggagctcagtctccacaagctccagagcaggccacacaaggctaggcggaggtcgtcgtcgagcatctcggcgtcgctgtccacggagagggaggcggcggagtaccactcgcagcggccaccgacgccgctgctggacacggtcaactaccccatccacatgaagaacctgtccctcaaggagctccagcagctcgccgacgagctccgctccgacgtcatcttccacgtctccaagaccgggggacatctcgggtccagcctcggcgtcgtcgagctcaccgtcgcgctccactacgtgttcaacacgcctcaggacaagatcctctgggacgtcggccaccagtcgtaccctcacaagattctgaccgggcggcgcgacaagatgccgacgatgcgtcagaccaacggcttgtcgggattcaccaagcggtcggagagcgagtacgactccttcggcaccggccacagctccaccaccatctccgccgccctcgggatggcggtggggagggatctcaagggagggaagaacaacgtggtggcggtgatcggcgacggcgccatgacggccgggcaggcgtacgaggcgatgaataacgcggggtatctcgactccgatatgatcgtgattctcaacgacaacaagcaggtgtcgctgccgacggcgacgctcgacgggccggcgccgccggtgggcgcgctcagcagcgccctcagcaagctgcagtccagccgcccactcagggagctcagggaggtggcaaaggtaaggcctcacaagcgttcaacgctcacgctcgattgcccactgcccagaaaggcacgtgaatgaaaaagaaaagggaagacaaaaaaacaaaaaatagtgtcgccggataagcgtataactactacgaaatgcgccaaatttttaacgggttttagaatgaaaccgtctagtttttacctaaattttaaggacacgttcgcttgtccagagagcagaggggccttacgaaatttgaaggcgaccgtggaaattagtgaggaaatagtgacaatttaacttgcgtccagcagcagcaatcaacagtgttaagagtacgccgttagcaaacgtgtcagtgtctcgctcgctttttcaatttcaattgcatgttgtttgatgcttgcgtcgcatacattccaaaataagctgtgtcagacatgggctagttatacgtgtctcgcatggatccactcaccacaaaagaaaatggcgatgaaatctatatgcttcagtcaataaactagtaggagtactattatagagtacagtagtaccgcacacaaaccataacacatttgtcctttacaaagcagcttaagccagtatctcaacaagtttgagacgtctcttaagaaccaaaatattagagtatttcaagagtacaattggaccatactgcgtgttctctatgcacgcttgaaacataggcatcagattaatcctgaagtacaaacacacgcataccccactgaagcatatacatgttttctatgtcgtccaatcttttcctttttacggattcaattatcaaggacatgctttcaaagcttctaaacggtccaattttttaaaaaagttctacatataaatgtaatagttaattcattc

SEQ ID NO: 9403 - DNA, 705 bp, Oryza sativa
  ref <308>: DATABASE ACCESSION NUMBER: AK106751
  ref <309>: DATABASE ENTRY DATE: 2002-08-28
atccacctctctttctctctaccttatctcttctcctcttctctccggcttcccaccggtctcctccccggctggcttcccctcctccttccccctcccctgggcgaggcggtggctgggcgcggcggcggcctgggcgacggctgggagtgggccgacgacgacgaacaggccagaaggcgagccggccacggcagcgagtgggcgaggcggcggctaggcgagccgggcgctgggaaaaacacagagaaacatgtagaacaaagggctgcaagattcctgccaactacagtgaaggcagggatgtggcggctgttaacactaatcatgacttgtacatgtattagaatattttgcatgtgttgtcgtgcatagatcggtaaaggttcgcgcgtgtgttgcatgtaggagttaatttaattagtggaataactagatgcatggaattagcaagtagttagttagttgtatgcgtgattaggtggtcaggctggtagaccgcttcatgtggatcatggagttagtgagtctgttgtgcatgagttcgtggctcgtgcaggccgtgcgtacgtgcgcgtatgacctggggagtaggcgctcccgtatgtgcatgtgaggaagactagctagctatataagctatgtaatcatctgtttacgtgtgtgttaattaacaaagaaaagaggaaaggcattagttgccgc

SEQ ID NO: 9404 - DNA, 2218 bp, Oryza sativa
  ref <308>: DATABASE ACCESSION NUMBER: AK106752
  ref <309>: DATABASE ENTRY DATE: 2002-08-28
acacccgccaaatccaccaccgtctccctcctcgcctcgtcccccggcaggcaaggtcggcacgcaccggccacccacccccattcccagatcccccggcgccgccgcggccgcgccattcgccgattgcgtcggcgtcggcattccgtgtcgcgcgccgcaatgccggcgtcgtcgtccttgtaggttgccagccacagccaggtaggtaggtgggtgcgcgcgcgcgcgccgcgggcggagccgccgaggaggaggagagagatcgctttggcgcgcgccgtggtggtggagggatatgcattccaagcccgagggggacgcggcgtcggcggcggcggcggcggagggtgggtccccgcgatccggctacttccggcagcggagcatgtacgccgcggatccggacggggtcggcgccgccaccccacgcaaggcgttcgacgtggagaaccctcccggcggcgccggggggctccgcccgagcgagtccgtcaccaagctggagtcgctggagcgtgcggagcgcgccgcgctggcgcccgcggtggtgctcaagacgggcttctacatcctcgtctggtacgccttcagtacctgcctcacgctatacaacaagacgctgcttggcgacaagctgggcaagttcccggcgccgctgctgatgaacaccgtgcacttcgcgctgcaggcggggctctccaagatcataatgctgttccagaccaaaggggtggagaacgcggtggagatgggatggaaggattacttcatgagaggtttgtattcgtgccaactgctctgggaacagcattggacatcaacctgagcaatgcgtctctagtgtttatctcggtgacatttgctaccatgtgtaaatcagcctccccgatatttcttttgatgtttgcttttgcatttaggttggagagtcccagcatcaagcttctaggaataattgtagttatctctactggggttctcttgacagtttcaaaggagactgagtttgacttctggggattcatttttgtgacacttgccgctgttatgtcaggatttcgctggtccatgactcagatactgttgcaaaaagattcttatggtctaaaaaatccaatcaccctgatgagtcatgtaaccccagtgatggccatagccaccatggtactctctctcttaatggatccttggagcgattttcagaagaacacatattttgatagcccgtggcatgtcatgcgcagttttttacttatgcttgttggaggaaccttggcctttttcatggtgttaacagagtatgtacttgtttcagcaaccagtgctataactgtgacaatagctggggtagtaaaagaagctgtaaccatcttggtcgcagtattttatttccatgatgggttcacttggttgaaagggcttggtctcgccaccatcatggttggagttagcttattcaattggtacaagtatgagaaatacaaaaagggtcacataaatgaggatgaagttaattcaccttcattcgatggagatgccaaatacatcattctagatgacttggaggaccaggatgagtttcaggatgaagatacataattttgcaatgtggcaacattttaactgtcacttggatttttatgccctgaaaccattcatgtctgcttattgattgaaactataagtacttatggatgtttccacttaaacgaggtgtcacggacaagggcactgctagacttgctgatgttctgcaaccaaacttaaaaattatctgccggagcttgtccgtctccaaacaatgaaatggtttctcacttctcatccttcattaaatagccaggcaaactaagagctaacttcatcgaaatccccatttttgagaagattggcagcagttgaaattgttatggctgtttatattggtattgcctgagaatggacgtcatttacgtgtttttcttctctttgtgcgagctggaacatgcacatattcattcttaaacctccacatttttggtgcctaggaatattcattctatatagatcaaattgtaagagttaccacacatacctccatatttgctgttcccttgaaagttagggagcagccttttgattgtttgtatttgtagaattgtagcatgttatatactgtaacttgtactgtaacacttccagtctacttggaatcacaagttttaaatttgtgtgt

SEQ ID NO: 9405 - DNA, 1624 bp, Oryza sativa
  ref <308>: DATABASE ACCESSION NUMBER: AK106753
  ref <309>: DATABASE ENTRY DATE: 2002-08-28
agcctcaacacctcaccagtgcaccaccccaccaaccacctctcgttttgcatttctctgcgctcgctgtcgctgccatggattacggaggcggaggcggaggagatggtggtgtgcgcggcggccccggccgcggggaggcggcggtgggggagcacagccgtaccggcccaccggcgtcgtgtggccgccgccgccgccgggtagcacccctgtcaccgtccggaggcctccaccgtcgacctcgccggctccgcaggcggcggcttcgtcgtcgtcgacgtcgacaccggacaagctggtgaggcagaaggcgatggagatcgcgctggcgccacccgccgcggcctctccagatggtgaggcgctggcctcggacaatctcgcgcagataaaaacagcattaggtggggtttgcattgaaacaaatcatcaggatgataaaatcagaagattttctgttgacaagaatgggacaagatgctgcctagactctagcagtgagtctggaccatggtactccaagaagcttaataacaagaagggagtgactggaatccttagtcaatggcacaagcagacggaacagaaagctcatgaggttgttatctacaaacgttgtactgcttctggatctgcagttactctttttcttattatgatgagcttggtttgtacggtgagaggaagcaaccatggaactgattgcgacatcggcgagtactcaacgagcattgctcaagtttgtcagtatggtgctcctcccgcagtgtgttgcgaccttttacaatccgctgtccacacttgtggcaatgctagtgttttgtgtgaaattggcagatctgtgccaattacttctagaggtttcaatgttcatgatgttatggattggcaccgagagtgcacgggtcaaccagaatcatccagtgtagatgcatcgtccatttgttatgtatcaggtgaaaggcacaaagagggcacaaaagaagagggccatcaagtaaatattttgattgagaccggtaacaaggagtgcaacgcaaggaagtcaacttctactaatccgatgtttatcggtttaggaattgggtttggatcggccatgctctttgctttcgcgctggtggtgatttggctgttcgtgagaaggcgatcacaaggaggtcctctggtgccgcagattagcttgctcgcaatcgcgcctcacttctcccaagggcttcctgcgctgcccttccaagagcatcctgcgctgacgcttccctgcgggcctgtccctgtcccgacacctcaagaagttacaacagtgcagccagccaccagtgcatatggtcagccagcgccagtgcagccagccaccactgcatatggccagccagtgcaaccagccaccaatccaatggcgtacttggcatcagtcgtttcctatgcgattgtagacagacttactagccgccgtcgtcgctagtacttgtgtttgtctctcctcatacttttttacaactttcttctcatacttgagacaactattgagtttgatgatttagaatacttgagatgaccactgaacaattccggttactgtaaaatttgagacagctagtgagtgctgatgatttctgtt

SEQ ID NO: 9406 - DNA, 1756 bp, Oryza sativa
  ref <308>: DATABASE ACCESSION NUMBER: AK106754
  ref <309>: DATABASE ENTRY DATE: 2002-08-28
gtacgtactacagaaatacaagtgctaacttagcttattagcggataatccccccagcgagcgagcgagcgaggctgctgctgcgaaatgatgacactgtcgacgtcggagcggcagccgcagccggagaagaagccgccacggacgaggccgccgctgccaggcaaggccgtggccgcgctgtgcgtggcgagctttgtcgtgggcttgctgctcagcggccgggtggtggtgccgttgctacctccgggctcgtcgtcgccggcgagcaactacaagacgtccttctctactggctgcgagaacaaacgcgctaagctaggcgagagcaatccaacggacatcatgaacgaggtgtccaggacccaccacgcaatccagtccctggacaaggcggtgtcttctctggagatggagctcgccgtggagcgcgctcggagcagcgccgccgtcggcgccggcacggccgtctcatccctgggcccacagaaggccttcgtcgtgatcggcatcaacaccgccttcagcagcaagaagcgccgcgactccctccgcgacacctgggtccctagaggggataagctgaggaggctggagaaggagaaggggatcgtgatccggttcgtgatcgggcggagcggcgcggcggcggcgggcgacgggccgctggaccgcgcggtggacgcggaggacgccgagaacaaggacttcctgcggctggatcacgtggagggctaccacgagctgtcctccaagaccagggtctacttcaccaccgccgtcgccacctgggacgccgacttctacgtcaaggtcgacgacgacgtccacgtcaacctcgggatgctgacgagcaggctggccaagtacaggacacgaccgagggtgtacgtcggctgcatgaagtccggacctgttctgtcgcagaagggagtgaagtaccacgagccggagtactggaagttcggggacgaggggaacaagtacttccgccacgccaccggccaaatctacgccgtttccaaggatctcgccgcctacatctccatcaaccagccgatcctgcacaggttcgcaaacgaggacgtctccctcggcgcgtggctgatcgggctcgaggtcgagcacgtcgacgaccgcagcatgtgctgcgccacgccgccagattgcgagtggaagaagcgagctgggaacgtgtgcgtggcgtcgttcgattggtcgtgcagtggggtctgcaagtcagtggacaggatgaagcacatccacagggcctgcggcgaaggccagggagcagtctggagcgtcgctacgtgatgatcacatcatcagctttaatcgtagcattaatctttggttttatgatggtgcaaagcagctagcgggcgacgaggggactagtttaactgaatgatcgattgtttcagatgattaggaaacgagccacgtagaatggatgaacgtgcatgatggtggaaaatggaaatgcatgggtggtaactgtaaaagtgtaaaggctttagcatccaatttccagggggagttgggtcatgccatatgcttcacttattaatcacagctctttctgcatttttaagggctccttcagaacgcaagtttttttttatgattagttgaattcttatagtcaccctttatatagttcgtttacctttcaaaaagtgcagccgtgagatgtaatttctactctcaaactaaaaaaaggctgaaggatgcagaaggaactttcacatgaatc

SEQ ID NO: 9407 - DNA, 998 bp, Oryza sativa
  ref <308>: DATABASE ACCESSION NUMBER: AK106755
  ref <309>: DATABASE ENTRY DATE: 2002-08-28
aatgcatcagtaaaccagcatattacacggatcaaatcattagccagctaattaacatgacatctccagttaatctgccgcatcatcatcacttgcgctgcagattacacgcagccgctgctcttctccatctgctggtcctcctcggtggaggaggaggagcagcaatggcgagggcgcaggcgatccccacgtcgtgctgcggcatgttcgaggggctggacctggcgccgtgcctgcaggacgcggtcgccggcgccggcgccggcatcggcatcgcaggagggaacatcagcggcgcctgctgctcgtcactgaaccaggcgctcgacgccggccaccgctgcctgtgctcgctgctgctgccgtcgaacggcggtggcgccggcgtgcgcgtgctggccagcctcgccgcggcgctccccacgctcccgctggcgctgccgctgcctggatgcctcctctacgctccccctgtcctgtcttgccaagtgccggtgcaggagcagacggacgcgccaccggcagcaacagaggcagcaaccgcgaccgagaccaccgtcgattcaccaccacctcaggccgtcgtaatgcctccatccaagaagtcgaagaggagcgccgacggtgagaatgctgatgacgatcaggggatgaacgggaactatggcaacggctacggcagcggcaacggcaaaggcaacggcggagctaagaagaagacagccagccgcagcgaagcacgccggcgtaccaacgtcgacgaggggatcagaacacacctcctgacgtttgtggtggtcatggctgcattttggttctcaattatatgatcagttaataataggcttgtaactgcaaagttcaggtaaatagtgtataggcttgcccctttggtcatggagcataatatgttctccaaaaaaaaaaaaaactatgaccactaatttttgtaacagccaatgacatcataatatatgaaggcatctctccagacg

SEQ ID NO: 9408 - DNA, 2415 bp, Oryza sativa
  ref <308>: DATABASE ACCESSION NUMBER: AK106756
  ref <309>: DATABASE ENTRY DATE: 2002-08-28
aatcgaagccgccgcgccgcaacaccacccccagacgggcagccgcgcgcgcaggaggaggagaggagctcgctccctttgccctgcctagggtttcgtgccaccccatctctccttcccccaccccacccgcttcctcgattcgatcctccgcttccccccgatctgggcggcggcggctttggcggcggaggtgttgatgaggcggtagatcaatgggcgcgatgccggcggtgaaggtggaggaggaggaggaggagcggaatccggtggcgtcgagcccttcggtctcggaggggagcgcgcacgccgccgcgctggcgtcgcccaccgcggcggattccatcttcggtcgcaggcgaaaaagtgggccggtaaggagagctaagggtggctggacaccagaagaggatgaaaaattgcggaaggcagttgatatttataatggcaaaaactggaagaagatagaagtacaatgtctgcatagatggcagaaagttcttgatcctgaactataaaaggtccatggacccaagaggaagatgatgtcatcatcaatatggtaaagaagcatggatcaaaaaaatggtctgttatagcaaggtcactaaatggtcgaattggtaaacaatgccgagagaggtggcataatcatttggacccacaaataaggaaagaagcttggactgttgaagaggagcgtgtgcttgcccgtgctcattgtatgtatgggaataaatgggcagaaattgctaaacttcttcctggaaggacagacaattctataaaaaaccattggaacagttcattaagaaaaaaaatagatgactacaataccagagatattctgccagttcatccaccagttgttggtgatggtttgaaacagttaccaaagcggccacctgctgacaaccattttgacttaaacaaagagccaattatctgttcaagagaccgcttaggagtagttcattctgaccctacctctcatcaacgggcatccaatttgaaagactttaagggctgtgcagattacctctcacttggtcagccagtaacttcatgtgaggcttctgcagctgatgattctgcttttgatctagcaacacagggaatgagaatggattctgttcatgacaagggtactgggaacaattttgtttgtgggaaggttcagggaatcaattttcttggtgacaagggacttaaaattaatcagatatcagataaaatgggctgttcaagacaagctaagagagaaggtgaagcagccattaatggcggcggatcatccttgcagagtgaggctcactctgttggttctctttgttatcagatatctaagatggaagacattgctcctgcccaatccccagtgtttacagcaaattatgtaccggaacactctaggaacgtaatgcactcacccaatggctatactactccacccactcatggaaaaggatcagatcagcttagtgttgaatccatattgagaagtgctgctgaaaaattccatggtactccctcaatactaagaagaagaaaaagagataaaccgacgcctgctgaagataatgatttgaagattggcagattaagcagtgatgacttccacactcccataggaaagtgtactacagatagcccacagtcattcaaaactgcagcacttttgtccttgggtcctatggatgagcaagggagtcttgatgtttcccctccatatcgactaaggtcaaaaagattggctgtcctgaaaactgttcaaaatcatctggatttttcatctgatgaaatgagcatttgtgatactacaatgaaatctgcctgcgggaattctgattgtgctaatgccagtagtggtgtttcaagcattcaagggaagaaactggatgagcatatgattggattggaaactttaaccatgaactttgcgcatacgacaaagttggatgctacccaacctaatttgtagcattcagaaacagctagcgatgtgctgaagtgggcgaggagacctgatgcgtctaaatttaatgttgtcactcttcctaaaggcaaataggaaacacattttcttttttttgcagttcgtttgaattaccaaggtacaggagagtcaccatttaccaaccctaccatctctccttggtgggctgtacaaagccatctccattttcgacagaaaatatgttgctactgtaagctcacagttagcaattcaatttttaaaggctcacaactcacatctgtgtagaaagaacaatcagttatagaaacttatcaaagtttttcctttttttgaactgcagaaacatttaaaaagtttatcaagattccacatacttttttttcctttatatcatcgtggactcttatgagccttgaaatgagatgattggtcatgtt

SEQ ID NO: 9409 - DNA, 1031 bp, Oryza sativa
  ref <308>: DATABASE ACCESSION NUMBER: AK106757
  ref <309>: DATABASE ENTRY DATE: 2002-08-28
gcaaaaaatggcggccatctccaccaccaccaccgccgccgccgccgccgcgtcatgggcgtctacaccttcgtgtgccggagctccggcgaggagtggacggccaagcagctcaagggcgagctcgagggggaggggcggtggggaggacgaggagcctgacggaggaggacctggaggagctcaagggctgcctcgacctcgggttcgggttcgcctaccacgagatccccgagctgtgcgggacgctcccggcgctggagctctgctactccatgacgcggaggttcctcgacgagcagagggcgcccgggcaggagccggagtcgcccgccacgccgccgctccccaactggagaatctctggccccggtgatgacccaaaggaagtgaaggctagactgaagtattgggctcaggcagtggcatgcactgtgaaactctgcagttagtggtggactggtggttggctgtctgctggttcatctcataatgtctatcctactgacgggaggaaatgtaggtggttgaagttgaagaatttcacttatatggttttgaggtcaggtgagcaaatacactgatgaggtgcttatgcctcgtgttatcgaggcaacacgatcgatcagttatttcgcaaaacttcaaaggggagactggtcaccccacggaacagcaagaaaactcaaggtgatccgtggtccgagcttttctgaaggcatcagaagcttgtcattcctcatggaggtctctgcatggtgcagggtttgcaactgcgagacctgctagtttttgctcttgtcatgatctttaggagcaccaattgctgtactgtaccgggtggggcgggggtttggctgatccatgggtggatcagtttcagtatggctttgttctgatattctgtttaattttcatttgctttgaagtagaagattctgctatactgcaaagtttgcagatagtatgctccgaaaaatgatttatccatgcagtctaacaataaactgtagctgctgatattgtgtagt

SEQ ID NO: 9410 - DNA, 3740 bp, Oryza sativa
  ref <308>: DATABASE ACCESSION NUMBER: AK106758
  ref <309>: DATABASE ENTRY DATE: 2002-08-28
atctttgggaaggcgagccatggccgaggggagcacatagtcagaacaccgcagagcaagtgtgtgtcctgcctcgcgtgaaagataagcggcgctctgctctgctcgccgaggagagagagaagagagagagagagagctagagatggcggcggcctcagcggcggcgcaggcggagggaacggtgatcgcgatccacagcctcgacgagtggaccatccagatcgaggaggccaacagcgccaagaagctggttgtgattgacttcactgcatcatggtgcggaccatgccgcatcattgctccagtttttgccgatctagcaaagaagcacacaaatgctgtttttctgaaggttgacgtcgatgaactgaagcctattgctgagcaattcagtgttgaggctatgccaacattcctgtttatgaaggagggagatgttaaagacagggttgtcggtgctatgaaggatgaactggcgagcaagcttgagctacatatggccatgtagtgttatagtggattagtactgatatcctaaataaaacgggccttcaggctctgaaaggattagtgcctctgtctgtggtggttttcatatgcttctagtatcaagcattgttcttaccgttgtctagttcatggataatgccttgcttgatccaagtttgtgctttgaatattccaacaaaataatataacctgtgttttgcatatgatggttttctttcaggtgagatatcagaatgttggatccttgagagttgtttagctttcatcatgattagtgaagaaagttgcacatcaccattgtagtaatgtggcaaaccttgttaacttgtgaaaaaaaatgaaaagagtaattcatttggagtctcatttaaattgtttcggtaacaagagtagctcatgtcatcctcaaccatctcaagccactaaaccagtactccattactgggtggtccaaccctataagatcgtgactgtaatttgcacaattgattatttgtgttgattttgaaaccaatcttctctggttaaaatttactatttgcagtcttgcttctttgcctggtcacctccatcccatgcatcatacggtatgtagtatggggcatatccttttcttcactgggtgccgtttcactggtcatttggtcggcagtcttgaggctgctcctcactgatccaggcgtaaagataagctgatctgattgatatctgccaaactcacagacagaagaaaggttttagttctaccaagtgctgtactagtagttttgtgcaaccatgagagattcttgtcttccatggagtgccaccgccaagcagcagctatcttgcatcctactccacatcccatttttgttcttgcttcaatccctatctcatcaccttctcgcatggatcgaattcgataagaaatggagtaatcaagatcagtgaaagctaggggagagcttgagcttcttggccggcaatggcgccggcgcgcgggttcgtggagaggctgagcacggtggaagggcggctgctgcggctggaggtggtcgtcctcgccagcgccgtcgtcctggcggcgctggtgctgtacggcgccacccgccgccggagcagcgacaagctcctccgcggcgtgatgtggatggcctactcgctgtcctacgtggtggtgtcctacgccgtggggctgatccaggacgggccgttccgcggcgagacgttcgtgctgtgggcggcggcgctgctgctgatccaggcgagcgcgtacgcggcgccggtgcacagccgccgcgagttcagccagcggaagaagctgctgctgcagcacgtcctccagaccgcgctcgtgctctggctcatcgccaacgccaccggccggaacgccagctaccgggccgcgatctgggcgttctggtgcctcaacgtcctcaagacggtggccaagatcgtcgagatgatcaaggccagcatccccgaccagtccgtcaagctgatcgccgactacatggacgtcgaggagtcgctcgccggtgtcggcgacggcgagccgccggacccgacgacgatgaagggctacaggtacatcttccacggcgaggacaccatggtgccggcgacccgcgacgacatggtgaggcagagcgacggcaagtcggtggtcaccatcgaccgcgtgtaccggtggatcgacgacgagcccgggtacagcggcgtggagaaggacatggcgagggacttctgcctcgcgctcgcgctgttcaagctgctgaagcggcggttctacggcttcgtcccggcggaggccggctcgccgagggcgcgggacctcgtctgcggcggcctcatccggccggccgtcacggggcccgacgccgcgttccgcgtcgtcgaggcggagctcgcgttcctctacgacgagttctacacccgcaacgtcgtgctcgtcggcgccaggacctacgtctgcatcgccgccgccgtggccgggatcaccatgtggacggcgttcttcggcacgctcggcccgggctaccaccgcctccgcatcggcgtgcgcggcctcgaccgctccgtcacggtgctgatcgtcgtgatcaccgccggcctcgagctctgccaggcggtggccggcttctccagcaactggaggtacgtcaagacggtgtaccgctgcgtgcgcgacgaccagccgtggacgaacaggcggcacggccacctctggtggaaggagagcatcacgccgccggcgacgaggtactgggacgacaaggtcggccagtacgtgctcctcaagcggttcggccaccggccatggaacatcctgtcgtggctgacgctctacctggtggagccgcggcggcaggggcagaagcgcggccggaggaagcgctgccgcaggaggtccggcgagcggtgctcgtgtcgctcaaggcgagctacggccacctcaccaatggcgtctccacgctgcggaggcacggcctgacgccgcagctggagtgggcgtgcgcgttccccaagctcaccgaccagatcctggtgtggcacgtcgtcaccacccgcttagactggacgagcggcggcggccatggccggagccgccgccgcgacaacggcggcgacgtgaacagggtcgtggcgacgaagctgtcgaactactgcgcctacctggtcgcgttcgtgccggagatgctgccggacccgagctacaacgcggagcagatgttcgacacggcggtgcagcaggcgagggaccacctgggcggctgcaggacggagagcgccgtgctccagaggctgcaggagatcgaggacgaggagcggcgcggcgccgtgcgcgagagggcgggcagcgccaccgtcatcgagaaggcggcgctgctcggcgggcagctgagggcggccgtggacgaggcgcggcggtggcaggtgctggccgagttctgggcggagttcatcctgttcctcgcgccgtcggacaacgtggacatccacgccgaggtgctcggcgccggcggcgagttcatgacgcagctgtgggcgctgctctcccacgccggcgtcctggaacggccggccgtcgccgcgacgccgtcgccaccgacggtgtgatcagattgatcgatggttatgttcgagatcgtgcaagctagataggggatgcaaatttagttgctccatccatgaattcattttatattttgaaacatcattgaacgatttagtaattagtttgg

SEQ ID NO: 9411 - DNA, 1219 bp, Oryza sativa
  ref <308>: DATABASE ACCESSION NUMBER: AK106759
  ref <309>: DATABASE ENTRY DATE: 2002-08-28
cagctccaagctccaagaactcaactcactctctccgagcttagctctcactgtctcgccgcgcacacgtcgctctcactggcttagctgagctgagctgcattggcttctgcagtgagtgcaggagtgcaaggctattgagcttagaggtacaccagtggcattgtccatgtcgggcaggtcgtcaaggaggggcagcttctcgctgcggcagccgccggtggtggacatcggctgcaactgccgccggccgaagctgttctccatcttctcctcgtcgtcgtcctcgtcgttccgccgcggcggtagcaagcccaagtcgcccaacgcctcctccacgtcgacgaccacggcgttcacggccacgaccgggggcgccggcacggccacctccaccgactcctcgtggggccccgcgtcgttcaccaccaactcgctgttcgaggagccggcggcggcgcagcaggagcaggagcagctggagacgaggcggaggcggaggcagcagcgtcggcggcggaggcgggccggcgccacctccttcgctcggggcggcgatgtcggcggccacgacgacgagcagcagcagctgcaggagcaggcgccgtaccggcgcgtggcgaaggagagcgtggctgtggcggtggagtcggcggagccgtacgaggacttccgggagtcgatggtgcagatggtggtggagaaggagatctacgcgtgggacgacctcaacgacctcctccatcagttcctctccctcaactcgccgcgccaccaccctctcatcctccacgccttcgccgacctctggactcgcaacggcctcttctccccgccgtccccctgccagttctagccaagtttcaacgcgacgccaccatgcacgccatacttcttaatcgtgttaaccactagctatattactagtgtacttgttaccagcgctattgatagcgtgtctgtcgcctcagtttgttaactatctacatggtgtacgtagttcatggttgggagaggttattaacagagatcccagcgtgatgtggtgcatttccaacggtcttcgatctgctgaaaccaaagcacaaagaccgtgcaaaatgcaccattaattagctccagcagcttgatctgcttgatgtaatgacacgccatatgcccatgtacgtgatgtgtaatgatgcgcgcgcgtggcgccgtggtggtgtaatcatatact

SEQ ID NO: 9412 - DNA, 1505 bp, Oryza sativa
  ref <308>: DATABASE ACCESSION NUMBER: AK106760
  ref <309>: DATABASE ENTRY DATE: 2002-08-28
aatcataccatcacaaacaccaactgcaactggagtagatagcgctacctctctccgggctgaaagctactggccattatcattgttcttccagccatggatcagctgctggccctggcggtggcagtcccgctgtttgctcttgccagtgcacttgctgctgcctctgctacgccggtcaacaagtcctgcctcaatggtagcaccggcgccgccgtcagcatagggtacggtggtgccagcgctagcgctggcgccggcgccggcgtgtctcttggcaccgacgcgtactggttggcctgcccacttgccgaggagatcgtccgcgacgtcgtggagagggctgtcgccgccgacccccgcatggcggcgtccctcctccgtctccacttccacgactgctttgtcaatggctgtgatggctccgtgctcttggacgacaagccgttattcatcggcgagaagacggccgggccgaacgcaaactcgctccggggattcgaggttatcgacgccatcaaagccgagctcgagaacgcgtgcccggagaccgtctcctgcgctgacgtcctcgccatcgccgcgcgcgactctgtcgtggcatcaggcgggccgagctggcaggtggaagtcggccggaaggacagccgcacggcgagcctgcagggcgccaacaccaacctcccggcgcccacgtccggcgtcgccaccctcgtgcagaagttccggaacgttggcctctcggccaaagacatggtcgctctctccggcgcgcacaccattggtaaggcgcggtgcacgacgttcagcgcacgcctcgctggcgtcggcgcctcggccggcggcggtgccactccaggtgacctttcgttcctcgagtcactgcaccagctgtgcgcagtgtccgccggctcggcgctggcgcacctggaccttgtcacgccggccactttcgacaaccagtactacgtcaacctgctctccggcgagggcttgctgccgtccgaccaggcgctggcctcggccggagcagctgctgccggggcggaggacgtggccggcctcatcgcagcctacgctttcgatgcgttgctcttcttcgacgacttcgcatcatctatgctacggatggggaggctggcgccgggagcgggcaccgcctccggcgaggtccgccgcaactgccgggtggtgaactagctagctaggttgctgcatgaaacaagaaggaagctgattatgctcccaaaattaattaggagtatctgtgcatcagataattgcgccagctatatatgtatgtgtctgctagtttctcaatctagtcatgtatcgttaattagctaaaaagatgatagctggattatccattatcttaaaaaaaattaactaatggtgtctgatatttgatttgtttagttaatcagcttatctgatatatatatgactatcctgcatgtaatcgaataactatactaataaaatcgggcaagtcattttcagtc

SEQ ID NO: 9413 - DNA, 2025 bp, Oryza sativa
  ref <308>: DATABASE ACCESSION NUMBER: AK106761
  ref <309>: DATABASE ENTRY DATE: 2002-08-28
aaaaatgattcttcagttaccaatagctatcagctgatgcctctctcttccatctgttgatcactgccacagttcgtcagttagtttgaagcgatctcaggaagacagaagggcaagggtgatcaccacatgggaagaggagaccacctgctgatgaagaacagcaatgctgctgcagctgcagctgctgtcaatggaggtggcaccagtttggatgctgcattgaggcctctagttggttcagatggctgggattactgcatctactggaggctctctcctgatcagaggttcttggagatgacaggattctgctgcagcagtgagcttgaagcacaggtctcagcactgctggacctgccttcttcaatcccactggactcctcctccatagggatgcatgcgcaggcattgctgtcgaaccagccgatctggcagagcagcagtgaggaggaggaggctgatggcggcggtggcgccaagacgtggctgctggtccccgtcgccggcggcctcgtcgagctcttcgcgtcgagatatatggcggaggagcagcagatggcggagcttgtcatggcgcagtgcggcggcggcggcgccggggacgacggtggggggcaggcgtggccgccgccggagacgcccagcttccagtgggacggaggcgccgacgcgcagaggctgatgtacggcggctcgtcgctgaacctgttcgacgccgccgccgccgacgacgacccgttcttgggtggtggtggtggtgacgccgtgggcgacgaggcggcggcggcgggcgcgtggccgtacgcggggatggcggtgagcgagccgtcggtggcggtggcgcaggagcagatgcagcacgcggcgggcggcggcgtggcggagtccgggtcggaggggaggaagctgcatggcggtgacccggaggacgacggcgacggcgaggggcgctccggcggcgccaagaggcagcagtgcaagaacctcgaggcggaggggaagcggaggaagaagctcaatggccacctctacaagctccgctcgctcgtcccaaacatcaccaagatggatcgcgcgtcgattcttggagacgcgatcgactacatcgtggggttgcagaagcaggtgaaggagctgcaggacgagctggaagacaaccatgtccaccataagccgcccgacgtgctcatcgaccacccgccgccggcgagcctcgtcgggctcgacaacgacgacgcctcgccgcccaacagccaccaacagcagccgccgctcgccgtttccggcagcagcagcaggaggagtaacaaggacccagcaatgaccgacgacaaggtcggcggcggcggcggcggtgggcaccggatggagccgcagctggaggtgcgtcaggtgcaggggaacgagctgttcgtccaggtgctctgggagcacaagcccggcgggttcgtccgcctcatggacgccatgaacgcgctcggcctcgaggtcatcaacgtcaacgtcaccacctacaagaccctcgtcctcaacgtcttccgcgtcatggtgagggacagcgaggtggcggtgcaggcggacagggtgagggactcgctgctggaggtgacgcgggagacgtaccccggcgtgtggccgtcgccgcaggaggaggacgacgccaagttcgacggcggcgacggcgggcaggctgcggcggcggcggcggcggccggtggagagcactaccacgacgaagtcggcggcggataccatcagcacctgcattacctcgcgtttgattgatgatgatgattgattttaccatctacgtctcactactagtgtatacacactcgaattattcgagaaagaaacataatgctacgtactagtaataatggatttgataagtagttgtctagtatttgtgattaatggcatatatgcataatgacttgatgactgaaatgtggctagctagaattgtggatacttctatcgagtgtttttccacttttgttggaaaaacttttgcttgcc

SEQ ID NO: 9414 - DNA, 1726 bp, Oryza sativa
  ref <308>: DATABASE ACCESSION NUMBER: AK106762
  ref <309>: DATABASE ENTRY DATE: 2002-08-28
gagatgatgcagtcgtccatagtagtataacacagctagcaactcgcttaaaaaggcgaggacgcgcgcgtagacgacggagcgatcgatcgccgccgatcggcttggctgaaggcgagaaggtagggatggcgtcggtcgacttggagctggggcgacctctgtcggcggcggcggcggcgtaccctcctccgctgcggcggagcatcaacgacgacgacgttgacgacgacgggaagcccaagcgaacaggaacggagtggacggcgagcgcgcacatcgtcacggcggtggtcggctccggcgtgctgtcgctggcatggtccacggcgcagctcggctgggtcgccggcccggccaccctcgtcgtgttcgcggtcatcacctactacacctccgtgctcctcgccgactgctaccgcgccggcggcgatcaggtctccgggaagaggaactacacatacatggacgccgtcgagtcctatctaggtggtcggcaagtgtggttctgtggtctctgtcagtacgttaacctggttggaactgcaatcgggtacaccatcacagcatccatcagtgccgcggcggtgtacaagtccaactgcttccacaagaacggccactccgccgactgcagcgtcttcaccacctcgtacatggtggtgttcggcgttgtccaggtcttcttctcccagctgcagagcctccacgaggtggcgtggctgtccgtgctcgccgccgtcatgtccttctcctactcggccatcgccgtcggcctctccttggcacaaaccatatcaggtcctactggtatgacgactatgtctgggactgtaatcggaatagatgttgatttgtcgcacaagatatggcaggcactgcaagccctcggaaacatcgcgttcgcatattcctactccctggttctcattgaaatccaggacacgatcaggtcgccgccggcggagagcaagacgatgaggaaggcgaacgcgctggccatgccggtgatcacggcgttctacacgctctgcggctgcctcggctacgcggcgttcgggaacgcggcgccggggaacatgctcacgggcttcggcttctacgacccctactggctcgtcggcctcgccaacgcctgcatcgtcgtgcacctcgtcggcgcctaccaggtgatgtcccagcccgtcttcaccgccgtcgagtcctgggcgtcctcccggtggccccggtgcggcttcttcgtcaccggcggcggcggaacgaggctgatcagcgtgaacgcgttcaggctcgcgtggcgcacggcgtacgtcgtggcgtgcaccgcggtcgccgccgtggtgccgttcttcaacgacgtgctcggcctcctcggcgccgtcgggttctggccgctcaccgtgtacttccccgtggagatgtacatccggcggcggaagctggagaggtcgtccaagaggtgggtggcgctgcagagcctcaacgccgtgtgcttcgtggtgacgctcgcctcagcggtcgcgtccgtgcaggggatcgccgaatcgatggcgcactatgtaccgttcaagtcaaagttgtaaaggaaaaaaaaaagaacggtctatgcaccatttgctgttaacctgataggaatgtgaccgtacgagtactttgagattcatgctggacaacaaaacccaaagagagttgctacaaaacaggatcccgttgcaacgggatagac

SEQ ID NO: 9415 - DNA, 2084 bp, Oryza sativa
  ref <308>: DATABASE ACCESSION NUMBER: AK106763
  ref <309>: DATABASE ENTRY DATE: 2002-08-28
gttgttggtgttgttggtgtcgtcttgttcttgtttgtgttttcttcttcgtctccggcgacggcgtcctcatggccaggcgtaggtgaagtcgtacttcttggtgccatgggcgctgtggtggccgtgggatggtgaggcggcgccgtggcggccggggccatggatgtgggggatgttgatgtagagcacggcggtgatgacgaaggtgaaggcccaccagacgagcaccaccaccggcgtcttgccgtgcttcccgaggatgcccttggcgaaggggtagaggtggaagaggacccagaagttgaagaacacgccgccggcgaccttgagccagtgcgtccactcgccgtcgagcaccttggcgaaggcgacggcggagccgatgatgttgacgaggatgatgatgatgggggtgatcatgagccacgtccaccgcaccacgtacaggtcggcgtaggggtccttcttctcgtcgccggcggggagcttggaggtgagcttgaacgagatgtcccgccggaacaccaccttggtgaccacctgcagcacggcggcgaggtaggcggagcagctggccgtcatccagaactgcccgttcctgaaccactcgaacacggtgacccccgcccacttcacctccagcacggcgaggatgagcagcgtcccgagcacgatggcgaggtagacgtagaacatggtggtcggcctctgcacgatgaagtgccccgtcacgaacgacagcgccggcacggtggtgtagaagatgaggaacagcgccgtgaacgggtaggtggtgatgttgatgtacgccacgcgctgcagcgggtgcaggaacgtgctcccgaacagcgggttgttcctcgagaagaagatctccagcgaacccgtcgaccaccggagcacctggaacagcctctccgtcaggttgatcggcgccgtcccgatgaacgcgtgcgggtagatggagcagtagcgcgacctccaccccttgatgtgcatccggtagccggtcaccacgtcctccgtcaccgtgccgtacacccacccgatgtcgctcccccacccggtcttcttctcgtacgccgccgccgtcaccatcacggcctccgcgatcgccgcctcgtcggccgccaccgccgcctccgccgcgtacggcgacgggtgcgacgcgcgcgggatggtgtcggcgaacgcgtccgacttgccgtacgccttcttgggcatcggcaggagcccgtgcttccccttcgccaccgtcgccgccggcggcggcgccaccggcttggcaccaggcttggtcatctcgaacccaggcttctggtacctgttcttggcgaacatcccaccgagcctcgggaagcacggtccgccgacgttgatcctcggcggctcgaacccgtacagcgtgatgcggcggaagagacacccggtgccgacgtagataggcccctgcagcccgtcgagggcacggagcgtgccgtcgaagaagatacggttgtggttagcatagaggtcggtggggtcgacgccctcgaagcgctgcgggaactggacgaacgcgacggtgtcgctgtcgcggccgagcatgaagcagatgccggcgcggagcgcctgggagttgttgatgtagtggtcgcagtcgaggttgaggatgaagggggagttggagagcacggcggaggcgcgggtcagcgcgttcatggcgccggccttcttctggtggttgcacccggggcgcttctcacgtgcgacgtacaccagcatcggcagccgcacgtccacgccgctgaagtccagcgggttgtcggcgctcgccggcggccccagctgccgtgcgtggctcgggtggttcagcaacacctgcacatttttaccatcatttaccatatcagtaaaaaaaagtcatctagtactaattactactcctatatttaccactactaggagtaataaataattaattagtaatcactgcaattaaacttgatggttaattatattgtggtaattaattaattaacttgtacttgtagcagtaattaagaaatggtggttagttaatggtgagaggaggtgagatt

SEQ ID NO: 9416 - DNA, 1607 bp, Oryza sativa
  ref <308>: DATABASE ACCESSION NUMBER: AK106764
  ref <309>: DATABASE ENTRY DATE: 2002-08-28
aaatccgagacgctgcatcaaacgaaacgaagcgagaagccgagaaggggagagaggggggagcaatggaggcgctgctgaagctggagaaggtgcagagggtgctctccctgatgggttcgcgtggcctctccggctccggctccgactccggcgccagcgacggcggcggcggcgaccgattcctcgcccacttcctcctcttcctggtgcaaccgtttgattcacttagcatggagaaaaaagctctattggtctctgacctgttaagaaaggtcaatgttgatactcttgaagaagtgtgccaccttggcagcatagaatgtactagtggtgaaggaaggatcattcctgcttcaacttctgatcaagatatatctttgggagatccactacagccaaataagaagttgaagttgcatgccgagaaactaactgttcaggaggcaccaatggttgggtttcatgcaatgaggagagctaattctacgattgaagattttgtgcgtactgttcggtcatatttcatgtttcatggtttagatgtcaacaaagcacaatctattttcaagtttcttcctgttctttgtttcaccgaaagctacatataccagttagatgatttaaatgaatataacttgcagatggtcccaggtaacgatgcttccttaacagtgttggaaagggaaaacagaacttccaatgaagcgtccttgactggcatgctcaatgtccttgacgatcttcttcaacgccaggggctaatgacagatcaattgcgaaatgaactaaagtctggcattcagtattggtctctagagagaaagctttgccaagcattgtcgagaaatgacaagatatcaattgaagatgtgatggaagcaatccatctgaaatcgtttgattaccgagttcttaatctgctgatgtatcgtctaactggtcagcaggttaatgaagtgcatatggagttcttgtcaatttcagagtttttagtggagatatctgatgatctgtatgattatgaggatgatgtgatgaacaatacttttaacatcctccgtatgtttgctgcaatttatggaccttcagaggcaccaaagatgttggccaagtgcataggtgaagctgaggagaaatatgagagattctctaagaaattggatcctaccctctcaggaagttattggagaagatgcgaggaagctacaaaggaaggtggaaaaatgtcaggccatgcatatggcacatggaatatccctcctttgataagagatgaagaatttttccgccttgaaagatcaaacaaacgcgacgcctctgctataaccatcacatgacatttaatcccctgagcatgttcatacaaaagcgcaacagatattgctagatttatcgaaccttcgtgtgttactaaagccagcgagttggataagaaaagaggagtcagcgaacattggtagcatagctctatctgggtgtagtccaatactaatcgttgctcaatgcattctaaaatttcctgtcattttcacgagatttttctgttggttttccttttagtacttatgtcatcggcttgaatgattaattgctgtggtaaccac

SEQ ID NO: 9417 - DNA, 1779 bp, Oryza sativa
  ref <308>: DATABASE ACCESSION NUMBER: AK106765
  ref <309>: DATABASE ENTRY DATE: 2002-08-28
aaaatacacacacacacaaaaaaatccagaaaaaaaaaccgcacgaaaaaaaaagagcgccctcatcacggcgaggaattcccacctcctatctctctcctcctcctcctcctcttctctctccacgcacaaatctctctcctcctccgctcccccacgccgcacgcattgccgccgtgggctcaccgccggcgagggcggccgcagaggaggaggggagcggcggcggcggccaacccgggcggtgtgggtagcatgtgtgaccttgtggcccgaacgggtcggcatcagcagcggtacgaggatggccggcggctggtggccggatgcataccgttcaggtatagaactagtaatgatgaaacttctgatgatgaaccgaagaaaattgttgaagttctcatgataaactctcaaagtggtccaggtctcctgtttccaaaggtaatgttcccatctgaattagaatcaagaaatacatgatgatgaaaaaaatgtttataaattgtgtacgcataagtttgccaaactctttatgggcggttagtttacatgaaattgcaagaaaaaaaatcaaatataaattttgatgatttatgatctaaatttggattggcctttacttgatatgaattgctataaatttacaaaaattgcctgttttgacatgctacactgaagcgctactgcactatataccctatactatgagcaacatattgatatttcagttagcccataggtggaaaagtgtcgctcttggcatttatcatgttctttctgcctctcagatgaatccatatgaagtttgaatgaaatgagatgcaggtgtaaacattgcatattaagaaataccaaagtccattgcaaattatgttttgtactttttactgatttagcttgataagctggcaatgcatacataaagtatgtctgagaaatttctttcacctacttttctagattctgcataacatcagattttgtttgttggataaatgttacattaccatagtactaggtggaaattttgttatctgtgtcttcttgtttcagggaggatgggagaatgatgaaactgttgagcaggcagctgctcgagaggctgtagaagaagctggagttcgtggagatatagtgcaatttctgggtttctacgacttcaaaagcaagacgcatcaagatgcgtgctgccccgagggtatgtgcagagccgcggtgtttgcgctgcatgtgaaggaagagctggactcatggcctgagcagagcacccgcaggaggacctggttgacagttcctgaagccacgtcgcagtgccggtatcagtggatgcaagaggctttgcttactggcttctctgactggcatgacaactggagcaaaggtggcggtggcgacaccaactatgactctctctagttgcagaaggcatccacaggagttctggttttgtttatcttcttttaactctccctaggctccaactttgcagaatgcaataatacaatgtacacttgttctgatactagtaggtggtctttgacccttcattgctatctagcgtagtatatctcatcgaagacgggaattctcacaacttttaagtgtcaattctcgtgtctattgttccctcaccacctatcaagctcaattactttatcctggtgagcattttgtacgtcactgctccagattacggagctgcatacgctatgtattaacttgaccacacctgaaatcaaaaggtatttcttggctcgaatgagccacggtggctat

SEQ ID NO: 9418 - DNA, 1020 bp, Oryza sativa
  ref <308>: DATABASE ACCESSION NUMBER: AK106766
  ref <309>: DATABASE ENTRY DATE: 2002-08-28
ggaatggagaaaccgcagcgcgagcagatggcgctgatggtgccggaacttctcctggtcgtcgccacctcggaaggagccctcgccagcatcgagctcgcctgcaacctgcttgacagcatcgagttcgatgtcctcgtcgacatcgcgcatggcgtccccttcaacaccaccggcggcggcgagcagccgttgtacatgggtggcgggtgcggcggcggcggtggcggctggcgcggcgccagccgtagcttcggtgtccccatggatagcactggtggtggcgagggcagcttcagcgtggacgccctcgcttacgagccgttcaccttcggcgtccccatggacaccagcggcggcggcgtcgaacacaccggcggcgacggggcggccaccaatgtcgccgctgaccacaaggggcgcaaggccggcatcgactactgggccaacaccctcgccagcgcgttcgccaccgacgggccgctcaacgccgcccaccgcgagatcacgcgcctcatcacgctccacggcgtggccgcccacttgctgatccgatgcctcgaactccacgacttcccgcacggcgacgaggcggcgtggcagaggtggtgggagcaccacgacgccttcgtcccccgcgcccacgacgcgctcctgaggctgagctccgccacgtcggcctccgccgcggccgaggacttcctccgcttgagatccgccttgtcccctggccggaacgattggccgtcggaggcgaagcagctcgtgcgcgacgccaggcgcgacatcggcgaggcgcgggacgcggtgatcctgatgcgcgacgacgctgtgcgcgagttcttcgagacctggatgatcctgaaacgatcgcaggccagccgctaacccaatcgcctctgttagttttttttttctgcttgttcaatcccccagaacattcagaatcttactttggacaattttagggaggaattcgtcctagcttctctgtaaacatgatcatttgattcactgatc

SEQ ID NO: 9419 - DNA, 2270 bp, Oryza sativa
  ref <308>: DATABASE ACCESSION NUMBER: AK106767
  ref <309>: DATABASE ENTRY DATE: 2002-08-28
gaaatccccaactccaaaaattcctcgagtagaagtgcgagtttctccggcgatcgcaagcaagaaaccctaggcttccctccggcatgccatggcgcctggcgcagcgggagcggaggaggcttcggggtccgtgaagacccggtcgagcgcaaggcgacgccgcagtgtcaaccgggacggcggcagcggggtggtggcctcgctcgcatcccaatcggcggcgcgcgcggagcgatccgagaggcgatcagctaaaaggtcagcaactctggccgatcagagcagcgagggtgaaagggcagcgaagaagatggatttgggggtgcatgaggaggaggagggggtgaaggtggcgccgccttcagcgtctgcgtcagtagcggaggagcaacaagggggaaagggcggcgaagacgatggatttgggggttcagcaggaggaggagaaggtggcgcactggcgctgccttcagcgtcaggagtggaggaggggattccagtggaggacgaggcctcttcttgctgcagttctcctctccgtaagccatacataccccgtgttgtaattggacacaatgccatgggtagagagatctataagcctatcggaggtgaagacttcagggcacttgatccgtgggaagccaaataccaggcaaaaagagattgtcaaatgaaactgcccactttactcccatgcgtacctgacacatgccttactgatcggaacctcctccacattcgtgaatcatcgactaagactgttctttatgctgcaaagtttgttgtgggtctttcgtctactatagatggcaagtcattatctaagagttctggtttcatgatcgattgggatgagaagagcaaaacaggcactattttgacatcagcccttcttatttgcaaacagtccccttctttagatgattggaaaagtgcaaaccagtatgcttctaatgctaaggttgcagttcgctttgtggatggtaccactgtggagggtcattttctatattgtcaggagcattacaaccttgctttctacaagattgtagtggacagatccatccatttaccctcctttaatgaaggagtgaaatgggctgaagaggtctttatcctgggaagagatgaaaattcgtatctgagaacaagctatggtagggttcagtatttgaatccacatatgaatgaacgccgtcactatgtatacattgatggtttcagtgcacctcctgagtattacaacgggggaccagtcattgacttaaggggagatgttgtgggcatgtctatccgcagtacaagagggtcttttattccttctaacatcatcctcaagtgcttgcagatgtggaggaagttccaatgcattcctcgaccacatcttcaaatgaagttttggggcatgaaatttcttaaccctgctcatcttgaggtgatatcttgcaagtgcaacattgatgagggccttatcgttaaagaggtgtcagaaggttctattgctgagaaacttggggttagagttggtgatgtcattaaattcttcaacggaaaacatatctcttctactgttgagttggaactactgttgctgcaaatatcagaggatcatttttacaatggaaatggccttgattccaaaatagatattgtgattggagtattccacacacgcagtggtgtttggagaagtcggaagttgacagtacatgtatccgacaaaggagaagttgttataagaggtgaatttcctgtcactagagagacaatttatgcaagatgtccacttgaccaagcagattcagatccagacaattctcaaatctctctcacagatcgaacatcgtcatcgtcatcgtcatcgtcatcatcatcagattcaggttctctccatgcccctacttctactgaaggaaggacacccacctgatccaccataatctgatccaagattttaataacgtgtacatagatagtctcatcaaacactactggccatctcccacttatggtattaatcaacgtgtacatggatagactcattgtacgctgctggtcatctttccatctcccacttatggtattagtcaacgtgtaaatggatagactcattgtacgctgctggccatctttgttctgtcttccattttcttggagtgcgtcttttcttttatcctttttgggattccttaaccatatagatataactatctgtgaacatggagatgatgtccatgagcatgttctagcttttcattatgtcc

SEQ ID NO: 9420 - DNA, 1448 bp, Oryza sativa
  ref <308>: DATABASE ACCESSION NUMBER: AK106768
  ref <309>: DATABASE ENTRY DATE: 2002-08-28
tgtgatttgcactagattactacggtcagtttggctctaccaggtaacggtattggaaattgtaacttgttgttttagatcaatgtactggaacttgaaggtctgaaatagcaactactccctccgtcccataatataagggattttaattttttgcttgcactgtttgaccattcgtcttattcaaaaaattttggaattattatttattttatttgtgacttactttattatccaaagtactttaagcacaacttttcgttttttatatttgtacaaattttttgaataagacgagtggtcaaacaatgcaagcaaaaagtcaaaatcccttatattatgagacggagggagtaaaaaggttctctactttatattatggcaaattatattatagacttttcattgtcactcactcttgacatttccttttggttgcaaggcacgccaagtagggttattttgctgtaagttttttttttgtcatcacagcaaaggacatttgcagttcacacaccgcaccatatgcacctagatcataaccagattggaatgaatcccaacatacacaggtgaggctaaaaatccatgacatagataggacaacaaattaacaggaagtcaattcaaacacagcatccaactactgccagctcaccacaacaaaagcaccagttccctctgtgaaaagaaacctcaactcacttcctgaacaaacacttgacacggtgtgtgtcgatgtctaaatgacatgcaacctaacagcactgcctccaccctggccttggccctagaagaggcccagttgcacggcggcaagtcctgccaggcccagcatagcccatgacctggccctgagcccagctgcaccggcggactgcttggcgggcggcgcgagcaccgttgctggggttgtgggcgtcagaccggagcttgtgccaggggacgccggtgtcgctggtgtcgtagatggagtcgtcggtgtggtggacggggcttttggggctggggctggagaggccgcggcaacgtccacgacgagcttcatgccgttgctgcagtggccggcgatgccgcagatgaagtagtgcttgccggcggtcttgagggtgacggtggtcgtgccgctgctgtcgctctggagcgcgttgctagcggtgcacgcagcgtagtccgctgcgctcacctcatccaccgagtgcgccccaccggcgtagttgaacactggagaaaagtaaaagttgcttagaaatgcatttgcaaggcagcatatatagcaggtgaactggtgaagtgcagcaagttttgatatgcattttggtactaggaagcatcaatattcaatatcaatgcacatgttttacttctttttttttttcagtttctgatgcaagtcatgtttactagttctttttttctctagtatgatgccgatgcacattttagtt

SEQ ID NO: 9421 - DNA, 1866 bp, Oryza sativa
  ref <308>: DATABASE ACCESSION NUMBER: AK106769
  ref <309>: DATABASE ENTRY DATE: 2002-08-28
aaggctagccgcctcactccctctctctgtttcctcttcttcttcttcctcccgccggtcagctcagctcgcctcgtctcctccattttggcgacgcgagcgagcatattaaagctgtgccggcggctgcaactttgccgccatttatttagctccggctcttttaaaagctctcttctcctgctgccatcttcttctggttggcaccaccattccatatataccatctccctcctcctcccgcgctcgctcttcgccaatggccaagcgacgcagcaacggcgagaccgccgccgcgagcagcgacgactctagctccggcgtctgcggcggcggcggcggcggtgaggttgagccgaggcggcggcagaagcggccgcggaggagcgccccgcgggattgcccctcccagcgcagctccgcgttccgcggcgtcacacggcaccggtggacggggcggttcgaggcgcatctctgggacaagaacacctggaacgagtcgcagagcaagaagggcagacaagtttacctcggggcttacgacggcgaggaagcggcggcgcgcgcctacgacctcgccgcattgaagtactggggccacgacaccgtcctcaacttccctctgtcaacatatgacgaggaattgaaggaaatggaggggcagtccagggaagagtacatcggatcgctccggaggaagagcagtggcttctcaagaggggtgtccaagtacagaggagttgcaaggcatcatcacaacggcaaatgggaggctcggattgggcgtgtgttcggcaacaaatacctctacctaggtacttatgcaacacaagaggaggcggccgtggcgtacgacatcgcggcgatcgagcaccgcggcctcaacgccgtcaccaacttcgacatcaatctctacatcaggtggtaccacggctcttgccgctccagcagcgccgccgccgccaccaccatcgaagacgatgatttcgccgaagccatcgccgccgcgttgcaaggcgtcgacgagcagccgtcgtcgtcgccggcgacgacgcgccagctgcaaaccgcggacgacgacgacgacgacctcgtggcgcagctcccgccccagctgaggccgctggctcgcgcggcgtccacctccccgatcggactgctgctgcggtcgcccaagttcaaggagatcatcgagcaggcggcggccgcggcggcgtcgtcctctggtagcagcagtagcagcagcacagactcaccttcttcttcgtcgtcgtcatcgctgtcgccgtcgccattgccatcgccgccgccgcagcagcagccaaccgtaccgaaggacgaccagtacaacgtcgacatgtcgtcggtggcggcggcgaggtgcagcttcccggacgacgtgcagacgtacttcgggctggacgacgacggcttcgggtacccggaggtggacacgttcttgttcggggatttgggcgcgtacgcggcgcccatgtttcagttcgagctcgacgtctgaactctcaactccgaccagggtgtttcgggaggcccacaatcccagcctgttcccgtagatgggctggaaagatcgaatcaaatttgggcctattcaggggatgggctgggagaattgatatgggccggcagggatggccgaaagggaaggcctcccaagttttggctgtcaagaagctagaactgagttctctctcaaaagagagagagagagagaagctagaactgaggattagttgcttactcgcaaatactagtagtttggaggaagagtaaaatattggtttatttgttgcccatctctgcgaaggggaatttaccgtaataaagagtacatattgccgtttt

SEQ ID NO: 9422 - DNA, 2771 bp, Oryza sativa
  ref <308>: DATABASE ACCESSION NUMBER: AK106770
  ref <309>: DATABASE ENTRY DATE: 2002-08-28
atcgagtcgggttggcctactggctcccacgtcctctctctccctgaccctgagccaaagaatctctccatcctccatccttgaaatggtttgatgcctgcaggcatcagccatgtccagttcagccagaggaatcaccctcctctgtctcctcttgatcgtgtcatccactgttctccacttctcgatcggcggcggcagcaatggcgagaagaggagagacgatggtgatggtgacggtgacgatgagaaggtgaggttgttgcttggtgccaacgctctgggcgagcgggataggcggcatgggcatgggcatggaggtggtgtctcttcggcgccggcgccggctccggctccggctcgtgcccacctgccgccgccgctgctgcacaagaacgcgcggctcccggacccggtgcccggtagagtcgggctcgggcacaggagggggaacgccaccgcggcgcacagacggcgcagcgagcgggaagggaagaagagcacgccgcttgtcgtggtcgccgcgggcgccgcgctgtccggcgcggcggcggtgctcctcgtcgtcctcgtggtgttcctggcgtgcaggaggttccagaggagggccatgccgggcgctgaccagagcgggacaaacaaggtgagcttcgatcctggccccgacgtgttctacctggacgccgtcaagccgtacgtcgaggccgaccatggcggcggcggcggtgttgtgaagacggcgccggagttggccgggccgaaggaagagcccaggtgcgaggaggaggacagcggagttgccctgtccgacgacggcgccgactccgtccattcctcgtgctgcttccactcgtcgcacttctcctactccgagctccgggacacgaagccggggagcaatggcgtgtcgccatcgccatccggccggtcaagacgacggagctccgcccctgtgacgccctcagagaagaacaaggctgcgagcccttattcgccgcagtgcccgcgcacgccgagcaacagggagcgatcgtctcgcgcccactccccgagctcgtcggtttcggacttgacatcggtgtcgacatcggtggtcaaggatcatgaagtccggcgagccgtccattccctgatgtttccagaagcgcagagcggcggcgcggggcacgtgaaggaagacgaggcagaatcaggcaatatgaggccgcctcctcctcctcctccgccgccgccgccaccgccgccggcagtaacacagcagcaggatgtcaagacaagctgtggaccggccgttcccccaccgccaccgcctacgcctccgccgccaccgccactgctcgcaccgaaacagcagagcagcggcggcccgatcctcccgccggcgcccgcgccgcctcctctgttcaggccgtgggcgccggcggtcgggaagaacggcgcgccgctgccgaagctgaagccgctgcactgggacaaggtgcgcgccgcgcccaaccggcggatggtgtgggacaggatccgatcgagctcgttcgagctggacgagaagatgatcgagtcgctgttcgggtacaacgcgaggtgttcgacgaagcacgaggaggtgcagagccggagcccctcgctcggccaccacgtcctcgacaccaagaggctgcagaacttcaccatcctgatgaaggccgtcagcgccaccgccgagcagatcttcgccgccctgctgcacgggaacggcctgtcggcgcagcagctggaggcgctcatcaagatggcgccggccaaggacgaggccgacaagctgtccgcctacgacggcgacgtcgacggcctcgtcccggcggagaggctgctcaaggtggtgctcacgataccgtgcgcgttcgcgcgagtggaggcgatgctgtaccgggagaccttcgccgacgaggtcggccacatcaggaagtcgttcgagatgctcgaggaggcgtgcagggagctgatgtccagcaagctgttcctgaagctgctggaggccgtgctcaagaccgggaaccggatgaacgtcgggactgcccgcggcggcgccatggcgttcaagctcgacgcgctgctcaagctcgccgacgtcaagggcaccgacgggaagaccacgctgctgcacttcgtggtgcaggagatgacccggtcgcgcgccgccgaggcggcggacatcgccgcggggctcggcgccgagctcaccaacgtcaggaagacggcgaccgtggacctggacgtgctcaccacctcggtgtccggcctgtcgcacggcctgtcccggatcaaggagctggtcgggagcgacctgtccggcgacgagaggaaccagtgcttcgtggcgttcatggcgccgttcgtcgcccacgccggtgaggtgatccgggagctggaggacggcgagcggcgggtgctggcgcacgtcagggagatcaccgagtactaccatggcgacgtcggcaaggacgaggcgagcccgctcaggatcttcgtcatcgtcagggacttcctggggatgctggagagggtgtgcaaggaggtgaggggagccaagaattgccatggcgggaatcctgccctgaacctgaacaatgtatgataccgcaaatattggggtgaaagaacaacattgtaattcttggcttcggattgttcttgacatgatcttgccagattagaacagatcagttcgtttagattacaagcatccagctcttcatctatccgaagttccgatgtgcattgcacaatcatgc

SEQ ID NO: 9423 - DNA, 1790 bp, Oryza sativa
  ref <308>: DATABASE ACCESSION NUMBER: AK106771
  ref <309>: DATABASE ENTRY DATE: 2002-08-28
gagtcggccgttggcctactgggagttggaatcgtgcgtgaccggccgaactgcatatctaacgcatacgcacgcaaatcgcaatcaaatcacagtcacccatcgtcgagctagctgtgcgcttcgcatgatagacctatcgtcctcgatggtcacgtcgccggcaacggcgagctggtcggacatggtgttcgacctcctcgccaccgtcttccacaccttcagcgaccccgccgacctccttcgctgcgccgccgtctgctgctcctggcacgccgccgccgcctccgtccgcgaccgccacccgctcttctcccgccgcccgccgccgccgtgcctagtctacacggctgctgcctcgggcgacggcgacgacaacacccgcgccgccaccatctttcccctcgccggcggcgggaggacgttcgaggtcacgctgccggctgagccccccatccgcgacaggtcatggttgggcagctcccatggatggatcgtcaccgccgacgccgactccgccgagctccgcctcgtcaaccccgtcaccggccagcagatcgactcgctcccgccggtcgacaccatcgagcacgtcaggcaccgcagccagagcgccgccgccgccgacgacgacgacgaagatgactacgactacgagatcgtccagtacgactggaccatggagcagcgcgacgaccggccaccgacccaggcgaaggccggtgagctcgccgagtacctcctcatgcgcgcgttcctgtcgtctgatccatcgtcggacagcggcggcggcggctgcatcgttgtcctgctccaccggccaaagtaccagctctcgttcgcgcgggtgggcgtcgacgagcgctgggcttgggttaacctgcccgactcggacttctacaccgacgtcgtctacaacgacggcgacggcatgttctacgctgtcaggcaccaggccgccatccacgcctacgacttgtccggcgggccctccgccgtgcgccggacgatcgtcctagccgaccagttgcacggcgtcatcgacctcgagaccaagtacctcgtccgcgcccccgacggcggcgagtggctgcaggtgtggaggatgctgaagcccgtgcgccgcgctgccgacacccacggcgacacgacgccgacgacggcggtgtataggaagacgacgatctggatcaaggtgttccgcgtggacctcgccgcgcagaggctgcaggagacggcgacgctgggcgacggcggcgacagccacgcgctgttcatcgggtgcaaccagccgttctgggtgccggccggcggcggcgacggcgagtgcccggcgggcggcgtgctgcccaaccacatctactacacggacaacgatgaggactacgcgctgctctacccggaggcgcccagggacatcggcgtctacagcgtcgccgacggcagcttctcgccgttccggccatctctaccatggctgacttggccattgccgatctggcttgttcccaatttcggttactactgtcaaggttaagttaggaagaactaaattaacacagagcagctaagtttgattcattgattggttgttttttgttgctttcattatttaaatctacgttttattgtctctgatttttttttaatcatcgttcaatccaaatgtcgggctgtgcatagagtgtgacttttcttttttccttctaaattaaattttgtgctgataagactagacttctttttttctctacctgtatggatttgaccaatttaactatatttttttt

SEQ ID NO: 9424 - DNA, 2524 bp, Oryza sativa
  ref <308>: DATABASE ACCESSION NUMBER: AK106772
  ref <309>: DATABASE ENTRY DATE: 2002-08-28
gtatgtacgtctctacacacgtcatcaccatagaagaagaagaggaggaggacggtgattgatgaagggtgaaagagagaggtagagaggcggcggcgaagcgggcataccatggaggagggcagggtggaattcgaggatcctgatatgctcgaagacgttgttgagggcgccggggagctggctgcggacgagcttgcacctgaggatggcgaagagctccaggtccttggggacgaagtagcagccgacaggcatgccgtgccggttcttgccgtactcgggcaccaccttctccttccccttccacttcccattgttgttgccatcgccgccgccgccgccgcctcctcctagtggttgttctgccatggcgggcgagttagttggtcagagttgtagttaaccaggagaaggagagaggattaattagtcagcgagatagagagagctagccgagccgtgatcagtcgcggcggcggcgctcgcgcgtggcgtggcgtggcgagggctgcatatttgaggggagggcgtgaggcggctgtttgattcgaattcaatttgggggggaaattgaaggggagtaagagtaggaatacggtgcaaatatgatgtaagagaccggctgctatttccaattttggtatgcaacatgacagccagccggagacgacgacggcggcggcgaaggacggagagctcgccgtctgattgagccggtatgaccttcttcctgattttctcgcagagctcccctgattcgaccacctgctcagtcccctccctctagcgacggatttcgccgccgtgaactcgccgacagcttcccctcctcggccgccgccgcgcaggagggggattggtcgagtgtgccaccagcctcacggctcccgacggccatagccccccttctctcttcccacttactttgccccccctaaatttctcttgatttgggaattccgccgggattcctcgaagcagacgctgtgatttagggatttagaagctgcgtggctgttctgtaacttctgtttagtgaagagaagtttatttgggttctcttatgtgttggtgtgtcgatgaccttctttgcggtctctctgattacttgcagtggtgcttgtttcacagatggagatggggatgaattctgtgcagccaaatgctcagtttcatgtgccgcacaagtccctctcgttggatatatggcaataagacagatattgttatcagcaagtatgagggtagctttatggtgatggtgacacaaataggatgcatgggaaccatattagctgccaggaaagatgaaagtgttttttctgatccaacctacaatgttctttttggaaagagggatgagccgttactactagcttgtgcacgccaacttatcgaacacataaggtaagattccctcccaccccaccccatatatccgaagaacttcttgtatgatatatgcttgcttctcatgcaactaaaaattaaacttcatgccaatttcgtggataagaaatataattgaaactgtgtctgcatctgcctatgattccattaaattttgaatgtaattttcaccaataagctccacttcttctaagctgctcttggctgagttcgtttgcatgagttcccaactcactctgaccgtttttcgcgcgcacgcttttcaaactactaaatggtgtattttttgcaaaaaatattctatacgaaagttgctttaaaaatcatattgatccatctttcaaaaaagaattagctaatatttaactaatcatgctctaatgaatcgctccgttttttgtgcgggagggatttgctcccaacaagaagtaacaaacacatccttagatgcaaatgtctccagcaatggcccttttaattgtggtcaatgatttttttatctcacgcaactattgtgacacttcggttgctgaagttagttacataatttgtccagctctgatttgtaaactgtcctttggcacctgtaccacactccattttcttacagacacggtcattgatgatatctcttggtctgaaggatcattcccaggtattatttgaacttcccttcatatgactgtaattctccgtgtttttctcctgaatcttgccaaatcagcgagcatggtcgactgtactgtgcatatcagtgtttctgaggttagaccccattattttgcattggaatcaatagtattctcgtgcatgtatctcaaacaattttgttacttctgcaggcaacaatgaaatatattgtttccaccataattgagaaccgcctatagtaatagttttgcatatcgagctggggttggaatggctgggcacatatctattcacttcatcaacagagatgttgacatgattagtgctgagcaattaacactctcttaccaatctagaattttgtaactatgatttcttcggagtcgatgtatcacaaagtagttatataaccaaagttatagcgagaattgcactactagctttgatgagtatttcatct

SEQ ID NO: 9425 - DNA, 1196 bp, Oryza sativa
  ref <308>: DATABASE ACCESSION NUMBER: AK106773
  ref <309>: DATABASE ENTRY DATE: 2002-08-28
ggacaggataatgataggagtgacaaagtatgccaaattgccaattgtcaaatggcatttgcattttttttagtattatgtattttcctctctttttttttcttttgcaaaagaaccagttgtgtgcccatttgatctcagaaatcagaacctgtcagtactcagtaggttgtagcaaggtgggtgttgatgttggcaacattgtcgcaggtgaaccacagcaacctagtgaagctggagggcttctgcatcaactcggaaaccggcgactgctacctggtgtacgagtacgtggagaacggctcgctggacctgtggctcatggaccgcgaccgcgcgcggcggctggactggcgcgcgcgcctccacatcgccctcgacctcgcccacggcttgcagtacatccacgagcacacctggccgcgcgtggtgcacaaggacatcaagagcagcaacgtcctgctcgacgaccgcatgcgcgccaagatcgccaacttcggcctcgccaagaccggccacaacgccgtcaccacgcacatcgtcggcacgcaggggtacatcgcgccggagtacctcgccgacggcctcgtcaccaccaagatggacgtgttcgcctacggcgtcgtcctgctcgagctcgtgtcggggcgcgaggccgtcagcgacgacagcggcgagccgctgtgggccgacgcggacgagaggctgttccgcggccgggaggagaggctggaggcgcgggtcgcggcgtggatggaccccgcgctcgccgagcagacgtgcccgccgggcagcgtcgccagcgtggtgagcgtggcgaaggcttgcctgcaccgtgacccggcgaagcgccccagcatggtggacgtggcgtacacgctgtcgaaggcagacgagagcttcggcgactactcgggcgagagcgtgtccgtcgccagcagcggcgggatcgcagcgcggtgaggtgtcgcgggccaatcatccccagtgcccgtgtttgttagtggtagaacttgtactagtagtaaatagcgagtggcgatagagagcaggtagctaaataatctctgtcgttacgttacacgcgaggttgggattgtcaattagttttcgtggggagaagttggttgttacttgcaactcagttgtgcagaaactgcatatagaactatagaagcatcaagcatttctgtgtc

SEQ ID NO: 9426 - DNA, 1513 bp, Oryza sativa
  ref <308>: DATABASE ACCESSION NUMBER: AK106774
  ref <309>: DATABASE ENTRY DATE: 2002-08-28
aactccaacaaggcaaggaggaagagctgaggcatactccgaacccagccagagagctagctcagtgagcagtacacagtacactccccgggttatctctcccggcacgccagctagcttttgcttgcaatggcggactgcatgcaggagtggccggagcccgtggtccgcgtgcaggcgctcgccgatagcggcctggaggccatcccgcgctgctacgtcaaaccaccgtgcgaccgccccgcccccgaggcggacgacgcgtcctccggcgccagcattccggtggtcgacctcggcaacggcggcgacgacgagggcggccagctcgcggaggccgtggcggcggcgtgccggggctggggcttcttccaggtggtaaaccacggggtgcggccggagctgatgcgcgcggcgcgggaggcgtggcacggcttcttccgcctgccgctccaggagaagcagaagtacgccaactcgccgcggacgtacgaggggtacggcagccggcttggcgtcgagaagggcgccatcctcgactggggagactactacttcctcgtcctctcgccggacgccgccaagagcccggccaaatactggccggccaatcccggcatctgcaaggaggtgtccgaggagtacgggagagaggtgatcaagctgtgcgagcggctgatgaggttgctgtcagcgagcctggggctggacgggacgcggttccaggaggcgttcggtggggcgggctgcggcgcgggcctgcgcgccaactactacccgcggtgcccgcagccggacctcacgctgggcctctccgcccactccgatcccggcatcctcaccgtcctcctcgccgacgaccacgttcgcggcctccaggtacgccgccgtgacggccactgggtcaccgtgcagcccctccccgacgccttcatcgtcaacgtcggcgaccagattgagatcttgagcaactcgatgtacaagagcgtggagcaccgcgtgatcgtgaacgccgaggaggagcgcatctcgctcgcactcttctacaacccgagaggcgacgtcccggtggcgccggcgccggagctggtgacgccggagcggccgtcgctctactaccgtccgatgaccttcgacgagtacagggtgtacgtcaggaagaatggccccaagggcaaggcacagcttgaggctctcaagggccagtcaatcacccaaaacaacgaataataaataattagtaattaattaactaattaagctacaccgatcgatccaacagcgacggcatgctaatccatggatcgaactagcaagctagctagctagcagtcagcattaattatcccatgtatgatctgaatcggaataacacatgcatgagtgtgtgtacatggcctacttaatttacgcaacatatatagttataggccttaattataataagcacatatatattgcacgcatgcgtgctcactatctgaagtatatatgcattatatgtaattcaggg

SEQ ID NO: 9427 - DNA, 1086 bp, Oryza sativa
  ref <308>: DATABASE ACCESSION NUMBER: AK106775
  ref <309>: DATABASE ENTRY DATE: 2002-08-28
atttcggtgctttcggctggctgcacagcacagccacaggagagctagctctcatcacgggccaaatccaagggggatatcgtatttcctgtgcatcgatcgtttgctcattcacgagctcacagactcagagtctcacggggagatcaaggagtcggagaaacctcctctgccttgcatgccagtgagtgagtgcgagagataggttcacttcagggtggttattggggtgagcacctgagctgatcagcagccatggagggcgtcggtgttggggttagaattagagcgctgctctgctgcattgcgatggcggcgatgcttctcagttcctaccagcaaggccaggccgaggcctcttacatgccatggccgccagctacgccgccgccacctgctgctgccgctgccaactccacctccaccgcggcggcgaacaactcgtcgtcgtcgtcgtccaccaccgcgccgccgcagcagccgaccgccttccccatgtacggcgtgacccccggcagcctccggccgcaagagtgcgggggtcggtgcgcgtacaggtgctcggcgacggcgtacaggaagccgtgcatgttcttctgccagaagtgctgcgcctcctgcctctgcgtgctgccggggacctacggcaacaagcagtcgtgcccctgctacaacgattggaagaccaagcgaggaggccccaagtgcccctagttaattcttttttttttcattttagcagcaaattaaaccaccattgttgagggagggagggagggagggaggaaggaagccgccatggctgcaagcttttcagcctttgctctgagctaaggcacggccctcatgcatccagagtttgttgaaattcagatgcgactctctgtgttcttttcctcttgttttttttttctgttctttttggggtatctctgctagagtggttgtttgtctgtattgatttcgtggatcttaaggtagaagatgagttgtcgagatgaattttgatcgtgatgtgtttcgagtttgtttgtaatttgtatgcagtattgaggagtaatttgtatgctactatgggttcttttc

SEQ ID NO: 9428 - DNA, 1012 bp, Oryza sativa
  ref <308>: DATABASE ACCESSION NUMBER: AK106776
  ref <309>: DATABASE ENTRY DATE: 2002-08-28
cgatcccatctctctttttttccgtgttcttccatctttctcccgtctcctctcactctgtgtcgtccctctcactcacgacatggaggaggtcacctccgacgccgcggcggcgaaggaggaggagacagggggccgccggccaccgccagccagccaccgcgcctcccaccgtcgccgccactgctcgcccgcctcagctccgccgccagccacaactccacccgccgccaccgctcgcccgccccagctcccaccgtcgcacgcgccacgccgtcgccaaatccgcgggggaggaaggcggtggaggaggaggtggagccgccgcccgctcccggttgcctcctcgtcggcggcggcgctgcatgaggtcgttgagccggcaaagcctgccgccgccgccgctcgtccaccgccgccactgcttgcccgccgccaccactcgcctgccccagctctgccgccagccgccgtgcctcccaccgtcgcacgcgccacatccgtggggaaggaacgcggtggaggaggaggaggaggagccgccacccgctccctgttgccacctcgtcggcggcagcgccacacgaggtcgttgagccggcaaagccccgcctggtccttgagcgcctcctccgcgcagaccgcgctcatgctcgccatcaccacgaatgacgacgccttcttgctcagcgacgagctcatcttcacctaacttggtctttgatggatgattcctcgcaagcagatgctgtgtttcttggagctagcagatcctggacttcgtgacgcagtggctcgtcggggtctcgccggcaatgccgtgcccgccatccacgacgaccacaacgtcgtcaccgagcgcgtggcctcacgttgtcacggagagagaatagggaagatagaaagagtgatcgagtggtatggtttcaagtttagaaatttacagtgaatagtagtggtatattttgattttccatatttacagtggcatggatcatattaatcctttctt

SEQ ID NO: 9429 - DNA, 2557 bp, Oryza sativa
  ref <308>: DATABASE ACCESSION NUMBER: AK106777
  ref <309>: DATABASE ENTRY DATE: 2002-08-28
attactcacccagcaaccgactcgctcctccctttccgccgctgaccggtgggccatcccccccaccctcctcctctcagcttgtataccagcgcttccgcagagtcacgcactgcacagttgaagttggtggagtgtggagtggagtggagtggaatggcgggggtgtgtggctccgtcgcggcggcggcggcgatggtcgtggttgtgatggtgtcgtcgttgccgggcggcgtggaggcgaagacgacgatcgagccgtgcacggggtcggactcgtgctcggcgctgctgggctacacgctctacgccgacatgaaggtgtcggaggtggccgcgctgttcggcacggacccggcggcgctgctggccgccaacgcgctggactttggggcgccgggggcggcgcaccgcatcctcccgatgggcctcttcgtccgcgtccccacccgctgctcctgcaccgacggcgtccgcaagtcggtctccgtgcgctacgccgcgcgccccgccgacacgctcgccaccgtcgccgacggcgtcttcgcggggctcgccttcgccgaccagatccgcaacgccaacgccgtcgcatccgcggaccccgacgcgccgcttgaccccggccagaagctcgtcgtcccgctgccctgcgtctgcttcaactcctccgacaacaacctgcccgccgtgtacctctcctacgtcgtgcaggtcggggacaccgtgcccgccatcgccgccagctacgagaccaccgtcacggatgtcatgaatgtgaacgccatgggaagcccgatcgccgcgccgggcgacattctcgccatcccattgccaggtacatgttcatctcaaactttgcaaacgatatcgcagatgagccgtatggtttattgcattgagctaactgttttgagctaaaactttgcaaacgagcatattttctgcaggcaaattggttcgtcagtatgtttttgttctgaataaataataatcagacaatgcatcattggggatataaacagtatgcatgctagtggacattgcattggtgccttagctttaatatttgattgcttcataggctgcttatattctagggtttaattgattaatacagtaaagaaaatcacatcagtttaatgtcgggcttcaccatcttgctcgattttagtcttcctcatgttggtccgaactgaacatttgaaattatgaatctgtcgtcattacagtagcccaattactagctgcagtttgatgtttggtacttcctccgtttcataatataagtctttttagcattacacacattcatatagatgtttatcaatttaaacatatatgtgtgtctagattcattaacatctatatgaatgtggccaatgctagaaagtcttatattatgaaacggaaggagtatatgcgatgtttcaattcgctaacatcggagtcagataaatagaactttgtttaggcaatcgattactcttcaataggaattaggaagatactattggagagttatgcacgaactgttcagttttcctttctattcattcagtgagtttcagattgtgtatcctgtaagaaaacataagcatcatattatgatgagcctctgcgtttatggactctatcttttgttgattgctaattcttctgttctgccttctgtgacaacagttgggctgcatcatttatcttttctaaatatcagcattttctccctagttcttccagtgacaattgttgcttgtttctgtatcttagcatgtacatctgcatttcccaaatctgcttcagaccatggactaattgtggcaaatgggacttatgcacttactgctggaaactgtgtgcagtgtagttgcgggccagggaatctcaagtaattttcagattgtaccttttctgtttaacacgatattatatggaaccattatttgggtcgtaatgtctgtcttctcttctgtctcagtttatattgcacaccagcttcattgacagggtcatgtccaagcatgcagtgcagtaacagcaatgttctgctaggtaatgtaagcgctcgttccaccagtgcaggctgcaatgtttcttcttgtagctacggaggttttgttaatggaaccattaccacattgctgagcacaggtcttcaatccagatgtccaggaccacatcagttccctgaactcactgaaccccctaccacggtgaaccatgattcaacgtttctcccgccattatcggcacctggacctgcagaagccggcggcgccattccccctccgaactcaggctcaccatcagtgcaaggagggtctttcacactgcccaaagtatccactgcaaatggccctgccggaagcgtttcagaggctccttggatgaacaagccgcatcagatcctgtcaagtttcatcttgtgtctactacttctctactcgcagatgtgaattgcaatgtgtagtcaaggaccaattctgtagtaattgtaaacttgaagcctcatttaggcaaggggaggtggacagtatcatatcggcgatgtttttgg

SEQ ID NO: 9430 - DNA, 1523 bp, Oryza sativa
  ref <308>: DATABASE ACCESSION NUMBER: AK106778
  ref <309>: DATABASE ENTRY DATE: 2002-08-28
gtagtatgcagatagctagcagcaaattaattatatatatataatcctcagctgctgcctggtacatacagtatatcttatagatggggcgccgcgagtacagtgaacaatatcatcatcgggcaggggcaggggcaggggcaggcgctgccattgtggtggtggtggtcgcagtcgcagcagcggtggtgtgcgagtgcgaggcgaagccgcgagcctttttcgtgtttggcgactcgctggtggacagcggcaacaacaactacctgatgacgacggcgcgggcggactcgccgccctacggcgtggactacccgacccaccgcgccacggggcgcttctccaatggcctcaacgtccccgacatcatcagcgagtacctcggcgccgaatccgtgctgccttacctcagcccgcacctggacggacccaagctgctccacggcgccaacttcgcctccgcctgcgtcggcatcctcaacgacaccggcatccagtttgccaacatcatccgcatcgagaagcagcttcggtacttcaatcagtaccaggatcgggtgcgcgggctgatcggtggcgcggcggcgcggcggctggtggagggcgcgctggtgctcatcacgctcggcggcaacgacttcatcaacaactactacctggtgccattctcagccaggtcccgggagttcgcgctgccggactacgtgcgctacatcatcggcgagtacggcaaggtgctgaggcagctctaccacctgggcgccaggcgagtgctggtcaccggctccggcccgctggggtgcgcgccggcggagctagccacgcgcagcgccaccggcgagtgcgacctggagctgcagcgcgcggcggcgctgtacaacctgcagctggtgcggatgacgcgggagctcaacgccgagctgggcgccggcgacgtcttcgtggccgtcaacgcctacaggatgcacatggacttcatctccgacccggcggcgtacggcttcgccacctccaaggtggcgtgctgggggcagggcccctacaacggcgtcggcctctgcaccgcgctctccaccctctgccccgaccgctccctctacgtcttctgggacaacttccaccccaccgagagggccaaccgcatcatcgtcagccagttcatgtcagcctcgcccgactacatgcaccccttcaacctctctaccatcctcgccatggacgccgccactgctgctgctgcgccatgaacgcccgccatcatccggcccatacatatcgaccaacctcgctatatatatctctaattttatatatatgccgcctatactataattaactacgctatatatagctagtataattgataatgtaattctcccaagcaatgcaatatacatatgtatgcatgcaaataaagatcgagggatatatatattgcgtacgtgcaaatcgttatacatatgagaataatgttatgtttgcctgtaaggttcaatcatccctgaacatgcaggctctagcat

SEQ ID NO: 9431 - DNA, 652 bp, Oryza sativa
  ref <308>: DATABASE ACCESSION NUMBER: AK106779
  ref <309>: DATABASE ENTRY DATE: 2002-08-28
cttttttttcttccccactccatcctcttctcctccaatccccacaccaccggaattgttgaggaggcgtgcttcgaccaaatcgacgagttcaacaacatcgacctcttccgctgtcgccccccccccccccacaacctccgtcgtcccgcgggcgctcgacaccgtggaggagcttctctggttggggagccccacgctagccgcctacgcgcgccaggagatccagttccggcaccttgtgcaggagcacgccgtcgccgccgccgttgcgaggatccgctccatcgaggccaggattaccgtccaccgcgacaccatcacggtgaaggggcaccgccttcgtgccgtccgcgccaacatggtgccaccggttcgggcccggctcgccgtcccgatgggcgccacaggaggaggtggatgctactcgagcggctgaaccgcgcagaggaggaggaggacgccatggaggagcctgaggaggagaagctggaggccatgccgcagctggccagcggcatggaagaccttagcctgttgctccgtgcattcatagccttgtactaataaaaaaaaatttggctagagcttgtgaaagaaaaaataattatttttggtttcaggtatttgtaacaagatgaagttgatctcc

SEQ ID NO: 9432 - DNA, 824 bp, Oryza sativa
  ref <308>: DATABASE ACCESSION NUMBER: AK106780
  ref <309>: DATABASE ENTRY DATE: 2002-08-28
gagcaactaatcaggccacacaatttcagtccaagtactagtgcaagatcgatcaagtgtgaggctgggttgagacaatggctgggtttcaccgcctctccctcgccttcctcctgctcgtcgtcgtcgtcgccggcgacctgatgatctccaccgccacctccatggcggtgggtacatcggacgacgacggcccacctatcaagatcagtatgcggtacgccaacgcggaggagtcgcggtggctcgacagctgggcggagaagacgcagtcggccggcggtggcggcggcgacgacttcgaggttcgccgggccaccgacgaggagtcggcgcggctgaaccgcatgcgcgccgacgccgacaggagggcgagggacggcagcggcttcggcttcgacggccacatcgagttcgacgatgaccatccttttggtagagtcgtcgtgacggacttccctccgtcgtccaagccgaacgatgatctgtgaagccagaacaagtcccactcgcgccgaggatgatgagttccagtttccttaggacgacgaattaagctgaataccaacaagcttatggattggaggccggcgggttcattgcaccagagtcttcagtttctagctttggctcttcaagccttagtatcctgggcaagacccaaactatcttcagtttctatcatgtcgtgtcctcttagcttagttaaacccaacctcttaaaggtagtggttttcagtcagtgtaatcggtcttcggtcagttaaaggtgccttttcagtttcagtttgttcaattgcagttcctctgttctgtctttcctc

SEQ ID NO: 9433 - DNA, 866 bp, Oryza sativa
  ref <308>: DATABASE ACCESSION NUMBER: AK106781
  ref <309>: DATABASE ENTRY DATE: 2002-08-28
atcaggatttcgattcgactgtcccccttctttttttttcctcaaaacatcgatctcttctttcccaaccagcaaagcaaatcaatcccctcttcgcatcaacgccatggatgaatctgacgagcagagcaacggcggcggcggcggcgggcaccgcgggtacgagtggaagctgccggcggcgctgtcggcgaacacgacgagcgtgcacgtgacggcgctggacggggtggtgaacgtgaactcgctgttcacggtggccgtgttcgtgggcctctccctggcggacccgggggagctccggagcctcgccggcgacgcgtcgtgcgacgccgggcagggggtggcgcggtccctcctggtgctggaggtggtggccttctcctccttcctcttctccagcctcgtggcgcaggggctcaagctggcgctcaacctcatcaactccaaggacccgcacgacacgctgcacgcccacatcgacgcgcgcctcctccgcctcgggatgctcgcctccgccgtcggctccgtcgtcggctgcgtcttcctcatggtgtccatggtcatggtcgtgcagatccgcctcggcacgctcggctgcgccaccaaccgcgccgccgccaaggccgccgcagggctcgtcggcctcgtcaccaccgcgctcgccgtctacgtcggcaccgtcttctacaccttcacccactgaacaagcaagcaactggcatggatgtttcttgagttctatggcattgtctgtagtagaatcttgcatctgctgtttatgtatgtattgtggacttcaaaatgttgcgagatgaggaagtggaagatgttggtgatccgacttttatgaatcaacctgcaat

SEQ ID NO: 9434 - DNA, 1527 bp, Oryza sativa
  ref <308>: DATABASE ACCESSION NUMBER: AK106782
  ref <309>: DATABASE ENTRY DATE: 2002-08-28
atcctggccgtccgtgtggcgccatagggggcgacagaggggatctctctcccctcggctttcgcctcggctgcagtttcgcattattccgacttcgccgtcgttctcctcccgtcgcggcgagcccacggcggccgcggcgccgccggagaggagcggagagtggtgatccgtcgcggaattcgggtgatcccttccatttcgtcctagttcgctccgtgctgtatagcctttgctgtggggataatggcgaatctgcagccctcgctttccattccgccctccttcgccggggcctcgccgccatcgccttctccgatcggcggcggtggcgtgggcggcggggtggggcagccagccaaggatatgaagatggcgtcggcggagcagctggtgctcgacctctgcgaccccgagcttcgcgagaacgccctcctcgagctctcaaagacttcatgttccagtcattaacatgataagccagtttatttggtcaaaaaaaattcaatcctttcttttcagaaaagagagatatttcaagatctggccccacttctttggcattcttttggaacagttgctgcacttcttcaggaaattgtgtcaatctactctgcactttcacccccaacattgtcaccaggtgcatcgaaccgagtctgcaatgcacttgcacttcttcagctcatattcccctgtacctgtacccattcttgaatactaccagcaagacaagaccttttgaatacctgcgactcaccagcctgggtgtcatcggtgcacttgttaaggttgatgatactgaagttatcagttttctgctgcaaactgaaataattcctctgtgtttgcgtaccatggaaatgggaagtgagctgtcaaaaactgtggccaccttcattgttcagaagattctcctcgatgatgttggattgcgctacatttgtgccactgctgagcgtttctttgctgtaggcagtgttttagcaaacatggtagtttcacttgctgagcagccttccacaaggttgctgaagcacattatccgatgttaccttaggctgtcagacaattccagggcatgtgctgcactacaaacttgcctccctgacatgctgaaggatggcacgttcaataactgtcttagggatgatcctacaacaaggcgctggctccagcaattgcttcttaatgtgacaggcgcaggcatgggagctgctcctcagccaggcctggatcacatgatggggatataaatcagtctgattgctgcaattcacaacaataataaccttatctacccgtgaattgcaagtagggaagatctcctaggtatttaggctagaaataggtagcatggttagtccaaccttcgaaaacaagaggaactgtttgtgtgttagtgtcattggctgttaagggtgctgtgcttattctttaatgctgtggaaacaaggacagcaagaaagctcatttttatgttcttgcaccagaactgcttttgctttgacagttccaacgtttaag

SEQ ID NO: 9435 - DNA, 1421 bp, Oryza sativa
  ref <308>: DATABASE ACCESSION NUMBER: AK106783
  ref <309>: DATABASE ENTRY DATE: 2002-08-28
actcccagttgtgacgcagctacagtcgccgagagcaagacgaaaggcaagcacgcgcacccacccacacacgggcgcgcgcacgtacaaagcccctcgtctccgtgtcttcttcctccccgcgcctgcaacaaaccggccagcccagccagccggtcggccgcttccgccatcacctttgccattttgctgatctcgatctcttccttcctcagccactagctggcttactaccactccaaagggtggaagtggaagctagggagagctagctagctcgttttcttaacttctagctagctgatgatgccggcctgcggcatggggtcgtcgagacggccgaggagatggagcggcggatccaaactcgccgtcgcatgcctcgcggcggttgcggtgacctccctgcagctgtgctgcctctccggctgcttcatcgctgcgtgcggcggcgccggcagggacgacgacgacgtgcgccgttactccgatcatttcgggaggctggaaggagcaggagcccattccggcgaccttctggaaggtggtggtcactaccacgtcgggttggggcgtcggctgctgtcgggagggccagggtcgcacccgccgcggtgcacgtccaagtgcggcagctgcagcccgtgctcccccgtgcacgtgtccgtcccccccggcgtcctcgtcaccaccgagtactaccccgaggcctggcgctgcaagtgccgcaaccgcctctacatgccgtgacgactccacaccccccacccctctacgtacgccgtctcgatccaaccgcacgagaccaccgagatggcgccgtgacacaacaggtaggcgcaccgtccgcccgtcgtctctgccgctgcatcatcgcgtccggtgcggcatgcctctctttctctctctttctctcgccgtctcgcgcgcgcgcgtgggggcatgcgtgcatgggtggtgcaggtggggcgcggggcgcgtgacggatggtggcgcggtggactggcctaccacgcgcgcgcggtggcacggcgcatgcacggcggcagctgggggggccggggcctgggccagcgtgatcgtctctgaaaactgtggcattgcagtgtggcttttggttgggcctaccacgaggcgatggcgcagaggagagatgaggaggaaagctgctgcccccaggcgcctcttcatgtgatccctgcgcacatcattcttggctacctagtgaaaaactgaaaaacacagtaccaccaccggccgagtccctttgccatgttatacatatatatatctccccttttttttttcactcctagttatctcccggtgctttcagttctcgcatcatgcctgcacggggcatgcaacagatcgatcaagtgtacatttctcatttgtaacaagactcatcgtcgtctatc

SEQ ID NO: 9436 - DNA, 1598 bp, Oryza sativa
  ref <308>: DATABASE ACCESSION NUMBER: AK106784
  ref <309>: DATABASE ENTRY DATE: 2002-08-28
atgctgcctcctcgccacctctgcctttccctctttgctcgcggcaaaatccacatgcagttgtagacttgtagtagtagttagttgtggttgtttgttgttttggctttcaaatcaggaacaacgacagatccgaggctttctcgaatcgggcaggtccatcaaatcggaagccagccagccatctaatcacctcatcacatcaaaggggaccaaaaggatatctctggtggctaccccctctcctccggccactcgtgtaaaatttcccttctgatcctgcgctgtgccagattataaggccattgcgtagctcgatcgaagaaagaagcaggccagccacagtactgcctctcttgtcgatcgatcgacagccacagcctgcaggtgtggggattcggctggccgtcgccttcgtcttcgtcttcgtcgtcgtcctcatcatgtcgtcctcgtcctcgtcgtcggctgtcttcccactggaccacctcgcggcgccgtcccccaccgagcagctctgctacgtgcactgcaactgctgcgacaccatcctcgccgtcggcgtgccgtgcagcagcctgttcaagacggtgacggtgcggtgcggccactgcgccaacctgctctccgtcaacctccgcggcctcctgctccctgcgccggcgccggcgccggccaaccagctccacttcggcccttccttgctctcccccacctccccccatggcctcttggacgaggtggcgttccagacgccgagcctactgatggagcaggccgcgagcgccagcctgagcagcatcacgggccgcagcagcagcagctgcgccagcaacgcgccggcaatgcaaatgcctccggcgaagcctgtgcagcaagagcctgagctgccaaagaacgccccggcgtccgcgaacaggcctccggagaagcgtcagagagtcccatctgcgtacaaccggttcatcaaggatgagatccagcggatcaaggccggcaacccggacatcagccaccgggaggcgttcagtgcagccgcaaagaattgggcccatttccctcacatccattttggcctcatgccggatcaggggttcaagaagaccttcaagcctcaggatggttctgaagacattcttctcaaggatagcctgtatgctgcggcagccgccgccgccgctgcagccgcaaacatgggcgtcactccgttctagcgagctttggcaaagcggccgcaagcaccgaattcttggtggtggccctagctcgctctcatgtgtggcgccattctagctatatagcaagggtttaattagcatcagatcatcatctcttaatatcatgtgtgttgcttaattagagtacttctgagtgtgtagaagagagatggggaatcctgttgagtgcctaggtttatgcttataaccatattcctcgtagagacttttttccctgtttttctcttttcttttccttctttatttttttatcctttctttctttcaggactatcttcgtactccctattcacctgtagagtgtagagaagttgctgttccgttgcctgattgtgtcccaaaagacgtgtcttaattacg

SEQ ID NO: 9437 - DNA, 1694 bp, Oryza sativa
  ref <308>: DATABASE ACCESSION NUMBER: AK106785
  ref <309>: DATABASE ENTRY DATE: 2002-08-28
gtataaaatttgctaaaataatggagtagttacgacttacgagaacgaatttgtaggctcaaaagacattacgtctttgtccgaaaccgagcgtagatcagccatggcggcggcgcgctctttgccaccttgggtggtgctggatcgcaacgcctttctccacaaaccggacgacgaggaggaggaggacccggggtgggcaaccatcaggtgcgagacgacggcctacgtcacgctccgcgcgaacgtcgagggcctgcgccccgtcgacgagctagcgccgttcgacgacggcctgaagctgctcgcgctcgtcgccgatccccccccggccctcccgcctgtccatccgcctcgacggcgacccggaggaggaggaccgccgcggcttccgcagcagcgtcctgctcgccgacgccgggttcatcgtgctctcctcctgcctccccgacacgcgcggccacaaatcctacctcgtctgcgacgtcgccgccgcggacaatgccgcctcgctcaagatgctcccgactcttccgatgaggtttctcccgtctgtgacctactgcccgcaccccgtccggcaacaacccgacgccgatggcggcggctacctccttgccatctttgcaatggacatggacgccgatgcagaggctgacgggtatctaccgcaagtcctctgccttctgccgtcatcggcaccattcgaccgccgtcgctggggaaccagaaggccaatcttcccctccgagaagccaaagagtttcaccgctcatcaaaccttctcattccaaggctctgcttactgggtggatcttggacaaggcatcctcttctgcagctgccatgatctcatgtctggtaccaacaacatcaacaacaacgacgacgacgatttgcaatttggttacatccaattacccgatggttgctacgttggttgcgactcgctctatctcactcatctgccgtcacagtatcgtgatatccgttgcatcagtgactccatcagattcgtctccatcgagggatacaacaccgatcctccatacgacatgctattatccatgtgggatttgacgccgagctcaaggcagtggcacaaggttggtagtatccatgttgggagcttgtgggagcaggaggggttcaggagatcagggttgccgacgaacacgtcgccgacccagcccatgttgagcagcgaggaggacggcgtcgtgtatctcatggcgggtgatttctacgaggaggatgagaagcacaggagcctgcacgtcttcagcgttgacatgacgacttgcgagtttgtgtcggcttggcgccttcctccttggcgccattcgggtcctccatccctgatagggtctgatatattcaagcacctcaagatggataatctctgtcagcttgttccacccaatatgagggccaaggtgctccctcgtccaccaaagagggatcgaggtgaaggcaatgtgattacagttcgaccaaggaaggtgcaacgagttcatcatcaaggggaaaatgtctaaacttttttagggaaaatgtcacctaaattttcgtgtaagcatcaatattttttgtacatgtatggcaagataaagatcaacaacgttttccacggagaggggttattcggactttttttcaaagtgtatttacaaggataacagtggagacaggtt

SEQ ID NO: 9438 - DNA, 1602 bp, Oryza sativa
  ref <308>: DATABASE ACCESSION NUMBER: AK106786
  ref <309>: DATABASE ENTRY DATE: 2002-08-28
taatttattttttataggagaaaaaaagaggagaaaaaaaagggaagaaagagatggacgaggcgtgggagagggcggtggaggcggcgctgcaggccgccggagaggggagctcgtcgccggcgaggagcctgacgctggacggcgccgtgaagtgcctgcacggacggctgcccgcggcggagattctggagcggtaccagagcctggagcacctgtcgatcgccggcgtcggggtcgcgtcgcttgccgggttccctcggctgcggaacctgacgcgcctgacgctctccgacaaccgcatcgccggcggcctcgaccacctcgtcgccgccgggctggcctcgctccgcgacctcgacctcagcaacaatcgaatccaggacgtcggcgacctctcgccgctcgccaacctccgcctcgtctcgctcgacctctacgagtgccccgtcacgcgggtcaaggattacagatccaaggtgttcggcatgatccggactctcaagtacctcgacaagatggacgccgacgagaacgagaggccggagtcggatgacgacgacgacgacggggatggcgacggcgacggcgaggaggaggaggacgacgacgatgacgaggatgaggatcctggcagcggcgaggtggccaacgggggcgtctcccacccgcgcggtggcgtggcgtcgcacccggtggaggtgaacggtgtgatcgatgtggacgaggacgagagcgacgccgacgaggtcgtcccgaacgggggagacgaacaccacgctaatgggtttcgggtcgcggccgttggggacgaggatgaatatgtggaggaggaagacgatgatgatgaggaagactatgaggaggaggatgatttgggggaggagatcgatgaggatggtgatgacgaagacgctgttgttgaggtgcatgatgtaccaagtagcagtgatgaggaggaagacggcatcgaggaagaggatgaggaggaggacgaggatgaagaggaggttgaggatgatggtgaggaggctgagccagagagcagcgggagggtcgctttggcggtgggggacgttggagaagagattgatgggcatgagcacggagagggggaagatgaggatgagaacggtgagattggagaggaagatgaggagagattggaggatgatagggtttatgaggaggggaatgatgacgacgaggaggatgtggatgatgaggatgaagacacagaatatcttgttcaaccaattgctcaacctcaggccatggcggttggaaacgactttgatgcagctgaggctgatgatgctgatgaagatagagatgaggttgatgacgatgatgatggtggtacggacctgccctcgtcctcgcagggcgtgctccggctaggctaaaatcaattaattagtctccgggagggtaattaacgggggtgattaagattaagctcgatccgagttcagtttaggcgatgatgattcagctgcagcttcgactgcagctgtgtccgcatttgtaattacagaaaagttttggtgctaatttgtacatggtttttcgttgcattctgatcagaaaaaagaaaagaag

SEQ ID NO: 9439 - DNA, 2044 bp, Oryza sativa
  ref <308>: DATABASE ACCESSION NUMBER: AK106787
  ref <309>: DATABASE ENTRY DATE: 2002-08-28
acacagaaaattaaaccgtactctgatacttcccgtgttacgcctgtcacagcttacttacattggtcgccaatggcgtccgacatggacaccacacgagcgctggccatcttagcggccacaagctttgttgcaatgctagcatgtgtacaggcggcaggagacgagagctacacgtccatgaaggacgcggtgcagtccccgcaggtgtcgtactacgactacatcatcgtgggcggcggcacggccgggtgcccgctcgcggcgacgctgtcgcagcgcttccgcgtgctcctgcttgagcgcggcggctcgccgtacgacgacgagcggatcgggaacatgacacgcttcgcggacacgctgtccgacacgtccccctcgtcgcccgcgcagcggttcgtgtccgaggacggcgtgatcaactcgcgcccgcgggtgctgggcggcggcagctgcatcaacgccgggttctacacgcgcgccagcgacgagtacgtgcgtggactcgggtgggacctcgaggcgaccacggcggcgtaccggtgggtggaggacgtggtggcgttccagccggagctgggtccctggcagtcggcgctggagagagggttgctggaggccgggatcgcgccgcagaacggcttcacgttcgaccacctcggcgggacgaaggtcggcggctcgatcttcgacgccgaggggcggcgccacacggccgccgacctgctccggtacgcccgcaccgacggcatcgacgtgctgctccgagccagagtggccaagatcctgttcaacgtcagagctggaagacggccagtggcgcacggggtggtgttccacgattccgaggggcagatgcacagggcttacctcagcaacggccgtggcaacgagatcatcctctcggcgggcgccatgggcagcccgcagttgctgatgctcagcggcgtcggccccgccgaccacctccgctcgttcggcatcacgctcgtcctcaaccagccggccgtcggccagggcatgtccgacaaccccatgaacgccatctacgtgccgtcgccttccccggtcgaggtgtcgctcatccaggtggtcggcatcactgaggtcgggagctacatcgagggcgccagcggcgccaactggggcgtccggcgctccggctccggcggcgacagaccgcaccgcaacttcggcatgttctctccacagacggggcagctggccacggtgccaccgaagcagcggacgccggaggccatcgcgcgcgcggcggaggcgatgagccaactcgacgacacggcgttccgcggcggcttcatcctggagaagatcctcggcccgctgtccacgggccacctcgagctgcgcaaccgcaaccccgacgacaacccgtcggtgacgttcaactacttcgcgcacccggaggacctccggcgctgcgtggccggcgtgtcggtgatcgagcgcgtcatcaggtccgaggccttcgccaacttcacgtacccgtacttctccgtcgagacgctgctcaatatgacggcggggttccccgtcaacctccggccacggcacgacaacgactccacgtcgctggagcaattctgcaaggacaccgtcatgaccatctggcactaccacggcggctgccaggtgaacagggtcgtcgacgccgagtaccgcgtgatcggcgtcgacgcgctgcgcgtcatcgacggctccacgttcaacgcctcgccgggaaccaatccgcaggccactgtcatgatgctcggcaggtacatgggagtcaaaatccaaaacgagaggttgggaaatgaaggattaggaaggagaaatctgtaattgaaggcttaagtatttgtaatgcactatgtaatggttgagtcattgaatttcctgattctgatgctagtcatgaactagaatttcgctgggataacatgcacatattattggaagtgtgtgctcttaacttcttatgtactactcaaattcaaatgaaattatgttcactcaataagaaacctttgttcagttg

SEQ ID NO: 9440 - DNA, 1768 bp, Oryza sativa
  ref <308>: DATABASE ACCESSION NUMBER: AK106788
  ref <309>: DATABASE ENTRY DATE: 2002-08-28
ccaatttcgccctagcggatcggaggatctccggcaagctagcgaggccatggcgctgcccgacgacgtgctcgcggccgttctccggcgcctcccgccgcggggcatcgccgcgccccgctgcgtctgcaaggagtggcgcagcctcgtcgacggccgccgcctgctgcgcgcggacctcctcccgctctcgctggccggcatcctcctcaactacgacagcacctggttcacgcagttcctctcccgccccaccgccgccgccgccgtctcctgccgcctcgactacaccgtgcctccgccgcctgcctacatctacgtcaaggaccactgcaacggcctcctcctcctgctccgcgaggagtgccgcctggtggtggttaaccccgccacgcggcagtgggagctcttgcccccgccccatcaccatcatcatcccctacctccagccatgggctgtggactgtaacgagaacgagtacctggtgttcgaccccacccgatctcccaattatgagttgttcatggtgcccaaggttccttacaagctgcgcgaggaagaagaatgcgaatggccgccgtcgacattgatcctgcctgtgttttcatccaagactggttcttgggaggagagggcatttgatcgggaaggggatgctgcagggacgttaccagccatggttgggtcaactccattttgtgatcatcagtgtggctactggcgaggagcactttacgtatgcttctccgattgctttgtcatgaggtaccaactcgaatccaccccttaagcatgcatgcattgtattaattgttatcctggttttggtcttgtgagctttaatttgtgatatatacacacacacacattcaatagtattacacctaaggataaaatcttaacctcaaattcattatattttagccgtaacaaaaaaaaatctaacagttttaagattgtaattctgtcagaatttgtctttttttattactctctatatagaatgaatttgaagatatgactttgcacgtaaatgtaatactattgaaagtatatgtatgaatttttctagaatttttgtgataatttttagttggtgtacacggtgtgtatatatgagggcatgtgtgtatagtatacgctcccatacatataagatcatgttattgttgcagaatatcaccatcggacaataagtatcgagtaattagaatgcccacggaagatccaggagatacacaattttatctaggaaaatcaaacaacgggatatattgtgcatcattaccatcatttctgaggccccaaattttggtttggtttcttaacgaacggtactgtggtcaaaccgagtgggtgttgaagcatgatatggacatttcccacatcctgccgaatctgaactatgatgagcagcagcgtgatggaccttgggtcttacaacattataattatagaccttttaattttaattatgatgatgatgatgacgaagacgatgtggagctcgagccaatagtggaagagaaattcgagaaatttgagtgggactctgacaatgataatgttcttgagcctggaagtatgcgcgagaattgctatatctatttccttggatttcatccttacaaagatatcgtcttcttaggtgatgaatttgacagagtgctagcctataattggagtagctcaaagcttcaggatttgggcaaagttttcacagaattttatattcgtcttactacatacagattgcattgttccctg

SEQ ID NO: 9441 - DNA, 2134 bp, Oryza sativa
  ref <308>: DATABASE ACCESSION NUMBER: AK106789
  ref <309>: DATABASE ENTRY DATE: 2002-08-28
atccaaacacctcttcacatttttccctccaagaaaccgacccgctccactccaccccgcaacgcaagaaaccaagaactcctcgaccgccggctcgaggccacggccacccacccaccgccgccgggaagcagcgattcttcctcgggaaggaggacaccgccggccatggatccggaggcggaggaagcgcagcttcgcctcgagatggagttggcaaagaaggccaaggcggacatgtctgggttgcaacgctccagcagcctcggcttggaccacgccggcttgtatccgctgccattgccgccagggtggcggtccgccccaacctcgcccctgaggacaccatcgagcccgcccccgctccagttcccgccggcgtgggcggctgatgttgccggcacgtcgggctcggcggcgcccgaggacgatggcccagcaagaaatgccggcgctgatgaagccacggctgggtctgcgcccaagaacgaggacccagcaagagctgcgggcgccgatgatggccccacgaggtctgactacgccgcgatgatgcggatggcattggccaagttccaagacgacgatgctgctgccgacgacgaggaggcggcgtccgcggtgatggagcaggcgatgaccggcctcatggacctcacctaccgcaaagcgaagcctccagagctgccttacgagttcgccacaagatggcctattcctattgctcatgatggtacgcttcaagcggaagtaatgcgtgatcctgttatcttgccttctggatattctgttgatcaaacataccaaaacaaccaaaaacggcagaatccatggacaaataccagcacatttactgatcactccttgccctactctctctctgttccaaaccaccttctccgtgacatgatttctgcatggtgcctcgatcactcggacctttccccatctaccacttctgatacaccttccactcccttggaaccttcagaggaggaacaaattcaacgcatcctaaaactattctcagggaattctgcatcgcaacgagaggctttgaaactgatccagctactcactaaaaccaccaaaggggtgcaaccttgccttgccaagtatgcggacattatcccagtgctgataaatcttaggaggaaatataaatcgagttggacacaagatcttgaggaagagaggctcacaataatcctcaatctgaccatgcacaggcaaaacagggagatcctagctggacagaatgaattagcaggtgctataaaaaaaattgttaagaaggctggcaatcgtggtaagcgaacatcatccttggcgaaggtagcttctatagttgctgtcctgtcagagtttgacatgttcaggaaaagaatgctggatgctggtggaatgaaaatgcttcgaggtatgctcaagataaaggatactgaagtgataacggaggctgccactgcgatccttgcactctacgcagatggtgaaggcgagcaaccagccagatttcatgaggcgcctcagatgctgctggaatgccacatgttcactgatgggatcctgcttcttcttgaccgtctgccaaaatccccacgtgttttcagaaaaatctgtgatcaggctttgcaattggtgaatatcgtcatggctgaagatgcaagtgggccggtgacacgtaagggcatcctctcagcaatttccttgatctacgagattgttgaaagggatgtgggtaagatgaatgcggtgaagaacatggaagatttcatcgagcggttgcgtcagctatcatcagatagattgccgatgcagaaaatgctccaggtggagagaataatcaggactctgtcagatgcgtttccagctcctacggtgcgagggcgatgccaagaacccagtggaagccgtcttctagcttgaatcttatactgttcttctgtacagatctcaaaaggctcgagattttacttctgctcgcttaactttctggagaagtttgaatttgttgactgtgcagcaatgtgatggatcacacgaacaattcaaagcatagacagaataactttgtttcacttcctggtgagagattgtaacaaatgattggtgttagtaactgaccgaattg

SEQ ID NO: 9442 - DNA, 766 bp, Oryza sativa
  ref <308>: DATABASE ACCESSION NUMBER: AK106790
  ref <309>: DATABASE ENTRY DATE: 2002-08-28
aatctacatagaaatcagccgagaaaggagtagctaagctaggagaggatacgtagtacgtaccagtaccaatggcttcttcagctgtcgttgccgcctgcgtcgtcgtcgtcgccgctgcgctgctgctggtcaccgcccccggcgcggcggcgcagcccggcggcgcgtcgtccgggtccggctgcaacgccggcctcatccggctcctcccatgcctcggcttcgtcggcggcaacaacgccgcgccgtcgaacacgtgctgcgccaacctgggcagcatggtgcacgacgagccgctctgcctctgccaggccctcagccagtccggcggcggcggcgcgatcccggtgcccgtgaaccggacgcgcgcggtgcagctgcctctcctctgccgcctcgacctcccgccggcggccaccgcctgcccagggtttgatctagggggagcagcgccatcgccgccggtgagcgtcccgcgctcgacgccgaactccactgctccatcgacgccgacgccggtgacggtgacacgggcgccgccgcaacagatgacaccgtcaccgaagacaagcagccagacgccggaatacagcagcgggctcaagctgatagctgactgcgttcctgtcgcacttggttttatggcgttggtgtcagctctgacattctgaagacttaggggagattagaattgtgccgtagagaagttatttagttgtcccctgttgtttttttcatagcaaatggatttagcagttgaggc

SEQ ID NO: 9443 - DNA, 1731 bp, Oryza sativa
  ref <308>: DATABASE ACCESSION NUMBER: AK106791
  ref <309>: DATABASE ENTRY DATE: 2002-08-28
atgttgcatcttcatcccctgcaaacctacaagggagaaaaaaaatagttggcatgtattaatcggaatccgagtctcacatgtattaatcggaatccgagtctccgactcggatttgtactagctctcctcctataattcacgcgccaccgcttgcttgcattgcatgcgttctttgacacaaggacaacgtcgcagattcgcagccaaggacgtcgtccgtgatggcgctccgaccaccgcggccgtgtccggccggcgtgcagcagcggcagcacgacgtcgacggcgccggcaacgccaagacttccccggaacagaagctcgagttgctggacctgcaggaggaggacgacgagctcatcttcctcgacgccgacgacgaggagggacgccagctgcgcgagaagctggagtcgctggagcgggagttctgcctgctggatgagcagcgggacaacgcgctgttccagattcacgtgctggaagagacggtgcgcttccgcgaggagctcgtcaggcggctgacggcggtcacccccctcgtcgtcgcccagctcgacgaggtcgtcgacgagcaccacgccgtcgtgacgctgggcgacggatgcgagaggaagatgtgcgtcggcgtcgccggctcgctcgaccgcggcctcctcaagccctcggcgaacgtcgcgctgaacggccggtcgctcgcgctcgtcggcgtgcccccctccgacgtcgccgcctgctcggccgcgcggttcctcgtcgcggacgccgacaagccgggcgtcgcctacgacgacatcggcgggtgcgaggcgcagaagcgggaggtgcgcgaggccgtggagctgccgctgacgcacccggagctcttcgccgccgccggcgtcgacccgccgcgcggcgtgctcctgcacggcccgctgggcaccgggaagaccatgctcgccaaggccgtcgcgcgggagacctcggcggcgttcttccgcgtgaacgccgccgagctcgcgcggcacgacgggccgagggtggtgcgcgacctgttccggctcgccagggacatggcgccggccatcgtcttcatcgacgaggtggacgcgatcgcggcggcgcggcaaggcggcgacgacgacgacggcggtgccaggcgccacgtgcagcgcgtgctgattgagctgctcacccagatggacggcttcgacgagtccaccaacgtgcgggtgatcatggcgacgaaccgcgccgacgacctggacccggcgctgctccggccggggcggctggaccgcaaggtcgagttcacggcgcccgagagcccggaggagaagcggctggtgctgcagacgtgcacggcggggatgagcctggacggcgacgtcgacctcgacgccctggcggcgcggcgcgacaagctcagcgccgccgagatcgccgccgtgtgccgcaaggccggcatgcaggccgtgcgcgacaggcggggcgccgtgacggcggacacttcgacaagggatacctcgccgtcgtcggcaagaagcccggcgacgccgccaccgagttccacttctacaactgatcgccggcttcgcttagcaacacagctcatatctttacgcctttcactaggaaaaggcattgtatagctcctgcttgggcaacgtctcaaatgtatacaattattctgtaattcactgaacaaatttaagatagaaacaccagcaattttaccttcttttc

SEQ ID NO: 9444 - DNA, 2366 bp, Oryza sativa
  ref <308>: DATABASE ACCESSION NUMBER: AK106792
  ref <309>: DATABASE ENTRY DATE: 2002-08-28
ctctgaacctgtcactctttttttctgtgtctcttggaggagatgatggagatcagcagcaatgaggagatgatggagatggccattgttgagcagctgcctccttcctctcatcatctcaatggtggcagtgttgaggttgacatggaggaggatcatgtgtggcccaccaaagatggccctctccctatattccttaagtttgagaatgtggagtacaaggtgaagctgactccaaagaacccactaacagctgcaagggtggcatttgcatctcacaagagcactgaggatcagggcagctgcaagcacatcctcaagggggtaggaggcagtgttgaccctggtgagatcctggcactgatgggcccatctggcagtggcaagaccacgctgctcaagatacttggaggcaggctcagtggtggtgtcaggggccagatcacctacaatgacaccccctacagtccctgcctcaaaagaaggattggatttgtgacacaggacgacgtccttttccctcagttgacagtggaggagacccttgtgttcgctgccttcttgagactccccgctcgcatgtcaaagcagcagaagcgcgacagagttgacgccatcataactgagctaaatctagagaggtgccggcacaccaagatcggcggcgcgttcgtgcgcggcgtgtcgggcggcgagaggaagcggacgagcatcgggtacgagatcctcgtcgacccgtcgctgctgctcctcgacgagcccacctcgggcctcgactccacgtcggcggcgaagctcctcgtcgtgctccgccgcctcgccaggtcggcggcccgccggacggtgatcaccaccatccaccagccctccagccggatgttccacatgttcgacaagctgctgctcgtcgccgagggccacgccatctaccacggcggcgcccgcggctgcatgcgccacttcgccgccctcggcttctcccccggcatcgccatgaaccccgccgagttcctcctcgacctcgccaccggcaacctcgacggcatctcctcccccgcctccctcctcctcccctccgccgccgccgcctcgccggactcccccgagttcaggtcccacgtcatcaagtacttgcaggcgaggcacagggcggccggcgaggaggaggcggcggccgcggcggcgagggagggcggcggcggaggtggcgcggggagggatgaggcggcgaagcagctgagaatggcggtgaggatgaggaaggataggcggggcggcatcggctggctggagcagttcaccgtgctgtcgcggcgcacgttccgggagcgcgccgccgactacctcgacaagatgcgcctcgcccagtccgtcggcgtcgccctcctcctcggcctcctctggtggaagtcccagacctccaacgaggcccagctccgtgaccaagtggggttgatattctacatctgcatattctggacgtcgtcgtcgctgttcgggtcggtgtacgtgttcccgttcgagaagctgtacctggtgaaggagaggaaggcggacatgtacaggctgagcgcctactacgcgagcagcacggtgtgcgacgcggtgccgcacgtcgtgtacccggtgctcttcacggccatcctctacttcatggccgacctgcgccgcaccgtgccctgcttctgcctcaccctcctcgccaccctcctcatcgtcctcaccagccagggcaccggcgagctgctcggcgccgccatcctcagcgtcaagcgcgccggcgtcatggcctcgctcgtcctcatgctcttcctcctcaccggcggctactacgtccagcatataccgaagttcataaggtggctcaagtacgtgtcgttcatgcactacgggttcaacctgctgctgaaggcgcagtaccacggccacctgacctacaactgcggcagccgcggcggctgccagcggctgcagtcctcgccgtcgttcggcaccgtcgacctcgacggcggcatgcgcgaggtctggatcctcctcgccatggccgtcgcctaccgcctcctcgcctacctctgcctccgcaagcggatcagcctcatgcccttgtagtccatcgatctgtcagatcaggatcagttggttcggggaagaagacgactgatgtggtagtgaattgcaattgcgattgatgatggtgaatgggccattgttggtttgggtgctgtgaattgtttcaaacttgagttcttttctttatttgagaagtatttgaggcttgtctgcttagcaagttgggaaataatcaaccccatcattttagcattcagcttgtaagcataagcgaagatttatttaaaacttatttt

SEQ ID NO: 9445 - DNA, 1775 bp, Oryza sativa
  ref <308>: DATABASE ACCESSION NUMBER: AK106793
  ref <309>: DATABASE ENTRY DATE: 2002-08-28
tcaggtaactgcaaacgatgacccgtctcttctgagacaatctctcctgataaataaagaatcagatattgtatcatctgaatgaatatcagtatgaatcttcaagctgcaaatagcattacaaagaacatatttatctgaattcttgcaaacaacattgctaaataatctctccgttttaggttataagacgttttgactttgctaaaagtcaaactatttcaagtttgactaagtttatagatgaatacagtaatatttataatactaaattagtttcatcaaatcaataattgaatacatttccataataaattagtcttgggttgaaaatgttactaatttttttacaaactttatcaaacttaaaacagtttgactttgattaaagcaaagacgtcttctaaaatgaaacggagggagtagcgctgtactatttctcttctgaatgattgcaatgcaggatgaagtgatcccacacctggaggctgggatggtgccatcaaccatcgaccctgacacggctggaaatgctgagagagcaaacagagccaagaagcaagtgaagatcagcgcgtggaagctcgccaagcttgacaccaacgaggccatgaaagcggcggcgagagctcgggcgtcctcctccgtcctccggccggtggacgctcgccaccgcggcggccacgacgccggcgacctgagctccagcggcaacggcagcgtcaggagcagcgtgagcgccgccgccaaggagcagaggaggagggcgtcctctctcccgagctcgtgcgcgcagagcgtggcgagccaggacgagtacgagcagagcggcagcagcgtgatgagcagcccggtgcgcctccacaagctcgcgccgccgccattgccggcggcgcacaacgtgccgcctcggccgccgccgccggtgaacgctgctccggaggcggcaatacctcggccgccgccgcctgttcctccggcgacgaggatatccaacccgatgttccagtcggccacgtcgtacgtccgggagaaccggagggcgtcggtcgtgtgggaccaggaggccggccggtacgtgtcggtggcgccggcgccggcaacggcgaggccaggaggaggcggcggtggcgccgagcagccggcggcgagggcgccgcctttcttggcgaacccaggtggcgagcgcgagccattgagtgccgcccgtagccgcaataatcccgccgcgcccgcgcccacgaacgccgccccttcgtcgtcgtcgacgctgccgtcggagaggctgacgtactccggccagtcgatattcttcggcgggccactgctgggcggcgccgccgccgccggcgaacctcgaagggacgaggcggcggggacgagggcccgcggcggcgagtccttcccggtgtttgctcccggaacattccagaagaagccgccaccgttccgtaggtgaaatctgcaactgatgaccggcaatggcgatatcatcgccggacaatgctaatctccggcgaggtgacactggaagcagaatctgcaagaacaagtgatcagcatatgctgtcgaagcattaaaaggaaggaagattaattaatgtggagttttacatctgatgaagtgaagataattacataaccttgtctgattcaggaagagagagaaatcgggagcaaagagatgtggtgggagcaaagagttttgccatgtacagcattcttttctcggtaattaattccgaacgaaatcatttaaaactccgggagttagt

SEQ ID NO: 9446 - DNA, 1455 bp, Oryza sativa
  ref <308>: DATABASE ACCESSION NUMBER: AK106794
  ref <309>: DATABASE ENTRY DATE: 2002-08-28
ctcttcggtttctcgcttcccccctcctctcctcttctctcttccctctcgcgtctcctcctctcctctcctcgcttcttcgtctcgcttgctcgctcgccggcggttgctgcggccgctgctaggccggatcgccgccgccgccgccgccgtcttcgggttttggggggagttcgtggtggcggacgggatggggtgtatgcggccgtgagattgctgctgttggtgtgctgcttcgtcttccgctccgttgctgttcgtgtggtggtggtggtcggccggccggtggggttgggcagcaagtggaatcttcaagattgacagcaaggaatatgtaccattggctggacatttgtcaaccaaatcgtgcgagaatgtatgtatgctgtcaagatctttgcgtgccttggtcaacgtgacaaagcattccaggttagaggtctggccagcaagcttggggacatcaagtttcactgatgaaaacattgccttgtttttatttccacccaaaatgagacctgatggaaaactagatcaactagttaaggaagtcattgagtatgatctggccttacgtgctgtcatgggcaaaacggagatgctgatattcccttcgacaatgctgcctaaacagtaccaagcctttcaaggaaaacactacctgtgggggttgttcaggcccaggaaagatatagttggcgtagcagaagaacaagcagcacatgccatgtgtctagagaaccaggagggttccaaggatggcacagaacaagttgaatttcacggtgttccggatcccaacatggatactgaacctcaagaccctgaagcagcggagatgcaagacgcagctgaccggaacatggctcccccaatcggtggatcaaacgcatcccgggccaatcatccttcaatggctgctacccaaccggcaaatcgtgaacagatcgacccaagcttaggaattccccaaggcaggatgtttgcttttgttgctcagccaactccaagatttgagcaactcatgcaagagctggaacgcgagggcgcgctgatatcaacgatgccaagggtgacatatgggcccggctgtggccaaagccaagcaacaacggcaaaggggtagcaaatgtgcttcccttgatctgaacttaggctggcttttgcatatactgtcgtttgtttgtgtcaatccgaaggaggtaggtaagcagtttacaggtttcaggtttttttgtgcatagagatacataacatctcttatgctgatgtagatagttgaatctgtctgtcatggaaggaagcctgcttatatagttcaggctgacgtatcctggaacaaagtctcgtagctgttgttaacttgttattaatgattcctatgtatggaacaacatctagagctacatggttattaactcctgttaattacatggttattcagagattagctcc

SEQ ID NO: 9447 - DNA, 1558 bp, Oryza sativa
  ref <308>: DATABASE ACCESSION NUMBER: AK106795
  ref <309>: DATABASE ENTRY DATE: 2002-08-28
tcttcttccctccctcctctcctctcctcgcttccgggttccgccgcggcttcatccgatcgcccgcgccaagaactcgatcctcatggaggaaggcaagcacgcggttgttgatctctccgaggaggaggagcgcagaggaggaggggctccgggggagggtagctccgacgaggtcggcgatgccgtgggcctggggcgaggggccgagtcgacggagccggagggctcatcggcggttgacgatgccggccatggggtcgcggcggaggttgccaagaacgacgatctcgaggaaccgttgctcgagccggagggagtcacggcggtgggaagcggcggcggagatgggaccgcgtcggacggcggcgagaacgaactccatgaggtgcccaagaacccgatggcgactcgcttcgcgttccgagccacggatgcaaacgcgacgccggtctccacctatcgcggcatgttgtcacgaagcaggaagaatgccggcccgacgcgcttcgtctccgcgggagctcccccgtcggctgatcccgagactcctgctctgagcacgtcgtcgtcagagctcgtgaaaagctcaccggagaatgcctctgcagtgcccgatgctgaccatggcgcctcgccaggcagaggaaacgagcaggatcttgaggcggccgagaagcagagcgaggctcgcttcgtgtccggccacacggcggcgaacgcgatgcccccctccaccttccgcatccggccgtctcgaagcaggaagcaatccagcccgacgcgctccatcctcagggaagccgatccgcctctgcctgctccggacgcggcggcggcggcggcggcggcggcggagtcctcgcaccgcgagccttctcggagcaagaagcagccccgccctgagcgcttcatcccggaggaaggcgaggcggccgcccgcgccaaggcttgccggagtggcattgctctcgacaggttcatcacctctcagctcaacaacccgtcgggaccgagcacggagtgggagagggaagtcacggcggctgacgtcgtcggcggcggccagggagaggaatgcaccacgagcgatcagtcttcttgctcgatagccatctctgattcggggccacctgaagagccgctacctgacgacaggcgaagaatctacagcgttctggccgttcttggcgtttcactggccgtcagtatggccgtgctcgcgctgttctacatctttggatccgagtctccatctccgcccagcgacccgaaccaggagtgacagggagcgatctgaatgattcaagattcaggaaaggatagctgacacaattccttatctgtaattactttttcctcttcggtgacgcgctggtgttatctgcttcactgcttgtaagggagaagatttgctgagttctgttcgacgcgttgctattagatggttgtaaatgtagcagaattactgattactgtctgtcttgtacagtttcgatcgtgtgttgttacacggtcgctctggtgcctgtatataagtgaaagaaagaatcactgc

SEQ ID NO: 9448 - DNA, 2096 bp, Oryza sativa
  ref <308>: DATABASE ACCESSION NUMBER: AK106796
  ref <309>: DATABASE ENTRY DATE: 2002-08-28
gtttgtttattctcttctccggcttcctcgagctcgccttagctagaagcctgtggccccgtgatctctcactgttgtggcttatatagagatagatatccggctcggttccattgatccgttcttgtggagttgtgtgatcagagctggagagattggctaggttggaggaggaaggggaattcttggttgtaagggaagaggtgggagtggtcaccggcggtgcgcgcgcggaggcggacatcatgctgagttcttgcgcgccgacggccgtgccgccgcaggatgcgtccggtgcggcgacggagccgttccggtctctgcagatcgccaccgccggtgccgccgcgaagaagaagcggcggccagccgggacacctgacccggacgcggaggtggtgtcgctgtcgccgaggacgctgctggagtctgaccggtacgtgtgcgagatctgcaaccaggggttccagcgcgaccagaacctgcagatgcaccggcggcggcacaaggtgccgtggaagctgctgaagcgggaggccggcgaggcggcgcggaagcgggtgttcgtgtgcccggagccgacgtgcctccaccacgacccctcccacgcgctcggcgacctcgtcggcatcaagaagcacttccgccgcaagcacagcggccaccgccagtgggcgtgctcccgctgctccaaggcctacgccgtccactccgactacaaggctcacctcaagacctgcggcacccgcggccacacctgcgactgcggccgcgtcttctccagggtggagagcttcatcgagcaccaggacgcgtgcaacgccggcaggccacgcgccgccgaggcgtcatcgtccccgggacgcggcggtggcgtcgtggttggtgcgccggcggcagcatcgtcgtctcagcagcagcagctttttgcggtgccggcttcgttgtcgcggacggcgtccagcgccagcccgtcgagcgacctggtggtgagcccggtggcctggcctgctactggtggtggtggtccggcaatggtgagtccccgtgctgcggcgccggctcctgctggcggtagcatcgcggcgttccaccaccggttcactgacccggcgctgtcgccaccgacgccgtgtggtggccggcgaggaggatgccacactacccacagcctggagctgcagctcatgccaccgcgcaccaccaccacctgcgcaggcggcagcctcggtggtactccagttgccaccgccgttgggtactacgcttcctcttcgccgcattcgcctgctgctgctcttccgtcgcggcagccggtcgccgacgcaatgcggctgcagctctcgatcgggttcggcggcgcacgcgatgatggcaacaacaacagcagcagcagcagcggcgaggtgtcggcctcggcgacgaggctgaaggaggccgcccacgagcagctgcgtctggcgatggccgagaaggcggccgcggacgaggcgcgcgcgcaggcgaagcggcaggcggagctcgccgaccaggagctggcgaccgcgcggcggatgcggtaccaggcgcaggtggagctcagccgcgcgcacgtgctccgcgaccacgccatacgccaggtcgacgccacgcagctgcagatcacctgctacagctgcagccacaagttccgggcgagagcggccgccatgatcagctccgacgtcgccagctacgtctcgtccgtcgtcaccgagggcggcgacgccgaggtcgacaacgacggcaacttgcaccgccgccgcctcaacgctgacgatggcatgccaaggggccattctaggacgatggcaatggacctcaactagctcgcaaaaatcactggaagaaaaaacaatctttttttttcttttcttttgtgccagattgctctccttttgttttaccaatgagctagctggtggtggtatgtgctcatgtgcatgcaccatgcaatggcgatgtattgtaattagatgcagtgatgagatcacaagctccagtgcctagtggttgtgttctctcgcatggcagattggctgggcaggaaaaagctaaaaggggtctactactacgct

SEQ ID NO: 9449 - DNA, 1730 bp, Oryza sativa
  ref <308>: DATABASE ACCESSION NUMBER: AK106797
  ref <309>: DATABASE ENTRY DATE: 2002-08-28
gtgtgttccaaattaatccgcgtggttaattagctctagctagagatcggtagctctcgactagttggacatggccgccacgggcgtgctcgtcgtcgttgtggcgctcgtgttcgccgtgacggtggctggcggcggcggcgccggagtaggaggtgatggcgggttcatcacgtgggaggacctgagcatgccggccggggcggcgcggagcagcacgtgggacgacacggccggcggtggcggcggcaagaggagcggcggcggcggcggcggcgagcagcggacgacgatcgtggtgtcgccggacgggacggggcactcgcgcaccgtgcagggcgccgtcgacatggtccccgccggcaacacgaggagggtcaagatcgtcgtcaggccgggcgtctacagggagaaggtgacggtgccgatcacgaagccgttcgtgtcgctgatcggcatgggcaccggccacacggtgatcacgtggcactcgcgcgcgtccgacgtcggcgcgtcgggccaccaggtgggcaccttctactccgcctccgtcgccgtcgaggccgactacttctgcgccagccacatcaccttcgagaactcggcggcggcggcggcgccgggggcggtggggcagcaggcggtggcgctgaggctgtccggcgacaagacggtgctgtacaagtgcaggatactggggacgcaggacacgctgttcgacaacatcgggaggcactacctctacaactgcgacatccagggctccatcgatttcatctttggcaacgcaaggtccttgtaccagggttgcacgctgcacgccgtggcgacgagctacggcgcgatcgcggcgtcgcagcggagctcgccgtcggaggagtccgggttcagcttcgtcggctgccggctcaccggctccggcatgctctacctgggaagagcatggggcaagtactccagagtggtgtactcctactgtgacctcagtggcatcatcgtcccccagggatggagcgactggggtgatcaatcaagaacaaagtgatcaactttcctgccatttaatcacacactcaatttgctgctcttgattaaaattacagttacaattataattgcagctactctgtcaggttcacatggcatattaatattattgatcgaagagattatattttagctgaattttactagttaccaacttaccatcctcgatgatcaaatggcataggaagtggttgggagttgcattgcaggctcaccaaacagtcttgataggggaattcagttaccacatgtgacaaggctgttaccaaatgagttccttttcttttctgaaatcctagagacgatactgccatatcatatccgtcagaaaatgacagagaatgtgtctgaatcttctgacaggacggtgctgttcggggagtacaactgcaaagggccaggggcgagcacgaagcagagggtgccgtggtcgcggacgctcacctacgacgaggcgcggccgttcatcggccggagcttcatcaacggcgagcagtggctccggctgtagatcatcgccgattcttcacaagttcagaaagttcagactgctgctggttccttctccactgcagtctgcagatagaacatgtacctagtagatataatagctgacatgtaacgatgtaccatgtaacaaactttgacatacatccatatgtagtgagatgagcagccccatc

SEQ ID NO: 9450 - DNA, 2633 bp, Oryza sativa
  ref <308>: DATABASE ACCESSION NUMBER: AK106798
  ref <309>: DATABASE ENTRY DATE: 2002-08-28
agagttgtcagagtcatggtctcatggagcctaattgatttgccaaccaccaaggcaccaacttgttaaattagtagagttcttctcactacgctaactcgctatgtccttaagatcttgactggtctctccgagtggcgacctgctgattcttcgagtagtagttttcgtattggcagtactgtccggccgctgattctgctcaaagaccggccatggccgccggcgtcctcatgacaaaaccgttcatggctgccgcttctgctctagcctgcttgctcgtcatgctgcgctgcttgcctagcgtcgtcgctaccacggtatctttcaactactccaccttcagcaacgcgaagaacatcaccctccagggcagcgcggcgttcgccggcggggggtgcatcgagatcaccaccggaagcaacctgccgagcagcggcaccatgggacgcgtggcgtacacgccgccggtgcagctctgggacgccgccaccggcgaggttgccagcttcaccacgcgcttctccttcaacatcactccgacgaatttggacaacaagggcgacgggatggccttcttcctcgtcggctacccgtcaaggatgccggacaagggcgacggtggcgccctcggcctcaccagccggtactttgacaccgtccagcccggcgagaaccggttcgtcgccgtcgaattcgacacttatctaaaccgcgacttcgaccccaacgcaacctacgaccacatcggcatcgacgtcaactccatcagatcggtgcagaccgagtcgctgcccagcttcagcctcaccgggaacatgaccgccattgtcgtctacaacagcagctcgagcatcctgtcggcccagctggtgaagacatggacgaatggctcgactacactttacaaccttagcaccaccgtcgatctcaagagcgccttgccggagaaggtctccgtcggcatcttggcggcgacgggcttatcccttgagctccatcagctgcattcttggtacttcaactcctcgttccagcagaatccaccaccggcggtgcaacattccccgaccacctcaggttccggacttgccggagttatagctggagccaccgttggtgcagcactgttcgtcgtgctcctctttgccatggtagttgtccttgtgcggcgacgtcggagcaagaagagaagggaggtagaagaggcagaggaggcgagacacgtagggttggccagagatgacgatgatgacgatgacggtgagcccatcgtggagatcgagatgggcatggggccaaggcaaatcccataccaagacctcatcgaggcgacgaacagctttgcggcggaggagaagcttgggcaaggcggcttcggtgccgtgtacaggggatacctgagagagcagggcctcgccgtcgccattaagaggtttgctaaggattcctccaagcaagggaagaaagagtataggtcggagatcaaggtgataagccggttgcgccaccgcaatctggtgcagctcattggctggtgccatggccgcgacgagctcctactcatctatgaactcgtccccaaccgcagcctcgacattcacctccatggcaatggcaccttcctaacatggccgatgagggttaagattgttcttgggcttggatcagcactattctatctccatgaggagtgggaacagtgtgtcgtgcaccgtgacatcaagccgagcaatgtcatgctggatgagtaattcaatgccaagctaggcgacttcgggcttgcaaggttcatcgaccatgccgtggggatgcagacgatgaccgccgtctctgggacaccaggctatgttgatcctgaatgcgtgatcaccggtagagcaagcttagagtctgatgtttatagcttcggcattgtcttattggaagtggcatgcggaaggaggccaatgagcctacaagataaccagaagaatggcatcttccggttggtcgagtgggcctgggacctgtacggacaaggagatgttgtctcagcggctgatgagcggctcaacggtgattacgacgtgtcagagatggagcgtgtcatcgttgtggggctttggtgtgcgcatccagacccaagcgcatgaccatctatccgagcagccatggccatgctccagtctagtgggcaattaccggtgttacctgctaagatgcctgtgccaacatatgcgccgccagtggcctcagtggaggggctcttcacatcgtccactggaatgtcgtcctcaagtgcagcacaatcatcatcgacgaccagtggctacatcactcacacctcgagttcctctaacacatccacttcagctggttcaaaggactcgtcttcgttgctcaaacatcaatacttatgatgttcaattcatttgctttgttactaattttgacttgatgcttgaatgggatgtacaactcgtgagccattgattttccatttagagtagtctaattgccaatgtgagtaatgcatgtgcatttatgccatgatttaaattttactcccattttagtttttctagatagatttatcctgccattttctcttcaatgtctgactactataaagtgcataccttgcatgtttt

SEQ ID NO: 9451 - DNA, 2118 bp, Oryza sativa
  ref <308>: DATABASE ACCESSION NUMBER: AK106799
  ref <309>: DATABASE ENTRY DATE: 2002-08-28
caaagaaatatcaagctcggcactggtctgatcagtcaaaacaacacatctttatttctgcatcagaaatggctgctgtattcaaagaatcccagtatggtacatatttggaggccaatctaagtagttcgtgtggtaataaagattctcctcaggttcttcccaggttgcttttgttgggatcattacatccacactgtttctccggacaagattacatcctgttgatgaacaaaatgggaatctttatctggcatgaatatttctcgacttccagtgttctataaacagggagacaatttctttcatcctgcatgggctctcacttccaaattggatactaagatttccatattcctttattgaagctgttgtatggtcatgtgttgtatactacacggtaggctttgcaccaatggttgacaggtatacccaggacatgtacccttttgatcaatatgcctaactagctacatcttttgtatttgttcatgttgatctaacataccatgtgcagattcttttgtttcatgttgctgttattctctatacatcaaatggcattgggccttttcaggataatgggagctattgcacgagacatgaccatggcaatgtaaccttttcagccactcaccatgaagttccacaatgtgaactattatgtcaatttgccaaaggaaatgcaagcaaaagttattcctgagaaaagactacagttgctgtgtgaagtgtgagtacaactccatcacaagtgtgagttcaactgacaactgagctctctgtattgtcgaccctaattcctttctcccaaccactagggccaaaattttgtgaacactctactgtagattgttgagccaactggtgtgtttactactcgagtgtgatttctatttatacatcacttcacctacatcagtattattttgcagagaatccactgaagagatatattgtgcacaatcagtaactcgcaactccaattgtgttaaactgctaatcacaattaacaacaacaagctagatggctctcgaggcgttacctgtagatctagatgctctctggtcggggccttcctgttgacctacggctcgttggcggcctccttcgctgcctccgccgccattcggccggccgccacctccttccgcttggcgaggcatctctgcgtatgctcgttctcccttgtggtagatcctttgtagaatcttccgcaggagcactgaaagctgtcctccgcagccttctgccctgccttgtccttgcggtcgctggcggcctgcgccttccacgctctggtggtcttcgccatcggagccggagggggacggggtcgtcggcggtggcggtggcggcggaagattagagcttagggaggggacaggaggaggaggcggcggcggaagggagggcagtggacaggggacgcgagatcgcttcgttgttttgtgggccggcagtactaggcctgctaatgggctgacatataacctaaatccaacccacccgaagttcaccacagttttacgccagtctatctaaggtcccctaactataataccagaaatgtaaaaaacatcaaaaaaaaaaaaaatctcgagacagtatagatgcctaattttgctgacatgccatcctagtcagaaaacacgagtacgggaccaggtcaatttatcatgttagcgaaatcaactatctatactacttgaggacctaatttaatcttgttttgcatcttagtggggctaagatttctgatactgcggttttaggatgcgattcaaacttgacaacaagatgagagacccaaagtgaacctatttttccacgaatgcacacgtacgacgcggtgattgtgaacaaggccgcagcacgctccttgccgtcggcgtggagggaagaagatggatgatcgtgcagcagtgcggcgcaacgatctcacggtcgtgacttgtgactcagtacggtccagtccattctattcaacacaaagcccaaacttccctccctccaaattaagcattttttttacgattggtgaatggttataatgtaattacactatgattatactgtagttatacttgaaaaaaattggagggattttctatcgc

SEQ ID NO: 9452 - DNA, 1822 bp, Oryza sativa
  ref <308>: DATABASE ACCESSION NUMBER: AK106800
  ref <309>: DATABASE ENTRY DATE: 2002-08-28
aagaacaccaaacgagaagctccaagctcgcaataattcaccaagaatcgcaccacttttcaccttttcttctcctcctccatttccatccatggcgacgctgctgctgctgctgcacacggcgcaacagtgagctatagctagagctcggcaccacgggttagcaatggcggtggcggcggcggcggcggcgaggcggcgagatgtctcttgtcttctcctcctcctgtgcttcagctcgtcaatggcggcgaccggcggcggcggcggcggcggcgagcaggaggctgacagggtggcgcggctcccggggcagccggcgagccccgccgtgtcgcagtccgccggctacgtcggcgtcgacgagcggcacggcagggcgctgttctactggttcttcgaggcgcaggcgtcgccggcgccggagaagaagccgctgctcctctggctcaatggaggacctggttgctcttccattggctatggtgctgcatcagagctagggcctctcagagttgcaagacaaggagcagcactagagttcaaccagtatggctggaacaaagaggctaacctcctgttcttggaatctcctgttggggtcggcttctcctacaccaacacatcctctgacctctccaatcttaatgatgattttgtagctgaggatgcttatagtttcctggtgaactggttcaagagatttcctcagtacaaggacaatgagttctacatctcaggggagagctatgcaggtcactatgtgccccaacttgctgaccttgtctatgagaggaacaaagacaaaagggccagcacatatatcaacctcaaggggttcattgtaggcaaccctctcaccgatgattactatgattcaaaaggtttggctgagtatgcctggagccatgcaattgtgtcggatcaagtttacgagcgcatcaagaaaacttgcaacttcaagaactccaactggactgacgattgcaatgctgcaatgaacataatcttcagtcagtacaatcagatagatatatacaacatttatgccccaaagtgccttctaaacagtacttcagcatcttcacctgatcgtgcattcttcgcaaataaccaggaacaattcaggtggagaatcaagatgttttcaggctatgatccatgctactcatcctatgctgaggactacttcaataagcatgatgtgcaagaagcattccatgcaaatgccagtggactgcttccagggaagtggcaagtttgcagtgaccaaatcctcaactcttacaatttctcagtactttccatcctacctatatactccaagctcatcaaagcagggctgagagtttggctctacagcggtgatgctgacggcagggtcccggttatcagttctcggtactgcgtggaagcactcggcctaccgatcaagaccgattggcaatcttggtaccttgacaagcaggttgctgggaggtttgtggagtaccatggaatgacaatggtgactgtcagaggggcaggtcacctggttcccctcaacaaacctgctgaagggcttatgctgataaatgcattccttcatggtgagaagcttccgacaagcagatgatatgcgctgctgatgaagctttggaggtacaagatggcatgagatacaggcatggacatcaattttcattgaaaggcgccaatcggatagatttgatatggtagtatccaaatcaatttcaagtgcgccgtaaattcagtactctgttgaacattcttttaaatctgttgttgactatgactttcttcttttgtgttttttttactc

SEQ ID NO: 9453 - DNA, 1000 bp, Oryza sativa
  ref <308>: DATABASE ACCESSION NUMBER: AK106801
  ref <309>: DATABASE ENTRY DATE: 2002-08-28
gcgcgtcacagtctcgcatcgcttcgcttcccagtttcgggtctctcgcttcccccgcgcggatctccacttcggctctccccggctcggctcggctccctccacctcggctcggctcaagtcgagtcgcttcgcgaaggaaaaggataagcaggagacggctcgactcgagaggaggaaaaagaaaagagaagaaaaaagagaaaaaaaaaagaggataaggcggggaggcgtctcgagccggcggccacctcgcgaccctcagatccgcccgtctccggagcagatccggctcgccggcggccgcacgggaggaggaggccgccgtccgccgcggatccccggcctagggtttcgccctcttcagatccggcttcttcagatctggcgcccgggcacatgacaccgacggtcctcatggagtttgggcagcagaggcagattaagcggggctacgatgaaatggcgttccggggcatggcgtcagcggcgccacggggttacgcggagaccgttggcgagtcggagggcgcggcaggcagccccgttcgtgttgactccgaggactcttcggcccccaagcgcaagtgcatcagcctaaacagcgacggcttcgatgtcaagcgggagattttcgtcccagccaagatgtcctcctccgagaggaggcatctccggaagaggttccgcacagagcttgattcggtccggaatctcctcaagaagccggagtttgctgtccctgtccctgtcaatagagctcccgcgctctcgtcctcggctgcccctcgaggtaagaagggacagcgtggtaaccatgtggtccgtggtgccaaggggcgtttcttgcctacaaagccccgacctgaggcttccacggtgttgactgaggatgcgatttttaagcaatgcgatgctattctgaaaaagctgatgactcagaaatgtagtaacatattcgactccccggttgatgctgttaagctgaatattccagatt

SEQ ID NO: 9454 - DNA, 1932 bp, Oryza sativa
  ref <308>: DATABASE ACCESSION NUMBER: AK106802
  ref <309>: DATABASE ENTRY DATE: 2002-08-28
aaaaagagcatagaacaccacacctccatctcctgctcctgcttcttcagtttcttcttcttcttgtttcccctataaaattatttgctacacctcgtattgtatcccaagccaaggagagcatactacactgtttctgttattattgtgtgaagtgaaacaatggaggcagtaggaggaagaagaagaaggccaagaacaatgctgttcttggtgctagtagcgttgatggtgatcatggccatggcgaagacggcgagcggcggcggcggcgatgacggcggcgccggaggtgaccatgaccatgatcatgagcaattcttgaagctttggaacggaagaggcggagcagatgctaaggaagattacctgaattgggacgacgacgacgatgatgatgaagatgaagatgaagaagaggaggaggcggagcaggtgatggcgtgggcggccaagtgccggccgccggcggggaggaacgtggtgaacgtcgacagcttcggcgcggcgggggacggctgctccgacgacacggaggcgttcttgaatgcttggaagaaggcatgctcgctgaacaacgcggtgttcttggtccccggcggccgccgctacaaggtcggcgctgccaggttcatcgggccctgcaagaacaggatgatcatccagatccagggcactatcgtggcgccagatgagccgtcggagtgggatccggcgagcccccggctgtggctcctcttctccggtctcgccggcgcccgcatccagggcggcggtctcatcgacggctccggctccaaatggtgggccaactcctgcaagattgaccgctccaagccatgcaaaggagcacctacggctttgaccatcgactcgtgcaggggggtgagcgtgcggaacctgcgcctgcagaacgcgcagcagatgcacctgacggtgtcgcgctcccgcgacgtgcgcctcgccagcgtccgcgtcgactcgccggaggacagcccgaacaccgacggcatccacgtcgccgactccaccgccgtcaccatccagtcctgccgcatcgccaccggcgacgactgcatctccatctccaacggcagcttcgccgtccgcatgcgggacatcgactgcggccccggccacggcatcagcatcggcagcctcggccagggcggcgcgttcgccgccgtcgacggcgtgtccctcgacggcgcccgcgtcgcgcgcgcccagaacggcgtccgcatcaagacgtggcagggcggcgccggctacgtccggaacgtgcggttcgccggcgtgcgcgtcgacggcgtcgaccaccccatcgtcatcgaccagttctactgcgacgcgacgcggccgtgccggaaccggacgtcgaacgtgcgggtgagcggcgtggtgttccggaacatcaccgggacggcgaggcgcgcggaggcgatcaggctggcgtgcagcgacgccgtgccttgcgtcggcatcgtgctcagcgacatcgacctgcgccgcgaggacggcggcggcgaggtgcagaccgtctgcaactgcgccatgggcttcgacgacggccgcgtcagccccgccgccgactgcctcaggaccagcccctgcggcggcatgtcgccggacgactaccaccccgacgacaaagacgacgacgacgaggtccggcataccgagctgtgaactgaactgaactctcatgcgtgaatgctaagatcgatcggcttaagctcaatgaagcccttttgaccctgctattaattacagtagtagtaattaattaattataattaattaatcctactggtgctttcctttttgttacagtgtgctttgtaaattaaatgtcacagtattatatactcactccgtttcacaatgtaaggtattctagtatttctaatatattgatgttaatgaatctag

SEQ ID NO: 9455 - DNA, 1763 bp, Oryza sativa
  ref <308>: DATABASE ACCESSION NUMBER: AK106803
  ref <309>: DATABASE ENTRY DATE: 2002-08-28
agatacacagctccgccgccgacaccgctccctccgccgccgcgaaaactccctgcggcgtccgtccggcgattcggagaccatggggaaggctgcgagaactgggctgccgccgcgccgtcgcggcctcccggaggagatcgtcgtctgggagatcctggtacggcttccccccaaacccctcctccgctgccgccaggtgtgccgcgcatggcgccgtctcacctccaccggcgacttcctcctcacccaccaccgccaccagcccaccctccccctctcgacagatacaagtgcaacgaggagttcctcctaggcatcgtttcgctcgaccgccgcgccgctgcagcccggctccagcccgtcgcccagctcgatgacacctgctacatgatgagcgctgatgcctcctgcgatggcctcctcttgctctccatcggtggaatatggtggttcatctgcaacccaatcacgcgtcaattcggtgcgctccacctgctttgtggcttcatggtcatggggttctacaagcatccccctactggggactaccgactgctactataccgaaatcaggagctgatgagtgaacatctgattcctggcgataggaatacctgctatgtatacacattgggctccagcgacgtcccgaggtgtatcgggtggcctgagacgtcggcgagcggcgcaactgttgtgctccattgtagcctgcattggtaccagaggtcccaggatatgattttggtgtttgacaccacagccgagtcgttccgatggatgcgcgctccatctgacaggatgaagtgcacattggatagcgggaatctgtttgacatggatggtaagctcggcatgtactgctctaatgatggatgcacaattgtagatatctgggtactgcaggattataagagagagatctggtctctcaagtaccaggtggaattgcctgttccagagatcagggggatgcttggtggggcttatcattggagtgcgatggtcttatcccaggagggggatgtgcttgtgctggttagctgtgatcgatggctattttacattgacactgagggcaacttgttggcgagtttccaacattatggtgatggcctctttactattggactgaagctgaaaccaagccttgttcaacatgcattctttccattgctggatagttatgccgtgaatgcttcgcctttcatctgatgtctgttcaatgaggtggtgcttctttttaacattctgaattagatgaaatccaaacgcacaagctttttggttaaggaaaaatggtggaagaaaaggttcaaaccgttgagattttagtaaatagttaatctcacaccactaatgcactgtctcaagagaggttctgatgtaaattccaataagaagtcattggcagcgtgggacaaggtttgaaacctaagacaaaagggggtatagggttatcaatcttacaattcagaaccaagctctccttctgaagtatctggacaagttctataatcgaaagaatttgccttgggtcaatcttatttggcctcttattatcgacaaggggtcttttggtggaaggatgtttgtaatttgatggattttttagaggcattgccagatgtttaaggagatggagtttcatgctctttttggaatgatgtttggaatgatgtttctcctctttctatccgtatgccaagtctgtcttcttttgctttgaatgaaaagatcttagtttacaattttctttc

SEQ ID NO: 9456 - DNA, 1689 bp, Oryza sativa
  ref <308>: DATABASE ACCESSION NUMBER: AK106804
  ref <309>: DATABASE ENTRY DATE: 2002-08-28
taccaaaagccgtcacgcgtgggggttcgatgccttgggcgacaacgtccaagccggcttcgacgccgaatcgttggtgtggtgtctggatctggaagcgcgcatcgccgatgccccaaaactctcctctttctccctgagaggaggagagagcagcagtggagagagattgtttcccttcgtccacgccgtcgacaagaacattgtggttttcacatctgacctgcctcaagctccttgtagcgcctacatcatctatgacacaattggcaaggtgctctccatgatcccttgtgaaccttcctgctgtgaggtcagccgtaccacacgacttctcatcgcgcgccgccaccccggctataatgaccagtcgtacgcactggttctcatggccaagatgcccaagttcgccggcgaggacgacgccaagttccggcggggacgacgccaagggcaaggggaagatgccggagttcgctgaggaagacgttctcactggagacgaggaagacgttctcaccggagaagacgtcttcctgggcaaggccaagaaggtggagttcgccggtggaaaagacgacggcgacaacgacatcaactggcaagatgtccttctcctgtggccttcgtcgtcctcttcgccgtgggagctgaccaagacggccaacctacccaaccagtggctggacgatgagagctcgttcgtagccgacctgactttctcgtttgagggacatggtttttgggcggatctcctgtgcggcgtactgttttgctcttgtgatgacctactctccgacaaggttgatcgggtggacttcagcttcatcaatcttcctatgggatatcaagctgatgtccggtacacagggcaggtggcagcaccagaagtttatcgcaccatgggttatgctgggggatccatccgattcatctccatcgatggattccttgagtacatcaatcccggggatcgctatgtgacattatggaggctgctgctgaagagtaacacttgggtgaaagaatatgagatcagtctaaaggagttgtggaatcaacaagaattttgtaatgcaaacctgccgatgagtatgacaccaatgtaccccatcctgagctcgctagaggaacatatcatctacttcatgttaggcgagttcaaccaagatcgggatgggatcgccttcccagtcggtgcttactacttacttcaggttgacatgagctgtgggagaatcgtgtcgtctgcacccctcccttctgcatgcagtttggcgccagtcgtcggtggctctgatttcataagttacctccctcatgatactctttatgacagagatgtgctaagctcagttgtatcccaaagtatgtcaggctgttatcagttcggccctgcaactggtttggtatgaagggactgcaatctggaggtggattgggactgttgggcaactgtagcaatttggaagggaggctgctggtgaccattttgaaagggaaattttgaaagggaagctaatagtagttgacacacatcttggtcttttatgtgggaacactttgttagctgttacacttgttctatcatctgttcttagtactgatatgttaatttatggcgctggccgtcagccggttgtggtatgttaatctatagaacataataatcctacctacaatttgccc

SEQ ID NO: 9457 - DNA, 935 bp, Oryza sativa
  ref <308>: DATABASE ACCESSION NUMBER: AK106805
  ref <309>: DATABASE ENTRY DATE: 2002-08-28
ttttcgcgcaacgtggcgagggcatcggtggcgagggcgcggcaacggcgtggtgaccgagggcgcggcgacggcgccggtggccgccggcgagccccatgaccccttccctcctcgccttctcctcctcctccgccgcgagaagaccggcgcctcccccttcggcgcaacgacgaggagcagccgcgcctccgcgagccccccgtcgcctccccctccggcgcaacgacgaggagcaaccgcgcctccacgagccccacctcgcctccccctcctgcgcaacgacggggagcagccacgccgccgcgagctcgcccccgccgcgcggtcgttttaccgcttccggaccgacgacgacgacgtggtggacgtggccgtctccggggaggatggggacggcggcggcggaggcggaggcgggagggtacgcggtgtccgtcgaggtccctggcgctcgcgggcgggagggcgggctagtgcttcgcgcctcggggtttggagagggcgtcccgctggcaccggccgccggcggtggctccctcgcggccgagctctccttcgacgcgccccgcgtgcccgtcggcgtcgggccgggaagcccagcgccgctcggcatgtccatctcaggcgatggcgccgtcaattttgcggcatggaaaggggaaaaagaaggaaagagaagagagagagaggggaagaagagtagaggctgacatgtgggtccattgttattttggagagaactaatagagagtttgttggtttgactagccaaattaaatagagagttagctatatcggtgtttaaagagcgtaatttggagaagctgttggatatgctctaagaatcatataacgaaggtatattggggtgtacggtgcagcaaaatggttgtataataaattaatagaacatgatgcggctcattttgctc

SEQ ID NO: 9458 - DNA, 1552 bp, Oryza sativa
  ref <308>: DATABASE ACCESSION NUMBER: AK106806
  ref <309>: DATABASE ENTRY DATE: 2002-08-28
gttttgttttggtcacagagattaacatgcatccgcctcaccgaaggcattccacgcttcacatggtatcagagccttcaacctagattggattgagatggcgagttcctcctcctccatagccgccacaaatcctctggttggcatccaggtctctgaaaaactcaccaagcaaaattatgctctctggtcagcgcaagtgctcacagccctgaggggcgcgcggctggaaggattcatctccggcaagactactccaccacctgccgagatagagaagaaagaaggagacaagaaagaaggagagaagacaatcaagattgctaatccggcagtggatgaatggtttgccacggaccaacaggtccttggcttcctgttctcctcactgtcacgtgagatcctgtcccaggtcgccggtgcaacaacggcggcacaggcgtggcaggccatcagcgacatgttcgcgtcgaagtcccgagctggcctcatcaatatgcggctggcactcacctctacacagaagggcaccatgtcagtcacagaatatgtggccaagatgagggcgattgcagatgaacttgcagcagcaggcaagccaattgatcaagatgatcttattgcttatatcattaacggtcttgatgcaaactttgatcctgttgtcgaggctctcgtcgctagggttgaacccatcacagtgcaagagatgtattctcatctgctgaactttgagaacaagatccgtcttcgtcaagcgttcctgactgcctccaccaacgctgcaaatcgcaacaatgtcacccgtggtggccgtggtggcatgccgcgcggacgcggcggtcgtggcggcggtggccgcggcggcaacggaggacgcggcaacaatggcgggggtcgaggcgataatcgccctacctgccaagtctgcaacaaaagaggccatgtggcttcagattgttggcatcgtttcgatgaaacgtatgtccctgatgaaaagattggaggtgcagcaactcatgcctatggcatagacacaaactggtatgtagatactggtgcaacagatcacatcacaagccagcttgacaagcttacaacaaaggagaaatatcaaggcaccgatcagatccacacggcgagtggcgaaggacaaggccatgaggagaataattcttgaaggtccatgccagcgaggactctatcccctacccaccggagcaccaataaaacaagtctttgcagtgtcgccatccttcgagcggtggcatggtcatcttgggcatgcttcaaagcccatagtccttaagattattagtcaaaataaattgccatgcagtagtctcctagtgagtctgtgtgtgatgcttgtcttcaagcaaagtgtcatcagtttccttttcctaaatcctcgagtgtatctagtaatcctttggatcttattcactccgatgtatggggaccggcctccgattctgttggagctaaacgatattatgttagcttcattgatgattatagtaaatttgtttggatttacttccttaagttt

SEQ ID NO: 9459 - DNA, 1859 bp, Oryza sativa
  ref <308>: DATABASE ACCESSION NUMBER: AK106807
  ref <309>: DATABASE ENTRY DATE: 2002-08-28
aagcagcagcagccaggtagaagaagaacaataatcttacgtatgatggatggatggaatggatcacttgttgaggacgtacttcatgacgccggggatgtggatcctgtagaagtagtcgtcccagtcgatgttcttggggtcgaggttgaagagggcggcggcggcggacgacggcggcgtggccatggacagccgaagcttctccatgttgaggtcgtcgaagcaggccttgaagagggcgaaggggccgtagaggtcgacgagctgcatgacgaaggagtacttgcgggagaggtcggcgtagcggcggacgaagaggaggccgaagcagaggagggagaggaggcggaggagctggagggggagcgcgtaggccaccgccatgaacgccctgaaggaggcgatggtgcggaagaagtagacgggccgcgtgcgcaccgccaccccgtccttccccaccctagggttctccaggaagtagcgccaccccgtccggtacagcaccgcgtacgccgccgggtgccgcatcgacgacgtcacgtggtacaccgccatctccgacgatgaccccctcgagtgcgccaccatcgccgccatcatcgcgttcaccaccaggtcaccaggcacctgcaatatgtatcagcgtcagagatcgatcgtcagagatgttgaaggatgaattgaagctatggatacttactacgtccatgatgaggtcgaggtcggcgaggaagcaggagaggctctgcttggcgtagccgatgatgatggcgtcgatggtgcgggtgccctcgatccagccggggagagggtccctgtggacgctggtgatgatgctggggcgggcgatcaccacggggatcccgtggcggcggccggcgccggcgaccagctgctcctgaagcatcatctcccccatggccttggtgaacacgtaggtgttgggccacccgaagtggcgcgccctggctaaacccagatccttcatcgccttcctctccgccttggcgtcgccggcgtcctccagctgctgcctctgctcgcccaccagccgcagctccgtctcgatgtccagcttacctgtggagacatggaggaacacctcgagattggcacacttcttggcaagctggcacagatcaaacaacgaccgacctttcgtagaagttggtggtggcagctccattgacgatgatgttaaggtccttggcgagctcttgcaaggtggattcctcgaggcccaggttctgatgcatcatgtctgcagccaatggaactaccttttcatcgatgaaagactgaaaccccttgccatgctgctccttcagaagcccaaacagctccttccctatcacctgcaaccagtactccatcactatgcatatgcatgcctgtagtatacttataactacactagttttcttcagctaattatattactcttcaggcatatatatgattaattacacacacaagcaagaaagcaatcaaattaattagagaggcaaagcaattaagaggatatcacttgatgctctcatatgggccaagctgcctgcagaggtttaataacgatggaggcatgcatgtctcttggatttctcataggattcatttggtacaagtatcaaacatgcatcctcctaaggacacaaaatgaatatgacactactctggacaaaactactacaagtaaaaacctgcagtaatataatgcaattttacagcatttcactggaggacctaccgagtaaacatactgccctggccttctttttggggggtggggttggggggtctaaaatttgtagtacaaatgtactgaaaagaataataatgaatttatatttctgtcc

SEQ ID NO: 9460 - DNA, 2298 bp, Oryza sativa
  ref <308>: DATABASE ACCESSION NUMBER: AK106808
  ref <309>: DATABASE ENTRY DATE: 2002-08-28
aaaattcagatgaaactgctaccttcatcaccagtaatctctgcaggagcagactccgtctttgaaatggtggaagcgtttggcgtctcgcactacgatctcccggtccgcgatcttcgagatgtacttgatggcatcatggcaatcaccacagaccctgaggttctttatgatcacaagccttgttcctgggcctgtgttcagcaaaccgaaggcgatggccagcctctcgctgtggtagctgagctgctgttccttcacttcctcctccagatcgtgcagcatagagatttgagaccaacgcaagaacgccaacatcgtcaggttgcaattcaaggatattgtctgctatactttctccaagctccagcttcttgttattcagacagcctgaaagtagagcaacccaaatggcaacggttggctcagctttcattgatgtgagcaggtcactggcttcttccacaagaccggaacgtgctaaaagatcaactagacagacatagtgtttctcagcaggtgtgatcttgaagtgattaaccatgcgaccaaaccatagtttcccttcctccacaagaccagaatggcttagagcagacaaaagagaagcaaatgtggcatgatctggtctcattccagtttcgttcatttcttggaacaaagtgagcgcatcctggcctcgtccatgagcaccacaacacgcaatcatggcattccacaagatcaagtctctatcactgatcatgttgaaaagcatctgtgcacttgctagggagccgcattttgagtacatatcaatggctgctgtaccgaggatacaattaaaatcaaacctcctcacgatgaaaccatgtactgacctccctagcttcaagaatccaatatttgagcaagctagcagagcactaacaagtgctcctgagtcaggctgaataccagaagcctgcatatttctgaacaaccgaagtgcctcatccgattgcccattctgtgcaaaacctgagatcatcgcgctccatgagacatcattccggtgcaccatcagaccaaaaactcggcacgccacatcaagtagtccattctttgcatacatatccacgaggcttgttgcagtaacaacatccatcctcattccatgccgtaagagatgcccatgaactgaagctcccattcggacatttctggctgctgtgcacgcttgtataaccccaatcatgaccacctcatctcccttcacaccatcctccctcatcctcctgtacatttgaatcgcatccagtggctgtccagcactcacgaaaccagcaaccatggtgctccaggtgacgcggtccctcctcggcattcggacgaacaccttgaccgcgtcgcccatggcgccccatctcgcgtagaggtggagcagcgacgagcagacgaagacgtcgtccttgtacccggcgtcgaacgcgcggtccctgacggactccccgccgcgaaggtccccgaggcgcgcgcacgcggagagcgcgagcgtgaaggtggtgctgtcggggcgcgcggcgggcgggagcgcgcggaagacgcggagcgcggatgccggggagccgcggcgggagtgcgcggcgatgatggcgttccacgcggcgatggaggatgaggcggcggttgcggtgagggtggactccgcggcggcgaggtcgccagcgcgggcgtaggcggcggcgagcgaggagatgagggtgtgggaggcggaggaggagacgatgaggagggcgtggaggcgggcgagggtccgggcggaggcggaggcggcggcggaggaggagaggaggcggcgcgggtcgtcgaggaagacggggagatgcatgtgcttagcgccggaacgacggatcggtcatcgaggaagagcggcaaaagatctacctctgggcagtcgaagaaggtggcggaggatgacaggtcgagggtgagtagatggcgcagcggcgcggatttgacgatcgaatcgggaatgtgatttcaacaatttatgaagaatctggtttcctgtgctatgtcggaatgtgggtacattttgattagggatgcaagcggggctgacaagagggtttttttgtcccgcttattccacttctagttcattttttcttctaaattttgtactaccatgcgggaaatagactaacaagcgggtttttatgcgggtagcgggactacccacttgcatctctaaatttgatttagtaaggacatgcttacaatctgcttgatccctcagttagcacaatcttaatttcctttaaataatctttggat

SEQ ID NO: 9461 - DNA, 2201 bp, Oryza sativa
  ref <308>: DATABASE ACCESSION NUMBER: AK106809
  ref <309>: DATABASE ENTRY DATE: 2002-08-28
tggcctaacactcgaatcgtctcccattgttgagcaagcaaaggtctttgttcttcttgagctcagctcagctcatcagcttccatccatgggtgtcttcagctcggctcccaaggtgtacaagccggcgtcggaggtcaatctcggcgccgacagcaacgagttctacatcagccccaacgtcaaagctccacgggttgctgggcttctggtgaagatattcgcatgggttcttgaggcgccgatcatcggctcaatcgtgctctacatcctcaagagagacaatcttgtcaacaagcttgtctcggatgccgaaatcccggagccaccactgttcactgcagctcacacctggcaagacatccctgagcagaatgtgagcctgacgaagccagacatgtcgccggcagagcgcgttcaggaggccgtcgtctgcctcccggctcgcctcgaatcggtgctcgctgacccgccatcgccggggttcaggcgctggacaatccgggacttcaccagtgcctacatctcaggagagatcactcctgtcatggttgcgaggagatttctcgctgcagtgaaggagtgttcaggccctgatctgaacatggccttgttcatcagctgcaatcctcaggacgtcatcagacaggccgaggcatccaccctcagataccagcaaggagctcctctctctgccatggatggcgtcctggtggccgtcaaagacgagatcgactgcctgccatacccaacaacaggaggaacgagatggctgcagaggatgcggccgtgcgtgcaggacgcggcggtggtggcgcagctgcgggcgtgcggcgcggtgctcgccggcaagacaaacatgcacgagctcggcgccggcaccagcggcatcaacccgcaccatggatcgacgaggaatccgtacaacaccggcaaggtggccggcggctcgtcgggcgggtccgccgccgtcgtctgcgccggcctctgccccgtcgcacttggagccgacggaggcggatctgttcgcatgccagccgcgctctgcggtgtggtgggcttgaagccgacggcagggcgtttctccaaggatgggcttcttcctcttaactggaccgtcgggatgccagggatcttagccgcgacagtggaggatgcgcttatcgcctatgcagctattgctgatcagtcccaaccaagccacttgcagcctgaactgaatcttcccctgctgaaagctgcaagctcgatgcctaccatcagactagcaagatatgcaaagtggttcaatgactgttctgaagacatcagaagttgctgctacaaagctgtccatacgctgcggactcgatacggttgggagactgctgatgtgacaattcctgaaattgaggagatgcggctcgcgcattacgtgacaatgggttcagaatgcaccgcctccttcgataagtatctgaagaagctgagcaagtctgagattggttgggatgtgaggatcgcgctgagcgcctacgggtcgttcagcagcagagcttacctgaactcgcaacgaatccggaaccgtcagatgtacttccacgacaagatctttgagacattcgacgtgatcgtcacaccaatgacaggagtgacagcgcacgaattgcaggacaacgcggggcacaccggagagctggactacataaacggagctgcgctggtgaggtactcgatcgccgggaacttcctggggttgccggcgatcaccgtgaaggttgggtacgacagggaagggctccccgtcgggctgcagttcatcgggaggccgtggtcggaggccacgctgctgcacctcgcctacgccatgcaggaggcgtgcggcaagaactacaggaagcccatggtgtactacgatctcctcaacaagaacaaatactagtttcagtttcaaaagaacaaatagtagctatatatgttgtgagagttgagtgacagtttgattctgagagatttggactggggagaaatttatcatcgatcattcttaccatcccaaatacagaatgtgatggacattattattgtaattgttgttatgtttgttgttgttgctgctgcttgacataagcatgcatgtaagtcatatgcatgtcgctgtatatgtttactattattgaatgtgcctactgatttactaaatatgatatttcatttctttt

SEQ ID NO: 9462 - DNA, 1005 bp, Oryza sativa
  ref <308>: DATABASE ACCESSION NUMBER: AK106810
  ref <309>: DATABASE ENTRY DATE: 2002-08-28
aagccgaaaccctcctctcctctcctcttcccccgcttctcccctcttcccccaaccaaattccaatggcggccacggcgatggaccacgacggcggcgaggtggtcacccctggggagctcctcggcaactcgtccctcctagcggggctcggcgcctacgccgacggccgctgcgtgcgcgcgtccatcactggccatcgccgcctcgtgccgcctcctcccggctccaccgatcagaggtccacggtggaggtggtcgggcacaaggcccatggagctgtgccgcagccgggaagcgtcgccattgcgcgtgtgacgaaggttatggctaggatggcttctgcagatataatgtgtgttgactcaaaggctgtcaaggaaaagttcactggcatgataaggcagcaagatgttcgtgcaactgaaatcgacaaggtggatatgtttcagtcataccgacctggtgatattgtcagagccctggttctctctcttggtgatgcaagggcatattacctttccactgcccagaatgaactcggagttgtttctgcacaaagtataactggtggtacactagtcccgatcagttggaccgagatgcaatgcgaattgacgggccaaatagagcaaaggaaagttgcaaaagtggaatagatttggtgactttgctaacagaaaaggttcatgatggcctacaatgtgttgaccaacaaagatggtcctcatgcgtgtatcaaaagcttgcgacgctcaagctcacgtcgccactggatttagagttttgggttagcgatggtccattaggattctaaatgatgtaggtcaaggttttgctctgtgttgctgaggcttcggtacaactgaaggttttggactgcattgttgggatctttgttgttcttacatatggggggttcagaattttctcgatcaatactgtaaaattcccagtgtatctgtgttcccaagtgttaagcgggggaaaaaatgatttacagtt

SEQ ID NO: 9463 - DNA, 1816 bp, Oryza sativa
  ref <308>: DATABASE ACCESSION NUMBER: AK106811
  ref <309>: DATABASE ENTRY DATE: 2002-08-28
ctttctctgctctctctgcacttgcagagttgcagcagagaagcgcttcttcttcttcttcttcttcttcttcaattcttggaccattcttcccttctctcctcctttccccaacccaaacacaacccagccgcagcagcaacaaacgaaaccctagcctagccaggacggcatcatgtcgctgcccgacctcttcgagaagcttctcggcgacgatcaggacagctggcccgcggaggccaacttgctcctcgccgcccacgacggcaacctccgccgcatcaaggagatcgccgcgacgctggacgacgacggggaggggatcgcggccaccgtggcgcgcacggccttccacggcatgaacgcgctgcacgccgccagaagcctgcacgtctaccgctacttgctcgaggtggccaacatggacgtcaacaagccggacaccactccaggtaggaagactcccctcgagcgagccattgccggtggggacctgccctctgtcaggtatctcattgatcatggtgctgatatccatcatgaacgtgaaggaaacatcacttttcttcattcagctgcaaagaaagggaggactgaaatagtaaaattgctgctttctagaggagctcatgttgatggcaaatcagatcatgggacacctctgcattttgctgctattaaaggatatgaaagtactgtgaagattttgttggagcaccaagcagatcccaacaaggttatgccttcttctcaagcaacacctttatctgcggcgttattcactacttccttaccttgtgtgaagctattgatccaggctggagctgatgtaaatgctacaaacaaccccctggcgagagctgcagggagtggattaactgaagctataaagttgttgttgaaggctggagcaaacccaaattgtcctgacacgcatggtagaatgccaatagagctggctgctgtgtatggtacaagggaagatgttgagattctatttcctttgaccaacccaattccaactgttgctgactggagcgttgatggggtaattacttatgccaatctggaacgcaagaagctagaggatgatgattacgttaacacgaaaatgtctgacctgaaacaaaaagggaatgaagcatttgatgagcaggattatgaaaaagcatcagtgtggtacacacaggcactggaagttgacccttgtgatgccacaactcttctaaagaggtgtctttgctggcttcgcatgggtgagggaaaaaaggctgtgaaagatgcaaccacatgcgcaaaacatcacccgaagttgtcggaggcctaccatcggctaggagaagctctaatgcttgagaaggattatgagaaagcttgcgtggcgttgacccatggtatagagttggatcctgaaagtgatgagatggacaaactgttctgggaggcgatggacctgaagaactgagtaatgccgagtgacccgaagcccttttttgttggtttagagacagtttaactagtagctcagctgcaattttgtgcatatgcagtactagtacttggcattaggcttgaattcatggtgggagtatggagaacggcgtcttcttcggaagaattagaactgaagcataggttaatggcaactttgacatcctgtttgagatatggattcttacaacattcagcccagactgtccagtaagcttgtggtgattttagcatgcgagacgcaggaatgatggcttttatttgctccagatggagaagaaatgttgttggaatgatgaactaaatgctaattcttccttgtgat

SEQ ID NO: 9464 - DNA, 2074 bp, Oryza sativa
  ref <308>: DATABASE ACCESSION NUMBER: AK106812
  ref <309>: DATABASE ENTRY DATE: 2002-08-28
tggccgtcacctacctcctctcgactcttcgagctcatcactcatcacctcgtctcgccgccgctcaccacaccaccttccgatggatgccaccgccttcgcctccgctccgaaccctagccacgcgccctcctcctcctcctctctctccgcctcgtactcgcgggttctccgcttctccgtccgcgacccgtggcggcggcggcgggggcagcgcctcccgctccacgcgctccgatcgcagcgccccgagccggcgcccgcgtccgcgtcccaccacgacgtggtggttgttggcgccgggatcatcgggctctccatcgcgcgccacctcctcctccacaccccgctctccgtcgccgtcgcggacgctgccgtcccgtgcaccggcgccaccggcgcaggtaccctcagtgcgcgtgcatgtgcgtggggggagttgggtaatatggcctctagggttttgatgtcccgttggtgtgtgcgctcgcgcagggcagggatacctatggatgtcacaccggacgcccgggagtgacacgtgggagctggcggtgcggagcaagcagctgtgggaggagctcgccgccgaggtggatggcctcgggggcggcggtgcgcgggagaggctggggtggatgaggacaggaagcttactagttgggagaacttccgaagagatggctacattggaggaaaggaccaaagctctatctcaggcaggaatacgtgcggaatgcttgtctgctgcttcattgcatgcattggagccggaactctatgttggacatgatgggggtgctatgttcttgcctgaagactgccagattgatgccttccaggctgtctcattgattgaaaagaccaatggttcatattcctcagaaggaagatatatggagatctataatgatcctgccatgtcattagtaagatcagagactactggaacagttcaaggtgtccaaacatctaagcacatcctatatggcagaaaagctattgtaattgcttctggtgcctggactcgaaccttattgcgtagttttcttgaaccgaatcctacattggacattcctgtgatgccacgtaagggtcatttgcttgtgttggataaatttgacaagcttaaactaaatcatggactaatggagctaggatacgttggccatcaagttgctaaatcaagcggcacacccctatcttcagaatccagtgaagatgagcatggtgctttatccatatcaatgaccgcaacaatgaatacaaagggaaatttaatcctaggaagcagtcgagagtttaaaggattttcaagagaagttgacatgtccatccttaaatgtatatgggaccgtgcagcagagttttttcctacgctgaagaatgttcatcttgatattgatgaaaacactgaaatcaggatcgggcaccgtccctttatgcctgatgggaagccagttattggatctgttcctgatctgccaaatgttttgattgcgacaggacatgaaggaagtggacttgctttggcattaggcactgctgaaatggtcaccgacatgattcttgggaatcctggaaaagtggacttctcgccattctccataaaagacaggttttcaggatgaccatttatctggaggcccaacttcagatcctcaagcgtcaaattaccgctgttgtctttgtccatcttgtggaacatctgagtatatttatccatctcctccaccggtaaattcttggcaacgaccttcatcggcaaatgcttcacagtgaagaagtacaccacatttgaagaaaataagaatagtagcagcaggttctctgcaacttactccaagtgccttctttttgaacttattcatggctgagaattgcatcagtctggatcgaacaatctctccgagcgaaacgtttggagccctatcggcattcttgagccaaggatgctctgttttttgcaggaggagaaacaatctcaactgagcatgtaatgtaacactacttactgtacattattaaacttccccctttttgcaataatgtcaaagacatggcaaaattctag

SEQ ID NO: 9465 - DNA, 2584 bp, Oryza sativa
  ref <308>: DATABASE ACCESSION NUMBER: AK106813
  ref <309>: DATABASE ENTRY DATE: 2002-08-28
aaacgccgacgccgaaattccgaaaccccctcgccgcggcgccgccccgggagccctagcgcgcgccttccctccgccgcccggagcgggccgaccaccaccaccgccacctcgcagggtcctcgccccctcgagtggatcggcctgaatccgggggcctggatttgatcgcgctaggtgtgtaacttgtggacttgggctgtaaatagctcagggaccgacaaagttattaaaaatggtggttcttgctgcttctatcatctcaaagtcaggaaaagcacttgtttctagacagtatgttgacatgactcgcataaggattgaaggattacttgcagcattccctaaacttgttggaaatggaaagcagcacacttacattgagactgaaaatgtctgttacgtttaccaacctattgaaggcttatatcttgtagttatcacaaacaaacaaagtaatattcttgaggatctcgacacgttgaggctactctccaagcttgtgcctgaatactgcccctctctcgatgacgatggtgtttgtaaaacagcttttgagcttatatttgcttttgacgaagccatttctcttggaaataaggaaaaagtaacagttcaacaggtcaaagaatattgtgagatggatagtgttgaagagatggagtacaagcagatgatgcaagagaaaatcaaggaaaccaaagattttatgaagaagaaagttattgagattgagaaaaccagggtgcaccctactctttttttgcagacaaatatgacttctatttagctagtaggcaaaatagagctgttacttctatttagtcctcttttttttttttttttttttttttttttttatcttggcctacttcggttacagttactatcagttccttcaatctttgatgattacttgagttacagtttatctgtctggatagacttatgttttttctagactagcttgttgggctttagaacctgtaagaatatatgataaatttagtactaacataatttctactagctagactgtatgatagccttaggagaaattaggtcaaacaagacaaaataaaattagagaaatatcatacaggaaacatatcccttggaatcatactacattattggttacaatgacctttctatacattacttgttattgtgtagctttcaatcgtaaattgttggtgtttatgcagatggagaaaggcaaacataacaaaggaggatactcatcaatatcaggtccccaggtgattgaaaaatctttcaatgacatgagcattagttgtactggatttggaagtggttctggattaggtggattgaacacagatacagacacatttactagcaggcccaaaggtcgtacatctggaggtactacaggtgctggtgaaggcattggaatgaaattaggaaatacaaagaagacaaccagttcttagaatcattgaaggctgaaggtgaagtcattatggaagattttcaaccatgttctcttcagtcaaggtcatcgcctctaccaccgagtgatcctgtcacagtggctgttgaagagaaactcaatgttgcagtgaaaagagatggtggtgttaataattttgatgttcaaggaacacttgctctgctggtccttaatgatgcagatggattaatcctgttgcagattgaaagccaagatattcctggacttagtttcaaaacacaccccaatatcaacaaggacttgtttaacagtcagcaaattctgggggcaaaagatcctatcaggcctttcccaagtggtcaaaatgaaactcctctagtgaaatggagaatacaggggatgaatgagtcatctttacctctatcagtcaattgctggccatcaatattaggaaatgaaacctacgtcaacatcgagtatgaagcttctgagatgtttgacctgcacagtgtcatcatatctatacctcttcctgcacttcgggaggctccacgtgttagacagatagacggagagtggaagtatgattcaagaaactcggttttggaatggtctattatccttattgatcaatcaaaccgcagtggatccatggaatttgttgttcctccagctgatccatcaatgttttaccccatatccgttggattttccgcatcgaatactttcagtaatgtgaaggttactggaatccgccctttgaatgaaggtagcaaccctccaaagtattcgcagagggttcgtttggttgctgataattatcaagtggtttaacgctccagtaattgttaatcaatatcttgctcttgccatgtgcggctaagcagccatggcaaggagaatggttttggatgtacaaaatgtgtagacgagtttttctcctgtagcatgtttggcaagttgatttttcatcacctcttttttttggcaatcattgctggatatacactcaagaaaggcattcagttctttgagccaattaaatttcacattagtgattttaggagcaaatataatataacttggttcatgtcccaaaatcattccacaaccacaacatgtgcgtacatcttgagctaagttccc

SEQ ID NO: 9466 - DNA, 1749 bp, Oryza sativa
  ref <308>: DATABASE ACCESSION NUMBER: AK106814
  ref <309>: DATABASE ENTRY DATE: 2002-08-28
atagccattgctaagctaagctaagcctgatcggtgtagtgttggcaatggctcacacgagctcgcaaaagcacggcaacgacgacgtcgacaccggcgcggaggcggcaatggaccagctcgccgggaggtcgtcgttgtcaccggcgcgggagaagacgaggaggcggccggagaagagcggcacggtgtggacggcgacggcgcacatcgtcgcgctcctggtcgggtccagcgtcctggcggtggcgtggaccttcgcccagctcgggtgggtcgccggccccgccgtcgtcgtcgccctctccgtcgtcacctactactcctcggccctcctcgccgactgctaccgcgacgacgaccctcttcacctcggcggcggcgccgtccatggcgagtacatcgccgccgtccgctcctaccttggtccgaaaagcgtgacattctgcggcatcatccagtacggcgttctctgggcggcgatggttggctacaccatcacatcaagttcaagcatgagtgcggtgcgaagagtgaaccgcttccaccgcaactggttggccgccggcgacggcgacggtggcggcggcggcggcggcgccaccggcgtcaggtacatggtggtgttcggcgcgttccagctgctcctctcgcagcttcccagcctcgagaatgtagcgtggctctccgtcatcgccgtcgcgacgtcgttcgggtactcctccatctgcctcggcctctgcgccgccaagtgggcgtaccaccgcggcggcgtccgtggcacgctcgccggcgccgccgccggctcgccgggggagaaggtcttcaatgtcctcctcgccgttgggaacatcgctatctcctacatctattctcccgtgctcttcgaaatccaggacacggtgagaacgcctccgtcggagagcaagacgatgaagagggcgtcgctgtacggcctcgccatgagcgccgtcttctacctcgtgctcggagcatccggctacgccgccttcggcgacgacgcgcccagcaacatcctcaccggcgccgccttccacgagcccttctggctcgtcgacgtcgcgaacgcctgcgtcgtcgtccacttcctcggagcctaccaggtcatcgcgcagccggtgttcgcgaggctggaggcgtacgtcggcgggcggtggccggagtccaggctcgtcacggccagctacgagctccgcctccgcgtgccggcgtggacgtccgcgccgccgacggccgtgacactgtcgccggcgaggatggcgctgcgggcggcggtgatcgtggcgacgacggcggtggcggcgatgatgccgttcttcaacgccgtgctgggcttcatcgccgcgctcgggttctggccgctcgccgtctacctcccggtgagcatgcacatcgcgagggtcaagatccggaggggggaggcgcggtggtgggcgctgcagggcgcgagcgcggcgctgctcgtcgtcgccgtcggcatgggcgtcgcgtccgtgcgcgacatggtgcagaggttgaacgaagctgctcccttcaagaccacgggctaaactaatttaccgagtgctttagaaatttattacgatcacttacataattgataaggacgtgactacgatgagaccgtaagctggattgtcataatcagcgacttcaatctcatatccagttgctattagtacatctaaaagtggatgcatttttttcttatagaatttaatttctctt

SEQ ID NO: 9467 - DNA, 1927 bp, Oryza sativa
  ref <308>: DATABASE ACCESSION NUMBER: AK106815
  ref <309>: DATABASE ENTRY DATE: 2002-08-28
atctcagtgtgctcacgtcacgtgcatgctctagtgaggcggcgagtgttcgacgacatggcgctcctctcggctcccgtgcgccgccgccgctcgcgcgtgcgtgtcctgctagtgtgctgctgcttgctactggcgctcgcggcgccgtcggcggcggcggcggcggcggggcatgactacggcgacgcgctggccaagtcgatcctgttcttcgaggggcagcggtcggggcggctgccggcggcggggcagcgcgcggcgtggcgaggggactcggcggtgtcggacggcggcgcggcgggcgtcgacctggagggcgggtactacgacgccggcgacaacgtcaagttcggcttcccgatggcgttcaccgccacgatgctggcgtggggcgtcgtcgagttcggcgacgccatgccgcccgcggagcgcgcccacgccgccgacgccgtccgctgggccaccgactacctcctcaagaccatctcccaccccggcgtcatcttcattcaggtgggcgacccaacgaaggaccacgggtgctgggagcggccggaggacatggacacagcgaggacggtgtacaacatcagcgcggcgaggccggggtcggacgtggccggggagacggcggcggcgctggccgcggcgtcgatggtgttccgcgacgacgacccggcgtacgccgcgcggctgctcgccggcgccaggagcgcgttcgagttcgcggacgaacacaagggcgcgtacagcgacgacccggagctcagggccggcggctgcccgttctactgcgacttcgatggatatcaggatgagctgctgtggggagcagcatggctacggagagcctccaaggaaggcacctacctcgactacattcagaacaacggcaagacccttggagcagaggatagcaccaacgaattcggctgggacaacaagcatgccggcatcaatgtccttgtctccaaggagttcatagatggcgaggtgctatctctgcaatcctacaaggagtttgcagatggattcatctgcacactgattccggagtcgtcgtctccgcacatcacgtacacgcccgggggcatgatctacaagcctggaggcagcaacatgcagcatgttacatccatttcgttcctgctcctgacttatgccaagtacctctccaattcctcgcgcactgtcaactgtggaaatgtttcggttggtcctgccactcttcagcagctagccagaaagcaggctgattatatattaggagataacccgatgaaaatgtcatacatggtcgggtacggcgatcggtatcctcaacggatacaccatcgaggatcatcgttgccttcgatcaagagccatccccagcgcattgcgtgcaacgacggcacgccttactacaattcatctagcccgaacccaaacccgttaattggcgcagttgttggggggcctggggaggatgatgtttatgaggatgaccgtgccgatttcaggaaatctgaaccaactacctacatcaatgctccattggtaggagttcttgcttaccttgttggcaatcctgatccaggccaaggccatgtcaggcattgagattgaataatttggcatctagatatagatgagggacagaagttataaataggggaaaatgtaagaagtaggtttgtgttaagatggcactgcctattcataggattggattgaaaagcatgggggtctatacaataatgagagcttcttcccatgttctcttcttttctcttctgtttttgggtttgcactgaattttgtgtggatgtgtcaaagtgcaattttactgcactaatacaggtggtattgaagaaacctgtactttgtgttttatatgaaaggttctcttacctgaaaaattataagaaaggtgtttgactgt

SEQ ID NO: 9468 - DNA, 1728 bp, Oryza sativa
  ref <308>: DATABASE ACCESSION NUMBER: AK106816
  ref <309>: DATABASE ENTRY DATE: 2002-08-28
ggaatcgcctcgcatccggcacttgctatggccgccgccgccgggactccgccgccgccgccgccgcacgccccgtcgggcccactcgtcatactccggtgacgccgcgcgatgatccccggcgaccactcctccggacccgcggaattatcccccgattgctttgaccctgaagctccaggtggatccgtggccattgtatctgacggttgaagatatatttatccatttaaccccacacgcgctatgtactttgcgccctctctctcctctacatgacattatcacttttttttttgtatttaccgatagatgatccagccacctgcttcgctcacgacgagaaggactttgagtcgaatgaaaccgtttgggcactgtacgagcggtggtgcagcttccatagtgcggagcacgaccacgatgacatggtccggtggttcggatgtttcaaggacagagcgcgcagaattatcgagttcagcaagtctagcaagccttataagtggggggttggggcctgggggctcaacatatttgatgatatgaccccagaggagctcttcgaatttgggaataattaactatttgccacttttacaagtagttctaaaggatttgccattgaacccacacgtcatagacacatgagggcccacatacatgtcatagatagcgagtggcaaattcttaattgttatatcttaaaagtgacaaatagttaaatgtcccccgaattcaagtgtccactgctcctgcaaaggacttactaatttaccaagaagcacttcagtgataatataatgttatactgattgatcatctgctagctactttaggttcagcctgagtaatctctactatacttaaaaagaagcctagtggtggtcttgaatccttaccaggcagacctgcgaagtgtgaaccattcgatctccaaatccaacggctcagatcgagttaccccttgttcgcacgcccaccacatccccgtcgttcgcacgcccctattcccccgtttctcttcccctcggccacctttaacgccgcaccctaatcgccactcgcgccatctcccacctcgttggtaccctccggcgcccccaatctctggttcgtcaaccacctccgcgagcgctgcccccaatttccggctcgtcaaccacctccgtgcgcgccgcgggaacaccaacgaccacgccgccaccgattcggagtcgccttgacgacatctcatcagatactaactgttatccagtgaaagttatccttagcaaaggctcacggggaaaggaaactccctcacggattcttcaattaggagggactgcatattcagccgctctctgctgcttagtggatactggatttgatttatgcaatgatcacatcagagagaaatattatctgatagacaatcaagaggttttaggttttcagataaaatttagatcattgctcaaaaagaaaacaacatagtgcttggttactatgcagtcccttctgtagcaaaactagcaatacatcatgccaaataatcaacttggaattcaatgttgtgccttctataagagagttaaatagtttagaagaatatgggtcagaattattattattgatttgcttctgttgtttgctactgtaccatcctattctgttaatgtacagtaaattgtgtaattttatgtaacaattaaatctgaatactattataacaatggtatcttg

SEQ ID NO: 9469 - DNA, 956 bp, Oryza sativa
  ref <308>: DATABASE ACCESSION NUMBER: AK106817
  ref <309>: DATABASE ENTRY DATE: 2002-08-28
attaattagttactaagcagattagaattagttttggatcatcactgcaaattgaaggatcacacaaatcaatggctgagttgcactgtcgtttttgtgttttttggcattctgtaacttgaccgccccttgcatatatatgcagccagctgaaattagccttggctggcatcctcaagttagagaatgccaaaaacacaaaggcggccgggatgctgtgtcttgccggaaggcacgaagctgacgctggcgcacgacgaccacggcgtggctgcagcggcgccaaggttcatcatctacaaggacaaggccgacgccgtgccgtccaacctccgcgccatggacgccatcctcgccatgttcggcatcctccctggatccgacaaggcggcgcaggtcgccgacaccctccgcacctgcggcgaactgacggccgccggcggcgaggagccacgccacctcccgcgaggcggtgctcgacttcgccgcctcggcgctgggcaccagcgcgccgcgcgcggtcaccacgctcgtgcacgggagggagccccgcaggtacgtggtagcggccgacggcgtcgcccggatcggcggcgacgccgtggtggcgtgccaccctatgccatatccatacgaggtgtactactgccaccggccagccgacgcggtggcgctgagggtcgacctccacgccgtcgccggcgtgggcctgggcggcgccactgccgtcgacgtgtgccacgtcaacaccaccacctgggacagtgcctacttcgagctcctcaaggcaagccgtggcgacgccatctgccactacatgccgcagggctatgttctgtggctagccaattgagacgatattagtatttcctacaaacacctgatcgtagctactcaaccttccatgattgatgcttgatgcatctctcgctactacttcatccgtttcacaatgt

SEQ ID NO: 9470 - DNA, 1927 bp, Oryza sativa
  ref <308>: DATABASE ACCESSION NUMBER: AK106818
  ref <309>: DATABASE ENTRY DATE: 2002-08-28
aaaaacagagaggcaagaaaaagaaaacggaaaaccccccgcccagcccaaccacttcactcctcccactccagtactcgactccaccacactccagtccagtccagtacactccgcacacgcgtgccacagggatcatgcgaagcctcaagaacgtcgcctcctcctcctctagcggcgtctctcggttgtaggagacgctcgtcgtctttggacggatcggagcttgggggaggaaggcgacaaccatggtgccgatggtcctgggtcacaagacgggcggccacaccgacgacgccaagtgccatcaccggaggcacagcaccgagcaaccccacctctccccattacccttcccccggccacccctctcctcctgatcatcacgcctttctctgcttcttccatttgatctttgtgacaacgtcgtcctcctcccgctactcttcgaatcttttgtgaatttcacgtcgtgagacagtagggattgaagcatgagaagtccagcagcgcttctcccggtggttgcagatggtggtggtggtgttggggtggaggaggagatggatgtggacgaggacatggcgatgtgcggcggccgcggcggcggcggcggggagaagaagcggcggctgagcgtggagcaggtgcgcgcgctggagcggagcttcgagacggagaacaagctggagccggagcggaaggcgcggctggcgcgcgacctcgggctgcagccgcgccaggtcgccgtctggttccagaaccgccgcgcgcggtggaagaccaagcagctcgagcgcgactacgccgcgctccgccaatcctacgacgcgctccgcgccgaccacgacgcgcttcgccgcgacaaggacgccctcctcgccgagatcaaggagctgaaggggaagctcggcgacgaggacgccgcggcgagcttctcgtcggtgaaggaggaggaggacccggcggcgtccgacgccgaccccccggccaccggcgcgccgcagggctcgtccgagagcgactcgagcgcggtgctgaacgacgcggagatccttccacacaagccagcgccggcggccgccgccgacgccgcggcctcggaggagacggaggcggtggtgaccggcgccgcgctgctccaccacgccgaggtgttcttccacgggcagcttctcaaggtggacgacgacgaggcggcgttcctaggcgacgacggcgcggcgtgcggcggcttcttcgccgacgagcatctcccgtcgctgccgtggtgggccgagcccaccgagcaatggacgacctagctagccgcgaaaactttgcttacttggctggggcgaataaacaattccgtagggggttttctgcaaatttttgtaaaatgaaattgtacctagtccttttttgtcaaaatcctccccctctagtacgtgggccacgtggccggtgagctagaaatggcactcctggctttctctggctcaagcagcgaacgatgcagaaaggggagccaagggagattcgtgggaaacgcaggggaaattccgcaaaagtagcgggagagaaaaaagtgacagtagtgtactccgtagtgtggaggaaggcaacggcggcagcgctggagggaacagtgtcgctgtcggtgggcccggcgccacgtgaaaagcagacttgtcgctgacagcgattcctggcgtctgcctagtgtgtctacgcaaaaagccttgccacacttgccctcctttcctggccacaagagtgtagttcctctcacaagttcttttgtttgtgaatttttttttttgcaaaaccatctaaaatatcaataaaaaaaatccgatttggcacaaacaaaattttttttttttttttttgcagaatattggatggaaaaaacaaaggtgatgggtttgattttagtttaaag

SEQ ID NO: 9471 - DNA, 1498 bp, Oryza sativa
  ref <308>: DATABASE ACCESSION NUMBER: AK106819
  ref <309>: DATABASE ENTRY DATE: 2002-08-28
aggtcaggtcaccatttccaagaactcagagctctcttccaccggtcatctcctccatctccggccaggctagccatggcggccggctcggcgtcgctgctgctgctaatggtggtgctctgcgcggcggcgagcggaacggcgctcgccgccatcaccgacggtaacgcgcatgccttttggtttggtttgatgcgttcgtttccgcgtgtgtaacgctcgccggcggcgaggtgcagggctgctggcgaacggcaacttcgagcgcgggccggcgccgtcgcagctgcgcgggacgcgggtggtcggcgcgtcggcgatcccgtcgtggcggacgtcggggttcgtggagtacatcccgtcggggaggaagcagggggacatggtgctggtggtccccgaggggagccacgcggtgcggctcgggaacgaggcgtcgatccggcagcggctcgccggcgcggcgcgcggcgcgcggtacgcgctcacgttcagcgcggcgcggacgtgcgcgcaggcggagcggctgaacgtgtcggcgtcggggcagtgggcggtgctccccatgcagaccatgtacagcagcaacggctgggactcgtacgcctgggcctgggatgccgccgccgacgcgttcgacgtcgtcatccacaaccccggcgtcaccgaggaccccgcctgcggccccctcatcgactccgtcgccatccgcaccctcaaccctcctcgccgcaccaacaagaacctggtgaagaacggggacttcgaggagggcccgtacatcatcccggggactaggtggggggtgctgatcccgtccatggtggtggacgagcactcgccgctgccggggtggatggtggagtcgctcaaggcggtgaagtacatcgacagcgaccacttcgcggtgccgcgcgggcggcgcctgtcgagctgctggcggggcgggagagcgcgatcgcgcaggtgatccgcaccgtccccgggaggcagtacgcgctgtcgttcaccgtcggcgacgccagcaacggctgcgaggggtcgctggtggtggaggcgtacgccgggagggagtccaccagggtggcgcacgagtcggctggccgcggcggcgccgccaagcgcgccgtgctgccgttccgcgccgccgcggcgcgcatccgcgtcgtgttcttcagctcgttctacagcaccaggagcgacgacatgagctcgctctgcgggccggtgatcgacgacgtcgccgtcgtcagcgtgcgcgcgcggcggccggcggcgaagcgcggctagggtctagctagcgccattgccgcgatgtcgtactactatttagttgttgattgtttcgtttgtatgtaagaccaagaaattggtcgatcgagaatatatataattattattattttgtcggttcctggtatatatttgaattttgcagtttaagcatgcgttagaaaatcagttcgactgaataataatacaatatttcgtgctctcg

SEQ ID NO: 9472 - DNA, 728 bp, Oryza sativa
  ref <308>: DATABASE ACCESSION NUMBER: AK106820
  ref <309>: DATABASE ENTRY DATE: 2002-08-28
acgcattcctcactcctcaccatggccgccgcaccattcctcttcgtcctcctcctcctcccgctcgtctctctcagcgcagggggcacgtcgagctgtcccccacgagcctgaggggcaagctgtccatggtggacctgctcgacttcgggagcggcgccggggcgctggcggtgagggtcgacaccatgttcgtcgccggcttcgccaaccggagcggccactggcacgccctgcgcggcagcgaccacctgttccaccgcggcgaccaccaccaccagcgagcacggcccctgctgctccggccgatcgcgcgggccgtgctggaggccagccggatggggagggcgcccgccggggagcaggcccggatcgccgacgagcacctgccgtacatcgagcactgggacgccatgtggcacgagctcgggaggtggaggcggcgcggcgagtggggcgggccgttcaccggcgtgctgagggagcgcgccaacatcggcagcgcggaggaggcgctcgccgtcgtcggctggacgttccggcagtcggcaaaagctgctcggcgacggctcggcggcggcgatgtgccgcactgagtctactgacctctatgataaactgttaaagttagttgtagagtagtagtaataacgtttccattagcgacaagttctcgttcatttgtgtatgtgtgtgagtccacaatttccagcagcagattagcttgc

SEQ ID NO: 9473 - DNA, 1621 bp, Oryza sativa
  ref <308>: DATABASE ACCESSION NUMBER: AK106821
  ref <309>: DATABASE ENTRY DATE: 2002-08-28
atactccagagtccagccgacccgacccaaacctcaccgccgccgtcgccgttgccgccgccgccgccgcgtgcgcccctgcggaaatctagggtcctcggcggcgtccccctcgctccgcccccgcgttctctgcggcggcctgagcgacgcgccgaccggccgaaggctccgcgttgagctggccatgcaggtggtggggacggccgccgcgttctcgccggcggtgacgccgtctccggcgaggaggcgggccgtggattcagggaggaggttttctcgaagctgtcggtcggggagagtttcagtctcagcagttgggtactcccaattggaggtcagaagagttagctatcgacctccaggaaccgaacaaaacttgttgaatgaaattagcctcaatcttaaggagaaaagttttggattactttttggacgaagcgggagcggaaaaactactcttttgcagcttttggcaggtctatcggaacctacccatgggacaatttgcatacagaagtacaacgatagtggaaatcctatgggtccaccagaattattaactgctcaaagagttggtatcgtgtttcagtttcctgagaggtttgagttgccactttcaccattaagtaatataaactcaataagtttgtatatggtcagttgaaatgtttaaactgttccagtaaacaataagatcgtttacatatctcatgtaggtacttcttagcagatactgtgcttgaggaaattacttttggatggccacggcaaaatacagactttctttttagggagaagcttgctttaaaacttcaaaatgccattaactcggttggtctgaatggcatttcattggaagaagatccacaatctctaagtggtgggtttaaacggcgacttgctttggcaattcaactggtccaaactcctgatctattattgcttgatgagcctcttgctggtcttgattggaaagctcgtgctgacgttgtgaatcttctcaaggacctaaagaaggatcatactatactggctgtaagtcatgacctaagggaattgtacccactagttgaccgctcatggagaatggaaatggggggagttttgaaggaagaagctttatctgtgtaaggatgcttctgtttgtactgtcaatcaagctggcactgtatactagctgtctccagatcaggagcaagcaaatgcaagcagaacttcaatggagagataattgatttttccccaaattcccaccgctggaacgaagaaacaatgtctgatgcagatttttgcctgggtaagggtaagatgcctgtctgccaggtagctgaattccaactccagaactgcataagccattcctccgggacagggttctgcaaaaaaatgcagggttcgcataaaaacctgtataatttggaatgcagagcaaaacaacactgaacatcacactgacatttatgctgaagaggagctaactgattgtgctactgttaggaaacataaaaaaccttgttctactgcctgactattccattcgcgtatgtacaacccgttctcctccagatttctttgatctgttctatattgtactaaataatgcatggatccttatttt

SEQ ID NO: 9474 - DNA, 1720 bp, Oryza sativa
  ref <308>: DATABASE ACCESSION NUMBER: AK106822
  ref <309>: DATABASE ENTRY DATE: 2002-08-28
ataaataaaaaaaattccccgcgaggaggtggtagagtggggaggccgcgacggcggcggcggcgacggtggcgacggcgcggaggatctggtctgcccgcggacgcggctgcagaatgcggtgtggagttggctgtataagtgggtggagccggtgatgagcagctgggcgatgagcaagctgagggggagagctttggataggctcatggcacatccactacgaagacgagaacacgcagtacctctgcatttgctctgtcaacaaggctctaaacatggtctgctgctgggcggaagatcccaattcagacgcattcaagcagcatcttgcgagagtacctgatttcttgtggctttcagaagatggcatgaaggcacaggtatatgatggttgccagagctgggagacagcatttataattcaagcgttttgtgctactgatcttgtaaatgagtatgcttctactgttcagagagcccatgagttcttgaaaaattcacaggttgttaggaatcatcctggtgaccaaagttactggcatcgccatagatcaaagggttcttggactctttcatctgcagacaatggatgggctgtgtctgacactacagcagaagcactgaaggctgtattgttgctgacaaagatatctattaacgtggttggggatcccattgaaagagaaaggctgcatgatgctgtcgattgcctcctatcttttgtgaacaaagatggtaccgtttctacatatgaatgtaaaagaacttctacttggatagagattctcaatccttgtgagagtttttcaaacatggtggtcgattatccatatccagaatgcacgtcctcagtgcttcaagctttggtgctattcaaagaactgtgccctggttaccgtactgaagagatagagaagtgtgttagaaacgcaacaatgtttattgagaatacacaaggcgaagatggttcatggttaggcacttggggtgtatgcttcacctatggggccttcttttcagtaaaagggttaattgctgctggaagaacatatgagaatagttcttccatcaggaaagcatgtgattttataatgtcaaagcagctcaatactggtggatggggagaaagtcatgtctctaatgaaactaagatttccccactgctttttttttataatatcaaacaggtttatgtaaacatcaaaggtgatcatgctcatgcagtgaatactgcttgggcaatgctgactttaatttatgctggacagatggagcgagatccagccccgctgcattgtgctgcaaaagaattaatcaatatgcagttagaaacaggagagtttccccaacaagaacacgttggatgcttcaattgctccctcttcttcaattaccccaactaccgcaacttatttcccatctgggctcttggagagtattgtaatcgtcttcgctcagagaggcgtgcatgagaacatggcaggaaactcttatacatgctgcagatatattgatcgccctgtacaaatattactcggctatacctaaaaaaacaagcaaaatcttctagctccgttgcatatctcggatgtaattgcttgcgatccaatttgatgttgtatatatatattgtcaagactggttatcgtaaattcataacccattggcttttgaggcttaaaaaaaattcaatatatatgatgggttcttatttact

SEQ ID NO: 9475 - DNA, 2831 bp, Oryza sativa
  ref <308>: DATABASE ACCESSION NUMBER: AK106823
  ref <309>: DATABASE ENTRY DATE: 2002-08-28
aagtgacactattgtcatggctttttgcaaaccatgtctagtattctattctgttcttacttttctgatcctaaatggtggtccatctcatgtacttgcaaaggtttttatggtggtgatggaggatgacccaatcatttcccccaagtcaagccaaaagaaagtaatgagaggtgaggaagctcagaagtacaaggcaatgaccacaacgaagcatgatatcttcctggattcatttctcccagctggatcttacaagaagctatacagttacacccaccttctcaatggctttgctatctatgcaaaatctgaaaaggcaattaaaactcttagtggagcaaaaggagttagactcatccaagaagatataaaaatggccaagatgaccacatacactccgaggtacattggagctaatgtagtctggccgctcctcggtggtgccgagaaggctggtgacggagtagtcattggcatggtagatactggcattgaccccagcaacccaagctttttaagcacatcggaccaagcaaaaccaccaccggccagtttcaaaggaacatgtcaaactggcgaaagatttcctccagattcatgcaatggtaagattgttggagctaggtggtttgcacgtgctggtcaagcaactggagagttcaatgctacaatgcactatgcatctccttacgatcctgatggccatggcagccacacagcgtccactgcagctggcaattttcatacgccagcaatatcaaagggctacaactttgggcatgcaagtggcgtagcacctggagctcatcttgcaatctacaaagctgcctattcttttggtggatacatgtcagatgttatagctgcagttgacaaggctgtagaagatggcgtcgatattatcagtctttcactgggaccaactactattacatctgggccagcatcattcctcaatttgctcgagacacaacttctccttgccaccaaggctgggatctcagttgttcaagcagttggcaatggaggccctgatgcaaactcagtagtttcgttcagcccatggataacaagtgttggggcatccacaactgacaggaagtataacaaatcaattataattggaaatgggcaagtcttctcttgcggcggcctatcaccatcgacaccaggcgagaccatgtaccctctagcattggctgatgatgtgtgcaacacgaattcaactggtggatcttccaactgccaagatccggatgtcttcataagatctcttgtccaggggaaggtgattatttgcatgtttgtgtcgtcaaactactacgaaggcgacttccttgctggcattgtcgatacgattcagaaaattggtgctgccggagttatcatcactgaccgttcttcgagtgactccgacattgaatatcgtcccacatttccgacgtcaatcccttcagccatagttgtgaacagtgctgatgcacaggctctattggagtactacgacgacaacttggtccgagacaaggaaggaagtgtcaccaagttcggcgcaaccatccgaattctggatggacggcgagcaatctacaccagggaggcgcccgtcgtcgccgagtactcgtcgaggggcccggacgtcgacgacatgcagatgcaggcggcggacgtgctgaagccgaacgtcatggcgccgggccatcacatctggggagcctggagcccgacgagcgacgccatggtcgagttccagggcgagggctacgcgatgctgtccggcacgagcatggccaccccgcacgtcgccggtgtggtggccctgatcaggcagaggcaccccaagtggagccccgccatggtcatgtcggcgatcatgaccaccgccgacgtcaccgaccgctccgggaggcccctgatggcgcggcgtgacgggggcgtcctggagcgcgcgacgccgttcgacatgggcgccggggccatcaacgcggcgcgcgccgtcgacccgggcctggtgttcgacgccgggtaccgggactacctccagttcctgtgcgccgtgcctggcgtggacgacgccgcggtgctccgcgcggtgggcgtgccctgcccgccgtcgcgggcgcggtggtgctcggacctgaacgcgccgagcgtgacggtggcgagcctggtggggtcgcggcgggtggaccggcgggtgacgagcgtgggcgcggagaacgagacgtacatggcgcacgtgcaggcgcccgacggcgtggcggtgcgcgtgtcgccggacacgttcgccgtcgcccccggcgcgacggccacgctgaggatcgtgctcaacaccaccgcgccggggaacaccttcagcttcggcgaggtggtcctcaggggcgacaagaagcacaccgtgaggatccccctcgctgtcttccccgccgcggcgttgagcccgtgaagccccgaacagggatagtcctggtatatacaaatattacttacgtatacgtatgcgagcggatggagttgtacgatgaatgaataacatgtatacatacactatactcgtgttcgagcaaacaagaatacgagccatgtatcgtataatcggatattatgggccgcaacggaccaaccggactgtgcccctgctgggttattcctctagttgggccggagcacggaggagagctggtcagccataatgggctttcgttctgatgcaaagcaacggcctctgctaacttcggcttgtcgagcatctctagcagcttttgccagatgccagactaccatggacgggtttgactgtggcttctctttttaatttttttgatttg

SEQ ID NO: 9476 - DNA, 1563 bp, Oryza sativa
  ref <308>: DATABASE ACCESSION NUMBER: AK106824
  ref <309>: DATABASE ENTRY DATE: 2002-08-28
accgggagacgcatcacggaaccacgccgccgacgacgacccccgccgccgcacaactccgctcgccgtctcctccgcccccgcctccattccgccgccttccttagaggaagccaagtttccagcgccgccgcacctgcatggcgtcgctcgccgtccccctccgcgcttccgccaccccggccatcgccggcaccggcagcggcggcggatcacgcgccgccgaccccgtcaaggtgtcgtgcgttaggagcaaggttacctgcggttttccttccgttggggcttcgtcttcacttgctagcagcgttgagccggtgagagcaactgctacacaagcaccccttgccacccatcaatcttctagcacggagaagacaaaggttggcatcaatggatttggacggattgggaggttggttctacgaattgcaactaatagagatgacattgaagttgtggctgttaatgatccttttatcgatgctaagtacatggcttatatgttcaagtatgattcgacacatggtccatttaaaggcaccataaaggttgtggatgagtcaaccttggagattaatgggaagaaaatttcagttacaagcaaaagagatccctcagatattccttggggaaactttggagctgaatatgttgttgaatcatctggtgtttttacaacaactgagaaagcatcagcacacttaaagggtggtgcaaggaaagtagtgatatctgctccatccgcagatgctcctatgtttgtagtcggagtaaatgagaagaattacaaccccagcatgaatgttgtctctaatgcaagttgtactaccaactgtcttgcgccccttgccaagattgtccacgaggaatttggcatagctgagggcctcatgacaactgtccatgctacaacagccacccaaaagactgtcgacggtccttcaatgaaagattggaggggaggacggggtgctagtcagaacatcatccctagttctactggcgcagcaaaggctgttggaaaggtccttccagcattaaacgggaaactcactggtatggccttccgagttcctacacctaacgtctctgtagttgacttgacatgccgtcttgagaaaagtgcttcttatgaggatgtgaaagcagctatcaaggaagcctcagaaggttctttgaaaggtattttaggctacacagatgaggacgtcgtttcgaatgatttcattggtgacaccaggtctagcatatttgatgccaaggctggaattggcttaagttcttctttcatgaagctcgtctcttggtacgacaacgagtggggctacagcaaccgggtcttggatttgatcgggcacatggctctcgtcaacgctaagccctgatgccattgataacagcagatgccctagtaatgtaggaagagaaggctgcaaacttgatggccccttctgtatctcggaattatattaagcacaccgaacaaaaccattgccgacatgaagatacatgctgtgttgtgataatccgagcttatttttggcctgtttgaattttgtt

SEQ ID NO: 9477 - DNA, 1020 bp, Oryza sativa
  ref <308>: DATABASE ACCESSION NUMBER: AK106825
  ref <309>: DATABASE ENTRY DATE: 2002-08-28
gaatgagatactaattaatactgaaatgacaacggatcatgccgggaagaaagtcgacgtcgtcgtggttggcaacgttgacggcgagcacgtcggagtagagcaagctcgccatgatctgcacgaggaggcggcggcggcggcggcggctgaccatcatgccaccagaggcctagccattggctttctcatacgagaggtgatggtggaggggttggcgtcgttcttggtggtgttctggtcgtgcgtggcggcgctgatgcaggagatgtacgggacgctgacgttcccgatggtgtgcctggtggtggcgatgacggtggcgttcgttctcagctggctcggcccggcgcacttcaacccggccgtcaccatcaccttcgccgcctaccgccgcttcccggtctggcccaagctgccgctctacgtcgccgcccagctcgccggctcgctcctcgcctgcctctccgtcaacgccgtcatgaggccgcgccacgaccacttctacggcacggcgcccgtcgtcgtccacggcacccgcctccccttcctcatggagttcctcgcctccgccgtcctcatgatcgtcatcgtcaccgtcgccaccgacggcacagcggggaagacggtgggagggatcgccatcggagcggcggtgggagggctggggctggtgatcgggccggtgtcgggagggtcgatgaacccggcgaggacgctggggccggcgatcgtgctgggcaggtacgacggcgtgtggatctacgtggtggcgcccgtcgccgggatgctggtcggcgcgctctgcaaccgcgccgtcaggctctcccaccgcatcgtcgccttcctctgcggcacctctgttgggatcgccggctcgccctagctaccacactagagcttagccctccatatatatatccacagaataattcgcctccattatgatagctgcatgaacacgacgagcatcgctgcactgaaattgttttggaccaaccaatagagattttccatccc

SEQ ID NO: 9478 - DNA, 1747 bp, Oryza sativa
  ref <308>: DATABASE ACCESSION NUMBER: AK106826
  ref <309>: DATABASE ENTRY DATE: 2002-08-28
aagttttttttttgctaagtttctttttttttttgaatttacatgaatcctgacgcattggtttcaggtgattacacctttttgccataacccaaaggttagcaaaacagaattattatgtcttgcctgttatgttcgttctgcaagtctcttttcgtatattacaaaaagggaaatgctataaaagcagagccttattctgtaactgcaagcaacatcgattctagtattattttagtacgtttataccaaaggccattttctgttgcattgagtggttgctactactaattattgtcttcttagtaatcaccaagtgtgctgttgcttttatgtggaaaaaagattacatttttctataaagacacgatgatagtgtcttcagatcacttgaaaatggaagtgccattaaactctagacatgtctgcaaatccttgtaccgtagatacaagactgaattagactatagtttctaccaatgatttgtacgaaaaataactttgtaaagttgagaaaccgtattttgtttgctttgagccagtatcgatcactctttcgaagcaatgacaaagtgttacggtgtattcttaacatcattctgaattggtttaccatgcatccatttctgaacatacccaaatatttacgaaaaatcatgaaatttatttctttgcagagttcaatactacagtgcagctgatgcgaatatcaacacatcaactaatcaacacgaacacaagattattacttcgcactttgacgatcatgcagcgcaggcgtgcagccatggccaatgaacagaacaattaacactcatacccatcatagcatcagactcaagagggcatgatgatttaagtcggtatacgcagtgcagcgagctacgcggccatggcgacggcggcggcgcggccgccatgtccgaagcgcgacacggcgcagtcggcggcgaacaggccggaggtggcgaagctgtggtcgccccccagcgtgggcatggacgccctgacgtcgaacttgttgacgtagtcggagcggtacgtctgaccgacgacgccgtgcacgtcgccggtgagcgcgtcgaacttgaacgccaggtcgaggtgggcgaggcagtcgtcgccggtgacgccgtaccggtgcaccctcgagtcctcggcggtgatgggcacggcgttggccctcaacttgaaccgcccgtcgagcgccacgagcacgccgttcgccgccttggtgcgcgtcacggtcagcgccggcacggcggcggaggtccaggtggcgccggcgtcctccgggaggagcaccggctcgccgtcgacgatgacctcgaggcggtcgacgtcgtcgtcccaggcggcggtcttcctggcgccgacgtagaggcggtgggcgccgccgtcgtcgaagaggacggcaatggcctggatccaggtgaagtcgcgcgacatgccgtcggcgccgcgcttgccgatgaagtgcgcgttgatgtggaggtcgcggtcggagacgacgcagaagtcggcgtccctccggccatggaagtagaaggcgttgccgtcgccgccgatgaacctcgggtcgccgcacgcccccggcacgttgcacactgcacaacaacagagagtatacgtcagagacaagatggaggtgcaaccactggcggagaaatgcttcgtacttccagttggtaacctcctgtgtaatcccggtttttcaaccagaaatacgaatctaagaatctaagat

SEQ ID NO: 9479 - DNA, 1691 bp, Oryza sativa
  ref <308>: DATABASE ACCESSION NUMBER: AK106827
  ref <309>: DATABASE ENTRY DATE: 2002-08-28
gcaacttgcaaggccccccacccccacccccacccgccggcttccagaagcgagaggaatccattcaattcaaacgcagtcgtcttcctcctcgcctccgccatccaatccaacagaaaatctacccatctcctcccctcctcctccaggctccaatggcggaggaaccttcgcccttcgatgaggtccccgcctacctcctgcacgagatcacccgcacatcccctgcaaggtcgaccgcctccgcgcgctggtcgtgaaccgctcgtggcgcacgtcgctccaggcgctcccgccaccgcccctgcctccgcagctcccgtggctactccgcccatccgccggtggccctaccttctcctgccttctcagcggcgccgacgagctcagcgtccaccgcgtccgcgtccccgccgacctgcgccacgcgcgctacttcggatcgtacgacggcggctggctcttcctcgcttctcgacaaacttccggccacatgctcttcaacatccgcaccgagcaatgcctcttccttcccgacactgtcccccggccgtggagttcagatgacttccccatgatcatgctcgccgccaccgtctcctcccctccgagccgcggcaccgacgacccatgcatcggcgctgccatcgtccactgcacgcctttcatcaccgattcgcggcagatcacgttctggcgaatggggtctcacatggccatcccgtccatccctccggaccatcagttcgacgtggtgtccaaccagttcgtcgtggaggagatggaggacgtcatctaccacaggggagccttccatttcgtcaccaagctgaagaacgtcttcgtgtgcaggctggcgttgcatcaagcagacctggtagtagatcatcgggagtggttgatgttcgcgccacaggacgacctcggctaccctcgcccggttgccaccgctcgctacctcgtggagtctcgcgagcagctgctcatggtcctcaagtgcacgtgcaaccttcctggatggccgccattggtgttctcggtgttcgagatgacgcatgttcaggctccagccggggcgcctcagtacgtctggacgccggtgcccacgctggttggccggatgctgttcgttggacatggctgctccagatcctacgaattggctaacttcccaggctttcaggagggcatctacttcttggatgacctgcagttctattcagtatccaggattgttcagtaccaggagtacctctgcttcgacaatggcaagtacacgttggggccgcctcacgttgccagccgctgcttctggccggatcaagtcaactcgaactactcttcaccggtttggcttctccctggaggtgaagatgatgccaataatgctcaagctcaagttgatgttcacatgatgtagagctgctggagtgtatgttagttgccgaattggggctaacctgtgctgcatttacattctgttagtgttacctcttgctgctttgagatttgaggatgagatagttctttctgctttgtgaattggggataggattgttgctgattagtctggtacagttacaatgacacggtggatattagctgaaatcacttgcaaactcattactgaatcaatgtgctactttgatctctgcacttatagcagtttattactgcattttggcactttc

SEQ ID NO: 9480 - DNA, 704 bp, Oryza sativa
  ref <308>: DATABASE ACCESSION NUMBER: AK106828
  ref <309>: DATABASE ENTRY DATE: 2002-08-28
aagcagtcccgcacaccccaccccctccttttggttgctcctcctcatagtaacctgtttactatacagtcacccgtcggcgacgggcggtcgagcggcgggcggcctccggcttttgcttcctcggcgtgccgggtggtaggcggtggcgatggtgcgccagatccgatctcaacgcctccgaatggcagtggctggataacccctgattttttactccaatcggaggggtgtgttgcggccctagcaatttgccggcgttgtcaaggctcccctccatgaacggcggctccatctccgcgtaggcccatgtcaagaggcgctggaggcagatcgacggcctgatgatagcgcatgtctccaatgccagagatccctcactcattcgctgcctggagtactggaggcctggtcaatgcagctgagggctcctccgccggcagtggggatgccaccagatgtcagccttgtggctgtctgcttggaggtgagcagcatctgcgttcgatcatgcgctgctttttttcaagctactaatgtcgctgcttggactaattcttttccccattttttttctggcaagattcagatgtatatgttccatttttttcccgatttgaactagcctttttccaattatttttccctgcaagattcagatgtatatgtggtcgctcagaaattcacatgcatgttcaatttac

SEQ ID NO: 9481 - DNA, 1751 bp, Oryza sativa
  ref <308>: DATABASE ACCESSION NUMBER: AK106829
  ref <309>: DATABASE ENTRY DATE: 2002-08-28
ggccttctctgcttcttccaaacctcccattcactctgttcccctctcttcccctgcttccagaagccaagttcaaacatggcgcacaacgacgaagcgtcctcgtcgcgttccaccacctcctccgccgcccaaccctcgccaccatcacgcctcgcccccgcctccgccttcgcctctcccatggacgcggcggcgcccgcgcgtgacttcatggcggaagccctccgcctcgtccacaaccgcctcacgtgcctcgtcgaccgccgcaccatggcccgcgtctgccacgactggcgcgtcgccgtcaagccgctgcagcacgcgccgcatcgccgcccgctcccgtggatcctcgtcccgcgcgccgacggcccttccttctcgtgcgccctccgcggctgcggcggacacggcctcggcgtcccgcacgacgcccgcgccgcgcgctgcttcggcgcctacgacggtggctggctcttcctcgccttccgcgagaccttccgccacaagctcctcagcctccgcgacgttcagctgcgcctccgcctccccttctttgtccgcccggacatgacggctgctgaattggggcggcctgtcccttacattggtatggtcatgctcgccgcgaccctctcttcgccaccggaggacgaggattgcgtcggcgccgccatcatcacctacgggccctacgaggctggtcgacgcactcacgcattctggcgcgtgcagtcagcgaaggctttcccggatcaggctgcggcgatgggtcatggctccgatgccatcgacgagccagctctggaggatgtcatacaccacaagggggccttccttttcctcatcacagaagaagacctccatgttttcgcagtacgggatttccatgaagacggcaaaggcaacatgaagatggcgcccagggcgattcgtcgcttctcgcgaggtgggcgcgattatggcggagacatcgttgtccgctacctggtggagtcccgcggcaatctcctcatggtggtcaggcgcgttcctgatcgtctacacgcgccgccgaggacgtccgcgttcaaggtgttcgagatggtggagccgccgtcggggacgcgcatcgaggccctgtacgcgtggaacgagctggaatcgctgggtgggcggatgctgttcgtcgcgcgaggctgctccagatcgtacgacgcgggcgactatccgggcgatgagttcggcgagggcgtctacttcctggatgacgggaggctctaccgcgagtcggcagtgttcacggctcggcggcggcgacggcgatatccctgcagagacaccggcaagtggctaccggcggcggatgcggcgggggttcctcgtgtggacaagttcttgccggagcaaggcccgtcggactactcaccgccggggtggcttctcccctgagattgctcatgttacttttgatcgtcctggtacaggtatgattcgctgttgatttgatcctccgagatgtggtttagtttgcagccgttgtactttgtcccgtcccgtctcctcttgctgcgatggattagtgtagtttcagtcaacagttgcagtttcagtctagatttgatgtcataatcatggattggtagttgctatgatgctggagaaattctccttttgtagcagaaaatgttttcaagtcagaactacatgaatcgtgaacgcagtatgaaactatgaatttgtgtgatctgatgctgcagtgaatcaag

SEQ ID NO: 9482 - DNA, 1132 bp, Oryza sativa
  ref <308>: DATABASE ACCESSION NUMBER: AK106830
  ref <309>: DATABASE ENTRY DATE: 2002-08-28
gagctcagcttgctcagaggcgataagaccagctagcagcagcagcagctgcagctacagcttgcagggcgcccagctcacagcatcagagagattcagagtagctcagagtgagcttttgctcgttggtccctcgaattctggagctagttcgcccgggtcctcggtttcgatcgatccccttcagacgaagcggaggcggatttcgcatgaggtagcgcaagcgtcagccatggaggaggtcgtcgtcggcggcaaggagcgcaagcgcccgcgcggcgcgctcgactgctccttcgccctccccgccgccgcctcctcgccgccgccgccggccgccgacgacgccgaggtcagcacatccgagaccagcaagagctccgtgctctccctccccaacgccccctgcgacaacggcggcggcgcgttcgccgagctcctccactgctcgaacaccaacggcagcaagccattgcagcaacagcagcaggcgacgcttgcgtactacgcggcggcgcagagcgcgcacatggcggcgcccatgtcgttcgaggtgatggcgatgccgccccacctcgcgttctcgcaggagcagcagcagcacgccacggtggccgccttcgatcggggcacacttcagtccaatgcgtcgctgtggccgccgccgccgcagccgccgccgtcgcagcacccgttcctgctgcagaggttcgccgccgctccggctgaggtcgccggcctcccgttcttccttgcaggcggcgtcggcggcgctgctgctgctgctccggcggcgacgaccaatggtggggagcggaggctgcagctctgggacttcaaggaggagaggaagacatgactaaaattgcctggtgttatgtctggtgttgtgccacaagtcaaagccgatcagcatgaagaaaaattcagaacaagaaaaagtattcaggaactgaagatgatgtcagcgccaggaaaaaaacttaaacaccagaaaaatggatgtaattccagatctatgattcttccggctcatgatttccatttctctattctctaacaatgtacgatttaattgtaaccttgactgtgttgtgattcagaaaccatgtcattctgttgcctgtacttc

SEQ ID NO: 9483 - DNA, 2329 bp, Oryza sativa
  ref <308>: DATABASE ACCESSION NUMBER: AK106831
  ref <309>: DATABASE ENTRY DATE: 2002-08-28
caaaaaaacccccacctttctcttatcccctctatccgccgctcgccggccatctccctcccccaccaccaccaccaccgccgcctcctctccggcgagatgctgacctgcggccgcttcctctcctcctccgccgccgcctccaccccctccctctcccccttccggaacctaaccctctccctcctccgccgtccccatctccgcctcctctcctcctccgccaccgcctccgccgccgccgccgccgtcgagcccgacaccaagggtggcgcgggtggcggcgccgcgaagccgcagtggaaggcggcgataaacttcaagtggatccgggagaacacggacgccgtcgccgccaacatccgcgaccgcaactccgccgccaacctcgacctcgtcctccagctctacgacgagtacctcgccttgcagaaggaagttgaacggctccgagctgaaagaaatgcagttgctaataagatgaaagggaaattagaaccatctgtgcgtcaagcccttgttgaagaaggcaagaacctgaaagaagggcttattgccctagaagaggaccttgttcagctgactgataagcttcaactagaagcacaaagcattcctaacaccacacatccagatgctcctgtagggggtgaggaaagttctgtcgtcagaaaagaggttggtagtcagagaaacttcaatttcaccattagagatcaccttcagctgggaaaagaacttgatttgtttgattttgatgcagctgctgaggttagtggctcgaagttctactacttaaagaatgaagctgttctgttggagatggcccttgttaattgggccatcactgaggtctcaaagaaaggtttcacaccactaataactccggagattgtaaggtcatctgttgttgagaaatgtggcttccagccaagggcccaaaatactcaggtttattcgatcgataacagtgatcagtgcctcataggaactgcagagattcctgttggcggcatccatatggactctatactccctgattctgatttgcctcgaaaatatgtagcctattcacattgttttcgcacagaagctggtgccgcaggtgctgccactaggggcctctaccgtgtacatcagtttagcaaggttgagatgtttgtattttgccggccagaggagagcgacaagcgccatgaagaacttatcactattgaagaggaactttatgcatcacttggacttcatttcaaaactttggatatggcgactggggatctgggagcaccggcctacagaaagtttgacattgaggcatggatgccaggcctagataggtacggtgagatctcgagcgcgtcaaactgcacagactatcagagcaggcggctgggcatccggtttcgcccatcacctgcagatcctccaccggcgaacgccaagaaaggaaagggcagctcaggcccaacacagtttgtccacacgctcaacgcgacagcggttgctgttcctcgcttgatcatatgcatcctggagaactttcagcaagaagatggaacggttgtgatcccagagccactgaggcccttcatgggcggacttgaagtgctctccccgaaaaccaaatgatcagcttgaaggtcaccacgtttacttcgaatcttgttttttttatagatttacagtctttttttcccccgaggatattggcaagtgaatgtgcagaatttcaaagaaatctgtggtcgattccaaatgttccatgcgaaattcgtggctgttagttggccaccgattgtcgattgttgttttggcaacatatccaggttaactatttcctccttgtcaaaatatagcaaacttggaatggatatatagtccaatgattatggacaaggggctagccagattctttggactagtatgctttccatcagttttaatagtttgctatattttgggatggagggagtagttgaacaaactcagtattacacttgtagttaactggtaactccacatatgcccattgtattggatatcccttgcgaaatatttcctccgtcccaaagtatatggtttttaggtggatgagacatcttaatgctatgaatctgaacagatttagtactaggatgtatttcattcacccaaaatatgttatactttgggatggtgggagtatttgtccacgggagaactataccggagtagtttgtgctagaacaatagtactagtgctttgtcagtttaatatctgtccgtttacggctgtgtttagttcagcacaaagtttggattttggttgaaattggagatgatgtgattg

SEQ ID NO: 9484 - DNA, 2372 bp, Oryza sativa
  ref <308>: DATABASE ACCESSION NUMBER: AK106832
  ref <309>: DATABASE ENTRY DATE: 2002-08-28
ggtaattaacaatccaaatcaccatatagagaaattaccgtacagctccaactcctctctccacatgggcaggtcaaagcccataggacatgcctcaatctcttccaggtgagaaacgtgatcgcgtttgcctcccccacgcgaccgatcgcttaatagcaatctcgctctctgtctcctcccccctccatgtgtggcgtcctagtataacgatggttgcaccgtggcctcagatccaacagagcgatgaggagtccaagacccgtgcacgttctgttgtttctcttgatattgattttctctgattgtgttgatgttgattcggtggagattatgaatttttctgattgtgtggatataatgttaatttgatggagattacaattttttctgattgtgtggatgttatttcttaatctatgaaattttctttctaaattgctaggagaaatatggggggcttgaaagcattatttttctcacagaaaggttatagatttcggttgtggaaccagtacctataaatagtctcatctgtgtcgtctactggatgccgattgaaaaatccagcacgtgtagctagctcgcaacctgccccaacacgttttctatagtagtgtcggttgtcgcattccttgtctccttaaggcattgttggttaatcactttgaagcagggattggagaagatttattctagacctattatagtgtggaattattccactcaatcccctctaaaccgaacatgacgtaaagctgatgaaacccatccaacaagtgaaatttcaccgtacgtaccccttccaatgtggccgtttcgtgtagcatccggcttttgactcttttattcagaaggttactatattaattgtacgagtacataaacaccatcgatctcgtgtacgtacgtaacgtaaatacgtaatatccgtcgttgtcctcgcaccgagctgcactggccgtcgccgccgccgatggccgccgtcgacgacgacaggtgggaggacctcccgacggacctcctcacggagatcctgctgtgcctcccgccgatcagcggccggcggcgcgtccgcctcgtgtgcagccgctggcgcgacgccgtcgacgagctcgaaccggagacgacgcacagccgcgccaagccgctcaccttcttgaagcgatccgtcgacagtggccgcccggccaccgcgcgcgtgttcgacgacctcgccggcggtgggctcggcggcagcagggagatctggaacggcggcggcggcggcgacggcgtgtccggtagttccccggacatcgtcggcacgtgcaacggccttctctgcctgtggcactgtggtagcgacagcggcggcgagataacgctggtcaacccggtcaccggcgagagcctcgccatcccgccgccgccgccgccgtcgccgcggtggaggagccacacgacggaggggccggaggcagagaggctcagcttcgcgtaccacccgctgacggggaggtacagcatcgtccacttccccgccgccttctgcgacggcggcggcgacaacctcgccgacccggcggtggaagtgctcacgctcggcggcgcgggcgcgtcggcgtcgtggcgggaggtggcggcgccgcccggctcgaggtgctgcctcgctttgggcatcgtcagcgtcgacggcgccacgtactgggtgaccaaggacgggaggatcatgtcgcttgaccatgagcacgaacgcgtcacggccgttctgccgctgccgccggcgatcgccggagaacttgacagttggtggagtacccgcctcacagaggtcgccggaaggttgggtgtcgccatcacctccaaccatacgacgccctccaagtataacgtcgaggtgtgggtgttggatggcgcaagagggaagatgacctggagccatcgttacactatacaagacctgcagtttagttaccaagagattgcatggccacacttcgcctacggagagaatgtcttgacaatcttagacagcgaccatccgcgcaatcagctgtatacgcattggctatggccacacaagaacaggacaagtgtagcaacgggcgacgtggtaaaaggcactttggtggaggagttcgtcatcgacccggaaaatgtgaaaattttatcgctcatcgaccctgaaatacatgtgaacatgttctcgtatgtagagaccaatgagccactgaacatctacaaggaggtgtgcatggatagttaagtttggttagattgctacctttatatatgactttgaatataattggtcaatatatgatttgttgcacatacttaaatatataataggggtattaattatttaaacggttttgccgtgaagtttg

SEQ ID NO: 9485 - DNA, 1732 bp, Oryza sativa
  ref <308>: DATABASE ACCESSION NUMBER: AK106833
  ref <309>: DATABASE ENTRY DATE: 2002-08-28
acacgaaaccaacactcgtgcggccgtgcagttccaatctccgcgcctagcgaacatggacaacgccgctgccgtcgccaccttcatggagatcacctcctgcggatcccaggaggccgccgtgcagcacctcgcctcctgcaggtgggacctcgacgccgccctcaaccgctacttcatcttcggcggcgtgttggccgccgctcccactcccgctccggtcgccgacgtcgcgccgcccgctgcgctggatgacggggtgcgcgctcccatccccgcccgctccgacacgctgtacggcgacatgtacggcggcgccaggcgccgtgaccgtaattcccgtcccgccccgtccgtttgggaggacgagccgccggcggtgacaccctcggtggcgccggtgtatatacagatgccatctgcgaatcccgcggtggcgccggtgcaaatacagatgccatctgagacggcggcctcggtgcccgctgcgccggtgcccgtacacgctccatctcagccccccgtggttgcaatcgccgtcaagaaagaacaaaacgagaaagacgaggaggaagacaacggccgcgacgacgacgacgacggctacagcgacagcgactacggcatggacacggacgacgacgacgaccgctacgacgagtgcatagagaaaacgccatctccaccacccaagtcgacgcagcaacaggcgacgacgctcgccgagatgtaccgccgcccgcgcgagctcatgcacgacgcggacttccacagcaccaaggtgcacgcggcgcgtcaggaccggtggctgctgctcaacctgcagtccgccggcgagtttgcgtcgcagatgcacaaccgggacctgtgggccgaccaggtgatcgcccgggtcgtgagagagagcttcgtcttctcgctgctcgagaacagttacggcgacgatgacgacgaggccagcaaagtttgctgcttctacaagctccatgaccagcttcccgccgtgctcgtcatcgaccccatcaccgggcagatgctggccaagtggagcggcgtcatccagcccgaaaccttcctggtggacatcgaagaatacagcaaatcgaagccgagcatgcgttccaaaccctatatattccaaagaaagcccatgccggtaaggtcagcacctgcagccagcgagcagcatcatcaagaaccggcaatggttgacactgctgcgcctatggatatccacaatgttcaagaaccagacactgctgcgcctgcacctgcacctgtggtcgaacacggtgttcaacaacctgcgactgccggcgccggcgcacagcaaccagcagatgaacaagatgatgatgaccagccgatggaaggtgagaagatgtacaggatgagggtacgattccccgatggctctgtggtcaccaaagagttcggctgcaagcggagggtggcagtgctcttcaattactgcagatcggtgctccatgacaagccgcaggcgttcaagatcaagaggttgctcggcgtcggcggagctttccacgagttgccccaaggtgaccactcgtttgaagatttgggcctgaactgcgcgactgtctcagtaattttggatacttagaacgaattactcctcctactactactatatggttcattggtccttgtatcagattctcggattcatcactatggagtagttgttaaatttagtgattgcttttgcttc

SEQ ID NO: 9486 - DNA, 2533 bp, Oryza sativa
  ref <308>: DATABASE ACCESSION NUMBER: AK106834
  ref <309>: DATABASE ENTRY DATE: 2002-08-28
ggactgtagacggaggcctgttttgtccactgcacacttcaccattccattccatggcgccgccgctcctcgatctcccctcgcactgcctcctccctcgccttcgccgccccacctccggccgtctcctccttcacctccgcctcaaacctctctcctcctcctcctacaccaccaccaccaccaccaccaccagtagctccacctcctcctcgcgagcgcctcaagttccacctagtctccatggcccctcgctccgccgcggccgccgcctgcccggcgaaactgacggcctgctctccttcgcccgcatcttcgatctcgccgccctccgcgtcccggccgccgcctgtgcgcccctcgagcgtcgcctccgtggccacctcctcaactggtctcgcgtgcgcaacgtcgtccgccaacccggcgacgacggcggcctcctcttccccgttccccatccaagcctcgccactccctcctccctgccaactgcggtggctcgccgagagaagctggcccgcgagttcaacgcccgaggcttcgtgcaattccccaaccttgccaagatgtcgcggccccccgcgaggaaacggaaggggaagaaggatgaaggaggcggcgaggctgcggctacggcaagggatactaaagacaaagtatatgtggtggaggtgatcggagagagaaaagaggagcacggcgacgagtggatggggttggtcggggaggaggggttcgggaggatcacgtggagaggaggtcccacccggttgctgctcctggacgagaactatgccaacaagagggttgatgacctcccggaggctgtcaaggttctgttggaccatgaaactaacaaggatggatcttcatcctacgagcttgtgcaatgccaattgaccttgttctacaattactggccaatgaatgagattttagaggaaatactcccagaaggaataatcgttcctacagggtttgagacagtagggcatattgcacacttgaacttgagggatgaccatttaccttacaagaagcttattgctcaggtggtactggacaaaaacaagccaaagatccaaactgttgtcaataagattgatgctattcaaaatgactacagaacaatgcagcttgaagtcttagctggtattgattcccttgtaactacggttattgaaagtggtcttcggttccaagttgatctttcaacagtttattggaattctagattatcaacagaaagacagaggcttgttgaccatgttttcaaaaattctgatgttgtttgtgatgtgttctctggtgttggtccaatagcaatatcagctgcaagaaaggtcaaatatgtctatgcgaatgacctaaaccccactgcagtggagtaccttgagagaaacattgttcttaacaagctcgagagaaaaatcgaggtttttaacatggacgctagaaggtttatcagttcaatatactcaagccaacatgtgcatccagtcacacaagtagtaatgaatttgcccaatgatgctgcagaatttttagatgtgttcagaggaatctcatggaaccaccatttggctgtgccttcttgtgtaatgccaaatatacacgtgtatggattctccaaagcagaagatcctgaatatgacttccatgagaggataaatttgacgctgggtgagaacgtgtccgatgttgaaatgcatagagtgcggctcgttgctcctggaaaatggatgctttgtgcatcatttacccttccagtatctgtggcgtttgcaaagccaaattacattgcatgttaagaggacggcctataacaaattaaccatcttgtatattctttagtgggtgaatgaaaatgacagtagtgtttatgcatcagctgaagttagaattgatcgtcttggcctactacatgcatgatgatacatcattcgtgatcatcatatatctaaattgaaggtcgttcgtttgtagaaattgcttcaataatccaaaaggattttacgatgagaaagtataaaaaaaaagctatgggtgaagcgccagggacatttaactatttgtcatctatgtgttaatgacatatagatccgagtggtaaattaattgaagagtgtcaaatagttaattttttccatttgccccatacacagtagtggatgagttggctcctctgttccgatggaatagctaaaattatcaagaacctactggtgcctctctctctctctagatagttcttttttctccttgggcagtggcctatctagcatttagcatttagatggtctaacttacataattttttatttttgttaaagtgagataatatacagttagttcatcatgacataaggatatgatttgctaattgttacccttgcaaacaaatgtattttttctcttcctaagaatagtttttctttctttttaacacatgtatctttggctacgtatttctaggtgatcctggaaccacccacaagcttggaataatatggttgcaaattttatgtat

SEQ ID NO: 9487 - DNA, 1791 bp, Oryza sativa
  ref <308>: DATABASE ACCESSION NUMBER: AK106835
  ref <309>: DATABASE ENTRY DATE: 2002-08-28
ctcgttcgatcgctcaccggccgcgcgtcgacttgggcttcgctccgatcgatgatgccggccgtcgactagccgcgcgcggccggccagaaaccaccaggcgccagccaattaaccctgcctaaacgccgcccgccaaaagcccctgtgctgctgctgtgccgccatctcaccggatctcgacgccgttgctggagctccacgtacgagcctggcttctccgccgaaccacgtgacgggcaaggcaaacaggtagctactattcaagatggctgcccagcatgatatggtgtcaaagtttggtgctgctgccattgtggttatgctcatgcttgtcgtccctaacagcggcagcggcgaagatgcagggcatgacaaggatcaattggctcctatgtcaagcgaagcagaatttggattttctctcccaattgttcacgggcgtccaccggcacccggtatggatgacgagaagtttgtgactccatttagaatttatgaggatgttgtctatcttgctgaaatggagattggtgagcggcaacagaagcaatacctcctgatcgacacaggcagctctttggtctggacacagtgcgacgaatgcccgcattgtcacattggcgatgtgccaccatatggaagatcccaatctcgaacattccaggaagtgagctgtggtgatgatgatgacaatgataaagaagaagcaattgctagttactgtccagcaaaatcgccgggatatatcactttgtgcgtcaatgggaggtgtatgttcaaggcgctatataatttgaccgggcaaggcgagactgttcaaggatacatgtcaatggatacatttcacttcattgatgacaggagatttgactaccaagctaagttccggatggtttttgggtgtgcacaccaagagaatatcgttcttacagctgtcaaggaatgcactggcatattgggattaggtatgggcgatgcatcgtttttgaggcagaccggaataactaagttctcgtactgtgttccacctcggatgccaggttactcatataggagacacagttggctccgttttggctcacatgcacagatttcggggaagaaggttccactggtgatgcggtggggtaagtactatttgccgctaacagccatcacttacacatacaatgagcttatgtctcctgtgcctattattgcctataagagccaagaagactatctacacatgatggtagatacaggaacctccttgctaagtctcccgacctctttgcacgatgatctgatcaaagaaatggaggcaataattaagtcagaaaatattatggaaggggccactagatggcccaagcactgttataaacgcaccatggatgaagtcaaggacattaccgtcacacttagttttgatggaggtttggatatagaactcttcacatccgcactcttcataaaaacagaaactacaaaaggacctgctgtctgcttagcggtgaatcgtgttgacgattcgtctaaggcaatcctaggtatgtttgcccagaccaacatcaatgttgggtatgacttgctaagtcgtgagatagccatggatccgattcgttgtgcctgataaagtacgcagcttgttaaattgattaggagcatggcgttattggacgcattgattcatgcgtggttgttttagtttattggttatgttaccaatttgcatcttcacggctgtcttagtttactattgatgactgctgaaatggacctgctacttcgttgagttcgtttact

SEQ ID NO: 9488 - DNA, 2041 bp, Oryza sativa
  ref <308>: DATABASE ACCESSION NUMBER: AK106836
  ref <309>: DATABASE ENTRY DATE: 2002-08-28
gggaagtggatctccctcccggtcaccgtctccaccattaggatcagctgctcctcgctgcccgtcctgatgatcctcctgttcctcctgaacgccgcgctgggccccgcccgggcctccctgcaggccacgttcctccggcgggtcgccccccacgtcagcacgccggaccgcatcatccgcaccgccttgcggtgcggcggaccccggcccccgcgcgtgtgcttcgtcagctcctccccggcgagcacgtgggcgcgcgccacgtggtccagcagccactcctccgtcgccttgttcgacctgccgctcctcctcgccaccgacagcgccgtctcgctccccgcgtcggcggcgccgccgcgcgacaccagcgccctgcacgcctccagcttgcctgcggcggccgcgtgcatcagcggcgtgtagccatcctcgtccatcgcgttgggatcgtggcccatcttcaggagctgcgtcagggaggaggtgtcgccgatccgggccgcgtagtgcaggggtctgaaagatggctgctggcctgcgatcgcatccgcgagcgaagcctggagtaagatctgttcgaaccgatctctggtttcaggagctctgcttcggatgatcgacatcgcggatttcccttcggcactcgtggcagcgatatctgcccccgccatcactagaagcctgaaaatgtcagcatggcctgactctgcagcaaccataacaggagtgagccctgaaccatcaggcctgttcagatctgctgctgagtagtgtagcgtcattagaagagcttctgcactgtcacttgcagcgaagaagtgcagcggagagaagacggtgatatccgatgaagtgatgcagcctccgcaactcaatgctctggaaagaatgtcgatgatggttgagctaaatgagcttttcttagcaagcattattgctgtgtcacctgcattgttcactatcccaaggtctgcccctgatttgatcagttcaagaaagcaatcggagtgtccacacctcgcagagaccatcagaggagtgtccccagtagaagtctgcgcattgatattagccccatccaacatgagttgtttcagtacgggcgcatgacccaaccttgcagcaaaatgtattgggtaggagacgtgtgtgccgtttgtcatcattatgggaaatctgggattggcaccagcatttagaagcacgcttactgcattcgggttctgacagagtatggcatggcaaagaagatttcgacccttgcgtggggtttccagcaaccatggtgctttatcgagcagcaatttgaggatttcaccactgcattcgtagtactctactgcacaccaaatggcgttgtatttttccccaaggcatgcaccaacacgaagttcttcacccgttgcagagtcccaacaccaagaaccaacttgcacaagacagtccaagaaacaatcgaatatctgtattatatgaaagaatctaatggtgcatgtggcttctaacgatgccatttatggactgatgaacctaaatcaagacaacgagagtacgagacaatatcagcattatgtcctcagcgcgacctcgttaaacttctacactgaacctagctatttctgtacctcaaataccgagcagtatacttttttacaacttgatacaccagccacctttccaccacctccactctaataatcagccttaaaattaaagctactgtagttagaaatattccagctatttatctctattagaaggccgcttaaaattgccaggtttgacattcctatagtatgctagctatctcgctctagtataaaatctcattgcaaacttaggtccctttttttggcttatcatgtgaaggttttcccaagttcttaattaatggtacgttttcttaaaagtttttctttaccagcatttcttagaaaactttttttagatgaacattttaatattcaattcattcatttgtgcgctggaataattgtcataaactcaggtttagccatcatccatcaactatatc

SEQ ID NO: 9489 - DNA, 1941 bp, Oryza sativa
  ref <308>: DATABASE ACCESSION NUMBER: AK106837
  ref <309>: DATABASE ENTRY DATE: 2002-08-28
aagaggacaacccactccaactccaacccgcaagcatccaaactgagctgatctcctcttcctcctccaactccaagcctacaaagttcagagaaatccaagaaagatacgagagagataggtccacgtcgttgacgatggcttcttcgggatgcagcagcaatcggttgcgacaaaccattgtcgttgcgttgctgctgctggcttcttcttcttgcttggcatccgcgaagcacaggggcaatggcacgacgacgacggtgccgttccatggcaaggatgagctgcgcaggtacaggaagatcatggcgcaggttgccaggttgaagaaggcttctgtcaagacgatccagagccccgacggcgatgtcatcgactgcgtgccggcgcacctgcagccggcgttcgagcacccgaagctgcgaggacagaagcccgaggctgagccggaggagaggcccaaggtcggcggcgccgcggcggcggaggcggaggaggaggccgtgttcccgcaggcgtggacggacggcggcgagtcgtgcccggagaagacggtcccggtgcgcggacgaggaggcgcgacgtgctcaggtctagctccgccgtccggttcgggatgaagcagccacgcgccgccggcgtcgtccgccgcgactccaccagcgacggccacgagcatgcggtggggtacgtgacgggggatcagttctacggggcgaaggcgagcctgaacgtgtggtcggcgagggtggcgacggcggcggagttcagcctctctcagatctgggtcatctccggctccttcggcaatgacctcaacaccatcgaagccggatggcaggtgagccctgaactgtatggagataacaacccaaggttcttcacatactggacaactgacgcgtaccaggcgaccgggtgctacaacctccactgctccggcttcgtgcagaccaacaaccgcatcgccattggcgccgccatctcccccacctccgtttacaatggccgccagttcgacatcagccttctcatctggaaggacccacgtcgggggcactggtggctgcagctggggtcgggcccactggtggggtactggccgtcgtccctcttcacccacctgggcggccacgccaacatggtgcagttcggcggcgaggtggtgaacacgcggccgtcggggtcgcacaccccgacgcagatggggagcggccacttcccccgcgagggattcaaccgcgccgcctacttccgcaacctccaggtcgtcgactgggacaacaacctcctccccgccgccgccctccgcctcgtcgccgaccacccctcctgctacgacatccagggcggctacaaccgcgcctggggcaactacttctactacggcggccccggacgcaacgtccgttgcccctagagccaccacccaattaattaagccgccagagacgaggaagacgacgatgattattaagggggtattactgatcattaccaaccaattacatgcaacaccatctcgatcttattaattactctactcgtcacagaatataagggattttgatcggattggatatatcttaggtaattgaaatccagtcaaaatatcttatattttaggatggaatgagtagttttctaagtagtaattaattagctagatagctatagtagtggttactgatgatgagtgtgtcaagcagccaaggaagagtgatggcgccaaaagtttttgagttgatacgaggcttccttttgatttttttttctgtctttttagggggttgtttagcttaattttcttgagttatgttacttatgtatacatgaagaaattgataggggagtgttatgatcaccatatgtatatatagcgtggcatcaagagtgttttttgccatgcgtttgaattatcgatgcgacctttaaattttc

SEQ ID NO: 9490 - DNA, 2137 bp, Oryza sativa
  ref <308>: DATABASE ACCESSION NUMBER: AK106838
  ref <309>: DATABASE ENTRY DATE: 2002-08-28
aaacgcaaccgtcgctaagaaactcttccacggctacttgcctctctcgtcttcctccccacgccactcgccaccgcgcgcgccactctctcgcgactcctcgccaccgccttcggaccacgagattccggcgactttatggatgatgaattcgtgggagtggtacagatcgacggcggcggcggggacgggggctggggccctgttggagcagcggcgggcgtcggcgaggtcggcgacggtgcccttcctcccgatgcggtcgcgggagccggcggagccgatggagtggacgagctgcgccaagcagaggcgagactccgaaaactatgcttggagtacaccggcacgggcagcatgccatgcgccggctgctatctccgactcgataaaggaattcctcataagaagtttaagcttctcctccttaaggggaatggagccaagcgtcatttcgagacagtgcataaactcgacaagaataagaaaaatcgctgcaaaaactgcggaagctacttccgcagtaaagaagaattgcgagaccataaagaccgaatccatcaataagctcaccgaggaggcgctgaggatctggaagagcggctcgtacctccacgccgacgaggacgggaggtccgtctacatcggcagcctcccccgcgccggcggcgactcgaggcacggaacgatgtgggccgtcgagccgccgatcgacgccgcggcgccgctgccgcagtacgcgcgcctccgcgccgcctacggccgctacctcgggacccccgactcctacggctccccgctccccttcctcccggtggacgccgcgcagcgcgaccgcgacagggtggagatggacgccatcatgtggcagcccgtcgcgtgctccggctccgacgtggtcggcggtcgcgatgcccgcggcgtcgtcctcctgcgcgacaggtacgggcgctacctccgcggcagcaacaatctcctggctccccgccgcagcgtccctgtcaagccctacgtcgtgaacgagcatatgtttcggtgggaggtggtgcgtgtccccctgagtgaagccaggccggagctcccgatcgccgctcagtccggcttcgtcgcggcgtgcttcccaccgctgctgcgagtgatcgagttcgtgggcgaagacgacctcgacaacatcggcgagggagaaatctggactacggttgagaccagagggaggtcggtgaggctcctgaaagagaagatcgcgaagcttgtgggctacgaagacttcacgatgtgcgtcagcgccggccgccatgggcagttcacccctctgctcatggatgccaacttcgagggcgaagatacgttgctgtgggaggtggtgcgcgtccccccgagtggagacatgccggggctcccgatcgccactcagcccgggttcttcgtcagggcgtgcttcccccagccgctgcgggagatccagttcgtggacgaagccgacctcgacaacaccagcgagggagaaatctggactacggttgagatcagagggaggtcggtgaggctcctgagagagaagatcgcggagcttgtgggctacgacgacttcacgatgtgcgtcagcgccggccgccatgggcagttcacccctctgctcatcgacctgcctcgcagccgggagaccctgaacatcgtcctcctcaggaccaacagcgaagcgaatgatcagatgatattcccgaatccgaatgcattgccgtcagcagaggccacagatgaagacaatgccacgattgagtgaatccttttgtgctgaagttctgacaggctcagggaactcgacagaagattagtgtgttggtatagggtggaattttcagttcagccgatgctgcaatgcagttttatgtttgctatcagctgtagaatggctgaaaactctgaaattttcagtgtgttcaatgggtgtttttcgacggtttcacatacttcggaaaccggtaaaacagggccttctaaggaaaatattggttttggtgacaattagtattcatgcctagtatggattgacgccaaaaatgtgcttattcctgaagtatattagtgttcatgctaaacttggtagaaatatgcatgatgtctctgaattctgatg

SEQ ID NO: 9491 - DNA, 2031 bp, Oryza sativa
  ref <308>: DATABASE ACCESSION NUMBER: AK106839
  ref <309>: DATABASE ENTRY DATE: 2002-08-28
ctacccacctgctgcagttttatattgaattcggacagcagtcaccactccctcagtccctcgtcgcgtttcgtcggagacaatggcgacgccagcacctgatgtctcggccatcggcgcggccctccgatccccggcggcgacggtaagcgaggccgacgtcgagaagctccggctcatcgaagaactgacctccgacgtggacgccgtgcaggagcgcgtcctctcggagatcctcggccgcaacgccggcgcggagtacctcaccaggtgcggccacgacgccggcgacaccggccgcgccaccttccgggccaaggtgccggtggtgtcgtacgacgacctgaagccgtacatccagcgcgtcgccgacggggactgctcgcccgtcctatcgacgcaccccatcaccgagttcctcaccagctccggcacgtcggccggcgagtgcaagctgatactcgtcgccatggacgactccggccgccgccaggcactgcacggtctcattggacctgtcttgaaactgtaagtcaacctcttctacatggcacttcgccagtccgaagaaaagtgatatcgaacatttcgcaatgtatatatagatatgtccctgggcttgaaaagggtaaggggctctacttcatgttcgtcaagtcagagacgaagacacgaggcggcctcacggcgtggtttgccctgacgagcgtctacaaaagcgagcaattcaagagcatggcaattgcctacacgagccccacggcggccatcctctgcgaggacgcgttccagagcatgtacgcgcagatggtgtgcggcctgtgccagcgccacgacgtggtgcgcttcggagctgtgttcgcggccgcacttgttcgggcgatccgcttcctccagctcaactggggccagctcgccgcggacatcgaggccggcgagctcggcccacacgttgccgatccgtcggtgcgcgaggccgtctccgggatcctccggtcggacgccgagctcgcggagttcgtccgcatcgagtgctccaagggtgactgggccggcatcatcacgcgtatttggccgaacaccaagtacgtggatgccatcgtcaccggcgccatggcacaatacatccggaccctgcagtactacagtggcggcctgccgatcgtgagcacctcgtatgcgtcctccgagtgtttcttcggcatcaacctccgccccgtgtgcgacccgtccgaggtgtcctacaccatcatgcccaacacggcctacttcgagttcctcccggtcggcgaggtcgtcgacgcgaccaacctcgtcgacctcgcccgcgtggaggtcgggcgggagtacgaggtggtgatcaccacctacgccggtctgagccggtaccgcgtcggcgacgtcctccgcgtgacggggttccacaacgcggcaccgcagttccggttcgtgcgccgccaaagcgtgctgctatccgtcgagttagacaagaccgacgaggccgagctgcaccgcgcggtggagcgcgcctcctcggcgctcctccgcccgcgcggcgtgtccgtcgcggagtacaccagccgcgcgtgcaccgaacgcatcccgggacattatgtggtctactgggagctactgaccgagtcacccgtcggcgccggcgacggtgacacggtggacggggagacgctcggcaggtgctgcctcgagatggaggaggcactcagcgcggtgtacaggcagggcagggttgcggacggctcgatcgggccactcgagatccggatcgtccgtcccggcacgttcgaggaggtcatggacttggccgtctcccgcggcacgtccattgggcagtacaaggtgccccagtgcgtgactgtcccatccgtggtggagctgctggactcgcgcgtcgtgtctagccaattcagccctgccctgccgcattggatcccgactccacgatccgactagcaatgcatcctgtttggcatctttattttaggaaaggaaaacgtacaccgaaggtccctc

SEQ ID NO: 9492 - DNA, 1940 bp, Oryza sativa
  ref <308>: DATABASE ACCESSION NUMBER: AK106840
  ref <309>: DATABASE ENTRY DATE: 2002-08-28
aaaatttgaaaccgcggagaggcggcagcttgcgccatacgcctccccctccgccgcgtggagaggccgtcgccgaccaccagccaagtcgccggagcgagcccggtggccggagaggatggaccacgagagcatcgtcgccagcgacctgtccatctaccctctgccgcccgggacgcgcaccctggccactccgcgcgtcgtcctcgcgccgcctcccgtcaccgtcgtcaaccagccgcacgccgactggcgggggctcccggacgccgccgtctcccgcgtcctcgaccgcctccccgtcgtcgacctgttccgcctcggctacctcttctccccgcgctggctccacatctggcgcgcccggccgctgtatctccacgaccgccagttcaccaccccaccgatccccgccgccaacgtcgccaacgcaatcaccaacgtcctccaccaccacgtcggcgagggcgtccagctcctacccgtacaaggtggcggcggcggagggggaggccaaggtgaaggagcgctcgtgggcggcggcgatgccgatgaggccgtgaccagcgacgacgagatctacgaagacgaaggcatcatccagaacgccggtcacgagatcggccgcgtgtactgcttgcgagtagagaccacgcggtggagcctcgatcacctcgtccgctggtgcgccgagctccagcgcggcggtgctcgtgtgctcatgctcgccaacctcgccataccagagcaccccgaacttcctcaagccatcctcaactgtggcgccagccacctgggactccacgtcttcttcttcaccgtggaagcctaccacatcgcggccctcgtcgagctccgcgccctcgggctgtacggctgcatcgagggccacggcatgatcgaccgagtcctccaccccgaatcaccgattcggaagctggcaatccacggcggcatggggcgaactttcgccgtcgccggcgccacgcgcctccggtctctggtcttgttcgacaaccaggtgggcacggtcgccgtggacggcgccgcccgattccggaatctctacatgagcgatacgaagccatccaggatccgcatcggtgccgcgcccaggttgcgaagaatcctctcccttgacatcttcaacaccgtcttggtgatccaaggcttagcgattcagattgggatgatggagccgcctccacagatccgttctgtcaggcatctctgcttacgggtgaactacacagagatggacgtcaggttgccccgcttgatggagcagatcctgaagagtttcccacgcgtaaaatcactggatatcatgagatgcgatgacgttacacaagcagaagggctcctccagtggaatgatgcacactatgacgggaacaatttcttcgatggccttgagagtttcaactatcacctgaggtggatatatcttgaagatttcagaggaggcaagtgtgaagttgctctgatgaaagccatgctcgacaaagctagtgtcctgagacagttaatgatacaatactcgacaagcagcgtcccccagctcaccctgaatcagctcgacttgtctctccagaatttcaagctgcacactctaaatggtgccatcagaggcaatcttgtgtcctttgttgcagccgatgcttccggaagttgcgtacgactagcagcgcaaggctaggtcaggtgttgttctgtctgtgctctgcttcggggagagagagagagagagagaattttagggtggctcttctcaatttcttcaggtgttgctagtcaaatgatgctataactgatattctgctaagtgagtgaatgatgctctgagcatcaatgcagtgaatgatgatgccctctctcagtctgaacaatatgttagtattgagcaaagtcaaatcttgatagcagtaaaaatgtacagt

SEQ ID NO: 9493 - DNA, 1795 bp, Oryza sativa
  ref <308>: DATABASE ACCESSION NUMBER: AK106841
  ref <309>: DATABASE ENTRY DATE: 2002-08-28
caaaaaaaaatggacgtcgtcacacacgcgggcaggcaccaccgcaccagtacaccaccaccatcgccccgccccgcatcgcgccccacagcgccatcgcctcgcctgtcgccaccagcacacggcaggcacaggcaccaccgcccctctgaacccgagaaaacccctacttgactcgccacgctccccgctaatcgcaaccagacggagttgtccttggtgtagttggccagcgcgcccaggcagggggtagagcgagctcgccgagctcgagctcgatccatcgcccgccagccatggtctcctctccctcgccttcctctcccttccccgccgcagcagtatccgacgcgaggcgggccggcggtggcaggacgacggcctcggaggtggacgagaagtacgcgcacgtcgcgacgccactccacaaccaccgcggggggagcgggggtgccaagaagacgccgcggcgagcgaagagcgaaggaggaggcggagcggaccccgcggcgtacgtcgcggcggtgtcctgctctgactgccgcttcaagcagcggctccacgcgccggcgtcgcctggccctggggcggtcatccgctcgctgttcgtgtcactcacccgacgatccacgccgcggtcgtcgccgtcgccgacgtcggcgtccggtggggacggaggggagagcgagcagtggcgcctggccgcggccgacctctcgcggcggctcgcggcggcgacgcgcacgcgggacgaggcgctggaggagaccacgcggctgaagcactccctcaccgagctggagatgaagctcgcgcgcctcgaggcccgcgtgctccccactcccacggccgccgccttccccgtcgagtcgttcctccgggcggtgtcgacagcgcgagccgccgtgcggagcctcacgcgggctctctccaatcacctccgcagcccggtgaaccccggcccgaacctcgagagcttcctgaaccgcgcgttccacgccgacttcgagctcgacaccgagggcgacgtgcacacggcggacccggcgggccgctgcgaggccaacctcgcggcgtaccactccatcgcggcgctgacgtgggaggaggtcctcctccacggtaccaagcactacagcgagggcctgagccggttctgcgacgccaagatgagcgaggtggtttcctccctcggttgggcgcgcgcccgcgcctggccggagccgctgctgcaggcgttcttcctggccgccaagggcgtgtggggggtgcgcctcctcgcgcggtccgtccacccgccgctgcccgtggtgcgcgtcgaccgcggcgcgcgcttcgactcgcggttcatggaggacgcggccgccgggcgcgccgggaagctggagccggcaagcgtgaagatgatggtggcgccggggttccacgtgtacgtcgcctgcgccggcgtggtgaagtgcaaggtggtgtgcttctacagcagcagcagcagcagccgcaccggcggccacagagatggcgggagcatcgccaacgggtctgtggggttggggagtagctgtagcgatgtgaatgggagtgctacagacgcggtggatggttgtaataatcagagcagtagcgtagttacataggtaaaacaaacacgaccattttttttactgtatttgtgtggttaaaacaggacctgcatttttacttttgtgtgaatacgggggactttgtcccaactttatgttgatttcgttcgtgtttgtagctttgatttgttgagtaaagacagtttttgtttggc

SEQ ID NO: 9494 - DNA, 2004 bp, Oryza sativa
  ref <308>: DATABASE ACCESSION NUMBER: AK106842
  ref <309>: DATABASE ENTRY DATE: 2002-08-28
atctctctctctctctccttcggctcattcgtcactgttccaccgccggcttcgccagttgcctggccgtgtccggccactcccaggaggaggaggaggacaatggcggatgcttgggcggcgtcccctccatctcctacggctccttcgcctttcgccgcggacgacctcgtcgacgcgcggctcgcgccgtggccgccgttcgctccgtggccggcgcccgggcagctccaccacaaccgccgcggcggcgggcacccgaacccgctcttcaccatcctgccggcctcggcgctggcaataggggtcgtgctgcttgtcgccgtggtcgtcatcctggtgatgacgcgtcggtggaagcccgggacggtggacggcgccggcggcgccagctgcaacggcgacaagcctggcggcgcccccgcgtccagctgcggcagcagcgtccgcggctacaacaactccaggtactacgccgccgccgccgccgggtgcatatatggcggaaggctgggtttctcggtgcagccgcggaaccgcggcgcgcaagtgttcacgtaccgggagctggagagcgcgacggacgggttcagcgagtgcaacgtggtgggccgcggcgcgtacggcgtggtcttccgcggccggctcggcgacggcaccacggccgccatcaagcggctcaagatggacggccggcgcgagggcgagcgcgagttccgcatcgaggtcgacctgctgagccggatgcactcgccgtacctggtggggttgctgggctactgcgccgaccagagccaccgtctgctggtgttcgagttcatgcccaacggcagcctcaagagccacctccaccggcgcgcgctggcgccggcggagcagccgccgccgctggactggcagacgcggctgggcatcgcgctggactgcgcccgcgcgctggagttcctccacgagcacagctcccccgccgtgatccaccgcgacttcaagtgcagcaacatcctcctcgaccacaactaccgcgcccgcgtctccgacttcggcatggccaagctcggctccaacaaggccaatggccaggtcaccacccgcgtcctcggcaccaccggctacctcgccccagagtacgcgtcgacggggaagctgacgacaaagtcggacgtgtacagctacggcgtcgtgctcctcgagctgctcactgggcgggtgcccgtcgacacgaagcggccgccgggacagcacgtactcgtctcgtgggcccttccgcggctgacgaaccgcgagaagctcgtgcagatggtggatcctgccctgataggccagttctccctcaaagatctggtccaggtggccgccatcacggcgatgtgcatacagacgaaggcggactaccggccgctgatgacggacgtggtgcagtcgctgatccccatcgtgaagagcccactcatgtcctgcacctccacgccgctgaggcccgcgcacgggcaccaccacgtcgtctgcatgagcccgagcaggggctcttccaacggcggtgccctggaaacgcgatgcgtcatgcacggcttggattgattagccatatgcatctcgatcagctgcagatatataatgctagctcctatgtattactacgtctcgatcgtcgatcgcttgcttggagtactttgagccaggcagatggggaagaagagatggatggtcagcttgtcaagctgctcgatcggagggagattgctggcactactcccagctgtgtatagaacggtaccagtaccacttcaccaagctcatcacggcttgcttgcaagacatccttgcaaatgcaattgcagatttgctgtagcagtacatcatcacgtgcgtacgattgtactatttattagggacagttgtacgacgattccttgttcttttgtacgaaatcatatatattcatatattcctgtataagatagtaattaagatggaaaaaatacaataaatggatcatcctttttc

SEQ ID NO: 9495 - DNA, 1769 bp, Oryza sativa
  ref <308>: DATABASE ACCESSION NUMBER: AK106843
  ref <309>: DATABASE ENTRY DATE: 2002-08-28
catggatccttttcttctttccatcatcttatgctcatggatctttgttgtagtgtcctggaaaaagctcaattgcatgaggcgaaggcttccacctggacctccaaggtggccaatctttggtaaccttctccagttgggccctcttccccacaaagacttcgctcgattctgcaccaagtatggccccctggtctatcttcgtcttggaaccatcgatgccatcaccactgatgaccctgaagtcatccgtgagatactcatccggcaagatgaggtatttgcttcacggcctcggaccttggccgctgttcaccttgcctatgggtgcggtgatgtggcccttgctccgctggggccgaactggaagaggatgaggagggtttgcatggagcacttgctgacaaccaagcggcttgaatcttttgctgctcaccgagcactggaggctgagcacctctgtcagtttgtgtgggctaaagcccagtcagggaaacctgtgaatctcagagaggttcttggggccttctcgatgaacaacgtgacaaggatgttgctagggaaacagtactttggtctgcagtcagcaggccctggtgaagcaatggagttcatgcacatcacccatgaactgttctggctgctgggcctgatctatcttggggactacttgccagcctggaggtggcttgatccatatgggtgtgagaagaagatgagggaggttgagaagaaggtggacgacttccaccagaagattattgatgagcacaggaaggctagggaggccaagaagagtgcatcccttgatgatgataacaaagaagacatggactttgttgatgtactgctttctttgcccggcgagaacggaaaagagcacatggacgacgtcgagatcaaagctttgatgcaggacatgattgctgctgccaccgacacatcatcggtgaccaacgagtgggtgatggcggaggtgatcaagaacccccgggtgctccgcaagatccaggaggagctcgacggcgtcgtcggccgcggccgcatggtggcggagtcggacctcggccagctgacctacctccggtgcgtcgtccgcgagtccttccggatgcacccggcggggccattcctgatcccccacgagtccctgaagccgacgacgatcatgggctacgacatcccggcgcggacgaggatcttcatcaacacccacgcgctcggccggaacacccgcatctgggacgacgtcgacgcgttccggccggagaggcacctgccggcatcggcggacggcggccgggtggagatcagccacctgccggacttcaagatcctccccttcagcgccggcaagcgcaagtgccccggcgcgccgctcggcgtcatcctggtgctcatggcgctcgccaggctcttccactgcttcgactggtcgccgccggacggcctccgccccgacgacatcgacacccaggaggtgtacggcatgaccatgcccaaggccaagccgctcgtcgccgtcgccacgccgcgcctgccgccgcagatgtacggtcgccatggcaagcaagtttgagctaggcgtcgtgtggacaataatgcagacaggagaagccgatcgagctatgcagcttaacgtaattaagagtgaattaattctacatgtatctatcaaatcaatcacacatgtagacagtgacgatgaatgcaagtgctgatgaatcaaagaaattaagcatcagctgatgaatctcactttcttgctg

SEQ ID NO: 9496 - DNA, 1969 bp, Oryza sativa
  ref <308>: DATABASE ACCESSION NUMBER: AK106844
  ref <309>: DATABASE ENTRY DATE: 2002-08-28
gaggaggatgttgccgggcttgaggtcgcggtgcaccagcggctccggcttcgtctggtggaggaacaggaggcccgtggcgatctccgcggcgatgcggaaccggtgctgccacgggatcaccggcccgccgccgccgccgccgccgccgccgcgccggaacaggcagtcgtcgaggctgccgttcgccatgtactcgtacacgaggcagccgtactccgggcaggcgccgaggaggagcaccatgttcgggtggcggatgcagctgagcacctccacctcttgctggaactgcgacctcccctgcgccgcgtcggggcggagcaccttgatggcgaccgccgtgtggtcgaggtggcccttgtacaccgggccgtagccgccctcgccgatcttgcgcgcgtcgttgaaacgatcggtggcgtgctcgatctcctcgatgctgtagcggcggtagcggatctcgtgcgacatgccgccgccgccgccgccgcggttcttgcggtcctcggcctccttgaggagcttcttctccgcggtgatccgcttctgcacctcgagctcggcgatccgctgcgacgcctccgcggcgtccatggcggccttcgccttggccttctcccgctcgatcagcgccatcgccgactcctccgtcagcctcgcgtcgtgcgtcctctgctcctcctccgccttccaccgctgcagctccatcgccttctgcttcgcgttcagcgcctccttgcacgccgtgctgtacatgtccatggtctgcttcagctccagccgaagcctcttcatctccgtctccacgtcgtcctgcgcgcaagcaattcgtcgaacatgtcatgagcaatgatcgaggtggtggcaatggcgtgatcgagctcagctcaccatgccgatggagcagaaggaggaggtgctgctctgggagaaggaggtgtggtcgttgccgccgaaggagtctccgccccacggcgtgcgcgacgtctcgaagctgtggtcgtagctttcggccgaggcggcggacaggcgcgccgggacggggttgtgctcgacgctgcggcggccggagctgacgaacgagatgtcggcggagtccggcatggagaggtggctgaggtcggcgtacgacttgcgcgtggcaccgcccatcgggccgcgcgcgaacggcgagcggatgtagctgtccaccttgggcgtctccaggtggtcgtggcccctcgacgacgacgaccacttctgcggcgtgggcgccatcgccgtcgccggctcgggcttcgccgcggcggccgccatgttctggatctgcgaccggagcggcgacacgcgcggcgcctggcgggtggagttccgcaccgacgacaccttccccttgttgatgacgtacaccgtgcagaagtccggcgcgcccttggagatggtggtcgggatgtcggccttgaacctgaacccgcccctcgccgtggcgccgacgacgagcttctcgatggcggcgaccgcgcagaactcggtgatggacttggccacgtcgtggtcgtcgagcagcacgtccttgcactggatctgcacgcacgcacgcacacacccgcgagcgcgaagatggaaggatcagtgtggctgccgcatttgatcgaacaccttgaacgccacttacgtctttgcgcgtgcagaagcagcggaaagtgcggtagagatccctcatgtgcgggtccgtcggctgcttgaagccggaggcgtcctccactccacctgcaccatatcgacaggatcatagtacatcagtttcctgatttcctccaaagaaatgggaatttattaaggtccaaatacaaaggagaacactccaatcagggttcacaaatccagtagaatccggttcggaacttttcggatcgggtcgaaaacgcaaaccactcgattttttggtggagttataaaaaagcaaactgaattttaaatttttgat

SEQ ID NO: 9497 - DNA, 1876 bp, Oryza sativa
  ref <308>: DATABASE ACCESSION NUMBER: AK106845
  ref <309>: DATABASE ENTRY DATE: 2002-08-28
aatcgtagacgggaccaaaaaaccaaacctgaatccggctgatccctaaaaccaaaaattcccccaacaattttactcgcgcggggctcatcgtcgccatggacggcgatgcgggcggccggggagacgtgaccttcgccggtcccggcggcggccgttcccctcgcccccgtcgacctgtccgtcggggaaccagataccctgtttcttcttcttcttcttcttcttcttcttcttcttcttcttcttcttcttcttcttcttcttcttcttccctggaaggaggagaagggttgggagaagaagggcgcagcgaggaagatcgacctcgtcggaggatcatccgcctcgtccgtccaggtctagcagcttgggatacacaatgtcaagggggcttgtgggcccttgatgggccgtcgggcgatcgccggccctatagcccctaggctttatgggccggaaaggcttcttcggcccttgcgggggcgaactagacatggcgaagtcgtccttcttcggcaggtttcggcagatttgatcgaagggcctcatgccatccgccaacaattactgtttggaggtgtttgagagccaacaagctttttacagtcccctccttgatccccggatgtgcatcagctgatcgtaggcctcgtgttcggcaaagtgtactttattcagaccgccccaaacggtcccaaggaatacgaggacaagtacaatcaaaaaccaaatcactggatgagaagaatgtaagcgaggtgagtagtgagcttggcactacaactgcagacattccaaaattcaaggcactgatgataaatgactcactctctaggcttgactcaactgagaggtccaatgagtctacttatgatgctggcactcctggcagcaaccaagtgacctcaaaatttgttaaggacaagcccaaagatgattcagatgatgtggaggagtgtctgcgccaactacaggaatactactctaaagggcatgtccataccagcatcgaggatgcttggaatgaagttgtagcttacgagcatgttgctttaaccgccctagctcttgagtggggtatggaaccaccaccggatcccttccagaagccgaagtcttcactagttgatcaggaagcccagacacttcgggcaccacagcagacttctgatgctgctcagcataacatagtgtcatgcaaggaggaaccgtctcagcaaattttgcccattcatcaaccaaggaccgaggtttctatagaagaaattgttgagagagggaaaaaatggatgggcgaggaggtgatggtggctttcaagaaatatattgaaggaaaagctgatcttgcgggacatcaatatcaccttgaactttgccaccagtgtttccatgtggaaagctatttccaaaatttccaccattataattttaatgtcaagataaaaaagcatgattcagatgagtggtctgagtcaatgtattttgctgaagtaaagatgatattcaggagaaaatattacttctgctgtcccttggaaccacgtgagaatggtcactgttatgcatgcagaaaccaaggaatggatgacctgaggctgaggcatccagctacaggtggatttgagatgggctcacctgacactgtatttccttacatgtataccagtggctgagctcgtgttacccaaaaaagatgtgtatatggatgatggtttggagtaatcacttagattatcatgatatgttggatgctgacatagtttgttttcagcagcactatttcgctcacaacacttgttgtagtactgaagtctaaaatattgtgcaactcgtttgtctgacagtattgtgatgaaattggtatgcatggttg

SEQ ID NO: 9498 - DNA, 1842 bp, Oryza sativa
  ref <308>: DATABASE ACCESSION NUMBER: AK106846
  ref <309>: DATABASE ENTRY DATE: 2002-08-28
catatcgctggaacgtctccagtgttccatcattcttctttgtgaggaatggaaaggagatcgataaagttgttggtgctgacaagaatggccttgagaggaaagttgctcagcatggatcatcctaaactaacctcaagacaacatagaagaggaggcgatagaggacaccccatgcaagcaggatggcaacatcaacccagatgctgtcaatggtgatgtccagtgtggagagcacgtcctgccccatcaacgggcacgccgcgtcgctggcgttgagctcccgccggaggctgctgggcttgaaccccccgagcggccccggcgagaggtcggcgcggtcgccggcgtagcaccggccccccttgaactcgctcaccagcagcgcctcgaacgggtacttgatcgcggaggcgtagtgcagccacctccaccccaccgggatgagcgtccgcttgaggaagaagccgcaggtgaggaagaagagcgccgtcgtcgcgatgacgacggcgtagccggtgatgtagctggggacgagcgccgagacgagcatgacgtaggcgttggtggtgatgagggaggcgaagaggatgacccagaagtggagcaggctgctctccatccggagcatcagcttggtgatcacggcgaaggtgagcccttgcacggcgaagaaggggaggtagacgacgagggaggcgacgacgtaggacgacgccctgtaggcgttgtgcgaccgctcccggatgaagatgaaccgctcctggatgaaggttggcacggcgtcgttggaggagaagaagacgaggcagacggcgaagatgtagaagttgagcagccggttcaccgtcgggacgtcgccggcgccgaggcggcggaacatggtggagaggatgaccgccatcgccgcgagcaccacctccctagagaggaacagctccggcgtgcgcaccacgttgagcaccgtgcgccacgacagcaccgccacctcccgcggccacgggttggcgaacttgggacgatggccgccgttgtagtcctcttccggcgcgtccagcggcggctccaggtcaagctcgtactcgtggtacgtcggctcctccggcttgaacaccggcacatgtggagacggaggcggaggaggccgccgctgcgggttgttctgcggcgttggcgtcattgtcacggcgcggccacgctggaagctcgacaccggcgttctcgccggtgtccatgtcggccgccggtgcggcgtgctcccggtgacgccatggtagacccagaccgagaaatccttgtagaactgtgacgccagcctcggctggtaccccgaagctggaccgccggcgtgcatcggcgtctgcaacttcctctcgagcgaattatcaaaatcctcatcgtcgtcatcgccgccgccatcgacattgtacgacgactcgaagttggagaaggtgttgccattggcggcgccgctgttgagggagaactggttgctcttgagttggatctgcctgaactgcaccgacttctggtgcggcgttctcggtgttcttggcaccggagttttcgcggcgccgtcgggtctcgtgccgtccctctggtaggcaaccagaggctcaagccccgatgttgattcatcgtactccttgatgacatccaggagatactcaatgctgttctcaccatccggcaccggcctgccaaatccagccaggtgtgtttgcagtgtgcttgggcttcctaggtagatcaaccttcccctggatgaatcaatgacagtatttttaaattgaacaaaaaaggaattttggaagcaaaagacaattctagacctaggcagat

SEQ ID NO: 9499 - DNA, 1825 bp, Oryza sativa
  ref <308>: DATABASE ACCESSION NUMBER: AK106847
  ref <309>: DATABASE ENTRY DATE: 2002-08-28
ggtcgtttctcttcgggcccaacacgagcccaaaagcttcccatcttctcccagaagattagcggcgggggaggcggcggcgaccggcggcgacagggtggccggatttgcggtcccgtctccctctcctgggcttccgccaccacccgcgggcgcttctcctccaccgggaagcctgccgtcgcgcgacggcgactcccttcgactgttcgacgcaatgccagggcaggcctggtggagcggaggcggagccgcttcttcgctgcttgaggcgaggcgttcagggtgttcggcgaaatgctcgagagtcgcttgtccagtcctggtcggtggcgacttcggccgtcgaagatctcgtgggcggcgactgtgcttccgcttcgtgagcttctgaaggacgcataccttttggtaaggagcaaaagactcgtctctgtgaaaagaaacacagcttccgaagatttgcaagatccactttgcagatactacatgcaaagcatcattccgagaggtgcatataatttagagcaatcatcggcatcgtggtcatggtgtgtacatgctctggaaaacaacatagcacgactgttgttttccattctcccggctccactggtgtatctttgtagaccatggattatgactcttgtgtctatctctgaattttggaagtgcttgaagacttgaagtaagctgcgtagcgtgtgagggctgcaggctgccagtgggagctggcttatcatttgggacaccacaggggagactggttcttgtgtagacatggtctatggactatggaacggactgaagccacacagatcttcaggtgcagcacaaactggagaaatccttcggccagaacagaaacagcatgggggacacaagatgattacagaagatcggctgcacaaagaccaattctagaaacagcatataggccatttccagttcagacgactgtagtgctgtactgctgtgctgcacgtcgtacacgtcgaagtctgaagaggattgctgcactgcagatcaatcaatgattttccaattttcgtcaaaacaagaaaccaatgattttccaggctcatggacacggtctacccaggcacccatccgtagacgtgcaaaattatgaaaaactgatggcgatctggcgatgaatgaatgaatgattcggaccgccgctacgttgttgctgccgacgcgttcgttggccgtgtgtccgtgtctcggtctgcagtcttcagtgtctcagtccgatcggaatgaaatggaatggaggagatggcggtgtgaactgtccttggtagtggagttgtggattggctcgtatacgacaaatgtatttggatatttggcacttgttatcgctggaaaaaatatagtcaagtcgtgtacgaggaaaactgcatgctactaccatacatacgaaggatatcaagttcttgacattttgatatggagcatagcaaaactgttctagttctcgtttgaaatgcgagaatgtgttcacaaaaggctgattcattttatttaaaattcacgcaatattcctctgttcgaaggaaaggtcttgttgtgtttttctttttcttttttttcttttctagtgcaggctgatctgctgtgctgagtgcagaccgtggcagaagtgatttacttttccttgtataagggggtgtttgaatccggggtgtaaagttttagcgtgtcacatcgaatattatataaggtatcgcatgtggcagggtttacattaccggttgaccactaaatttcgaaccccatcggtatcaccgttttcgataaattttgatcggttttcgat

SEQ ID NO: 9500 - DNA, 2830 bp, Oryza sativa
  ref <308>: DATABASE ACCESSION NUMBER: AK106848
  ref <309>: DATABASE ENTRY DATE: 2002-08-28
aagtgtcgcacaaggtgatattgcttgtgcagctgtcaagctcgcgtcaaccaaccatatcttatgacctcttactatttgtgatatattaactgactcagccacatttccatggacacactgagtatactgctaaacagaattaattaagttctctgttgtgctgaacctcttgaagacttgttgcgtgtcatgttgttgttaacttggtatggtgttgtgccactgcatgcccactcctggagtagattgcacggcatgccaaacaaacattgcgcccgatcacgcgcgactttgcctagctagctagtgcattttgcttgcacgcgctcagtccggatcgcggcgtgcccttcttttcccaaaaaacgctactaaaattaggccgctttccccccttctctccctgcttgtgttcacagcaatagcagctcgggttggcttgggacacttaaaatattggagcagagcagcagcagcagtagtaggcaccactatgaattgcaagttgccttgtcccctgtttgcactctcacgaaaccgttagttctgtgcacatctttccgggcatgccccaccttgtgtggacaacagtatgttgtatgcaatgtgtgtgtggggtaggccaaagttggtggtacttgcaaacaaaaagtcgctttaatctcgcaccagttgcttgaccactacaggaaccgagatgcgttgccattttgcctattctgatgatgccatgatctggggtatatttctgatgtgttgttttggatttgtgatcgtgcaggccgagtacttccgtcaccttctcaagcccgtgacgtaggttgaccagtacataatcctcctcccttcttcacccgacgagagagctagctgcgcagcttctctcacaaggaaaaaaacagaggagacaaacagagtttggaagttaagagcagaagaagatgcagggagaccacgggtactacggcgggagggactcgccgccgcaggggtacggctacggcggcggctacggctacggaggcgggtatggctacgacgccggtgggtactactccggcggcggcggcggctacccgtcggctggggcggcggcggcggcgtacgaggacccgatggtcgggaggaggacgcacgacttcccggcgccgatgaacgagctggagttccagccgtcggccacgtgccccaagaactacgtcatcttcgaccagacgtgcaccaagagccgggtcatgttccacccctcgctggcgcacaagttcggcggcgggtcgtcggcgtacgacaacaacgtgtacggcggcggcggagcgcacgacgccgccaagggcgcgtacagggacagcgtcggctacgacgacgacgacagctgctcggtgcggcagaaggaggacacggacgagatcgacgcgctgctgagctcggaggacggcgacgaggacgacgtggtgagcacggggcgcaccccggggtaccgggacggcagctccccggactcgacgtgctcgtccagctacggcggcgggcaggcgaggcccgggcgcaagaaggagcgcatgaagaagatggtgcggacgctcaagggcattatccccggcggcaaccagatggacacgccggccgtgctcgacgaggccgtccggtacctcaagtctctcaaggtcgaggtcaagaagcttggcgtgcgcggctccgacaactgatcatcatcatctccaacaccggcagaacggaggaaacaaacaaacaaaaaaaaaagagaggcagctgcagcggcagcaacagcaccagcagtcagcagcagcgatcgagtgctactactgacagtacactgcatctgcatgcacgacatgtaccctactccatcatcctccatttctccatgccttgggtcggcattggcatcgccaagctagccatagctagttgatgcccttttcgcagtgccatgatctggccaaactctttttgtgcgctctacttttggctacgggctttatgctccgtccatgatgagagagggagcatgggagggggcagaggagaggcagcgatcatcatcaatgtactactagtactagctagtgctcatttgctttgggtgtactatagtagtagtggagagatgatggatatggattatggagttctagttaggcagaggagaggagagggagaagggcagcattgcaatcgcatatttgcatgctttggctttgtctgctactactcctcttcatttgttgccttgcttgcttttttcctttctgcccctgccatgtggcccccccttcccctgctggatgaattatccattgatgatcccctccttcgttagcttgacgtgttcagttatactggttactgtttctgcctttgtcttgttccatttggtctctccatccatcgatccatgaactagcatgatgccatgatccatgcatgcatggatggatgcactgctggtgcttacactctcaatatgccatcattgtgacgatgtgtgggtgtgctgctagctcatgatggcgatggcacgttgccaccccgtctcccgtgggtatatgtttgtgtgcatgctttgcttgcttgtgtaatgcacagcatgttcatgttggggttggcactagcgggagcctgcctttttggcgagaagtgatcgagcaagcatcgatcccatcccggccgtctctcgcccccttttgttctagctagctagtgctcgaatcccacacgggaaaaggggggtttagcaatgtcaacttgatgcatgcttggtaaaagttgtcctaatgatgctcattaactattagttgttcctgct

SEQ ID NO: 9501 - DNA, 1681 bp, Oryza sativa
  ref <308>: DATABASE ACCESSION NUMBER: AK106849
  ref <309>: DATABASE ENTRY DATE: 2002-08-28
caatttaatctctttttgggttaagcaagaactttgtattgatgggtgcatggactggtggtggtgcagccgtcagctcgctctgaactctgaggtggtttgtttttttttctcaggcgcttgcaacactacatcatttccagaacgccttcaccaaaattcactgcatgcaatcaggcgcaagggttgtgttagtgatatgccctaggggcaatcatagagatgattgtattacatactatgtttacatatttatccaactttgttccttgaaatagataactcattattagttaatgaatatgtgattctttcatgagactctttatgttgtttgttactatttctaaaagatccctgatcaaacatcatatatggaacaaatatggttaaatgatcagcacatatattaattgatgatcatgtctcatagatcatagtatctttactacttaaaaaatacgtggtggtgttggtgagtcctgtataatccaagggccgatattcctcgcaggatcctcccacagatcgaagggatcaaataacctcctgctgtcccgcaccacccccacctccgtatcgcactgtcctcacactgccccctccatcgcacgcccccgtcactcctccttcgtaccgccttcgccgctttcccagcgccgccgtcgcgccctcggcggctcctccgccgcgctgccgccacatcagtcgcgaccccggcagctcctccgccgcactgccgccacctcggtcgtgaaccccggcgcctcatccgccgcgctgctgccacctccgtcgtgaaccccggcgcctactccattgcctcatagcccctctcctcctccaaccctacggctttctcctccgtccggtgcaccgcctcttccatccccatatcctattcctacttcatctctccctaccgctgtcactgctcaaaccctaagatccgaagggagggaagagaacctaagatcggaaggggagggaagagaagagcgcataggcggtggcaacggcaacctcagcaggcatgctgtcgacttccatcatccctgtcatcctccaggatccaaacatatgttgatgaaaccggcatcacaggccaagcccaaggcaacagtggggtttgaacttcgaagacgatttaatccctgtctttggtgaaaacacaaatcatcatgattcaccatggtattaggagacgaacaactacaggggaatatctcatgcttttatggaaccagctaatgtgagagtatcaaggggagtcttggccgaatccgttgctcatggctggtaggagtgaggagtacataggattccacactacgaggtgaaagaacctcaacttaaatatggtgatattggagattccctgttgaccggttgaggtgatggttggactgccacacacatgcgcgcgcgccgagtcggcctcggccgtaggcgtagcgaggcgaggcggccgaccgagccgagcctgcctgctgctcttccgttttgtaacaggtgagaataaagtcaccattaacaaatgaaattcattgtgttgtagcctccacaacaaatgagagattcattgtgttgtaacctccacaacaaatgagagattcattgtgttgtaacatccacaacaaatgagatttatttgtgtggtaatggagatctctctctctat

SEQ ID NO: 9502 - DNA, 1617 bp, Oryza sativa
  ref <308>: DATABASE ACCESSION NUMBER: AK106850
  ref <309>: DATABASE ENTRY DATE: 2002-08-28
aagaaaccaactgctttctcctacccaatatcacccttgccccttttatatactcttcctctcatcaccttctcgatcggcctctctcctctcctctcatcagctcacacccccaaccaacaaacctagttaatttagctctagttggttcatccctgctgcactgcgagctcaagtaatcgatctgagctctgaagaaaaaggtggtagagtgcgaggaagatgtatcacccgcagtgcgagctcctgatgccgcttgagagcctggagatggacgtcggccagtcgcacctcgccgccgccgtcgcagcagccatgccgggggagctcaacttccacctcctccactcgctcgacgccgccgcggcggctgcctcctccaccgccgcctcggcctcctcccagcccaccgtcgactacttcttcggcggcgccgaccagcagccgccgccgccggcggcgatgcagtacgaccagctggcggcgccgcaccaccaccagacggtggccatgctgcgcgactactacggcggccactacccgccggcggcggcggcggcggcggccaccgaggcgtacttccgcggcgggccaaggacggccgggtcgtcgtcgctcgtgttcggcccggccgacgacgagtcggccttcatggtcggacccttcgagagctccccgacgccgcggtccggcggcggcaggaagcgtagccgcgccaccgccggcttccacggcggcgggccggccaacggcgtcgagaagaaggagaagcagcgccgcctgtggctcaccgagaagtacaacgccctcatgctcctcatccccaaccgcaccaaggaggatagagcgacggtgatctcagacgcgatcgagtacatccaggagctagggaggacggtggaggagctgacgctgctggtggagaagaagcggcggcggagggagatgcagggggacgtggtggacgcggcgacgtcgtcggtggtggcggggatggatcaggcggcggagagctcggagggcgaggtgatggcggcggcggcgatgggcgcggtggcaccgccgccgcggcaggcgccgatccggagcacgtacatccagcggcggagcaaggagacgttcgtggacgtgcggatcgtggaggacgacgtgaacatcaagctcaccaagcgccgccgcgacggctgtctcgccgccgcgtcgcgcgcgctggacgacctccgcctcgacctcgtccacctctccggcggcaagatcggcgactgccacatctacatgttcaacaccaagattcattcgggatctccagtgtttgcaagtgcagtggccagcaggctgattgaagtggtggatgagtactaactagctcgagctagctaattagccgaccgaccgatcgatatgatgaaagtttctatgttgctagctagctagggttcttggatgcatgagtactgagtagctctttaattaatttccttttaattttagactgtttaatttggattggtaaagactcgtgttagcttttgggagatctttggtatgtcatggtttgcatgtattattttggtctacttggataaataattgatgctctttgagacgttaattaat

SEQ ID NO: 9503 - DNA, 1782 bp, Oryza sativa
  ref <308>: DATABASE ACCESSION NUMBER: AK106851
  ref <309>: DATABASE ENTRY DATE: 2002-08-28
agcaaattgatatactactccagcaccggccaaattaactaacttaacggccactgcttttcacactatattaatgtgcagttggtcactctcgagccacactctcacttcgccggtgaggcaggcagcaatggagccaaagagcagcagctgcggcggcgccggcattcggctgcggctgctggtcgtgctccacctgctgctcttagttccgagctcggccatggcgttcaactacgccgacgcgctcgccaagtccatcatcttcttcgagggccagcgctccggcaagctcccgcccggcaaccgcatgccgtggcgcgccgactccggcctcaccgacggcgcccagtacaatgtggatttggtgggcgggtactacgacgccggcgacaacgtcaagttcggcctgcccatggcgttctcgacgacgatgctggcgtggagcgtgctcgacttcggcaagttcatgggcgccgagctgcccaacgcccgcgccgccgtgcgctggggcgccgactacctcctcaaggccgccaccgccacgcccggcgcgctctacgtccaggtcgccgaccccaaccaggaccaccgctgctgggagcgccccgaggacatggacacaccccgcagcgtctaccgcgtcaccgccgacaagccgggttccgacgtcgccggcgagacggccgccgcgctcgccgcgtcgtccatggtgttccgccgcgccgacccggcctactccgcgcgcctcctccacgccgcgacgcaggtgttcgacttcgccgaccggcaccgcgggtcgtacagcgactcgctggcgtcgtcggtgtgcccgttctactgctcctactcgggctaccacgacgagctcctgtggggggcgtcgtggctgcaccgcgcgtcgaggaacgcgtcgttcatgtcgtacgtggaggcgaacgggatgcagctcggcgccggggacgacgactactccttcagctgggacgacaagcgggtgggcaccaaggtgctcctcgccaagggcttcctccgcaaccgcctccatggcctcgagctctacaaggcgcactccgacagctacatctgctcgctggtgcccggcacggcgagcttccagtcgcggtacacccccggcggcctcctgtacagggaaggctccagcaacatgcagtacgtgacgacggcgacgttcctgatgctggcgtacgccaagtacctccggtcgagcggcgccaccgcgtcgtgcggcgacggcggcggcggagcgaggggggaggtgtcggcggcggagctggtggcggtggcgaagcggcaggtggactacatcctggggaagaacccggcggggatgtcgtacatggtggggttcgggtgcaggtacccgaggcgggcgcaccaccgcggcgcgtccatgccgtcggtgcgcgcccacccggggcggatctcctgcgacgccggcttcggctacctccactccggcgagcccaacccgaacgtgctcgtcggcgccgtcgtcggcgggccggacagccgcgacgcctttgccgacgaccgcggcaacttcgcgcagtcggagccggccacctacatcaacgcgccgctcgtcggcgcgctcgcctacttcgccggaaccaccaagtagccattagtgagagtgtgagtgacgtggcagtgtgggagcgcgaggccagtgagatgagctcccccgccacgctgtatcgttcgttgactttgtcgtgtattcgacgcaacaaacagtatttgcacggagtacgtacg

SEQ ID NO: 9504 - DNA, 1774 bp, Oryza sativa
  ref <308>: DATABASE ACCESSION NUMBER: AK106852
  ref <309>: DATABASE ENTRY DATE: 2002-08-28
aaattcacatcgccgtccgccgccttgtcggctcgccggcgagccgtctccgccgcctctcgagtccgatcaaaaaaaaaaaaaaacatggaggggtcgccccgacgccggaagctgcggcggctgtctccgggggcggcgccgcagcagccgaagccgagcctgaactccctcccgtcggagatcctcgagaacatcgtcggccgcctccccgtccgccaggccgtccgcacgtcggctctctcccgcgactggcgccgccgctgggagtcctccccggggatccgcttcgggtggggcagcggcgaggcgggcgccgccgccgccgtcggccaaatcctcgcgcggtacgcgtgccccgtccgccatttccgccacgggtggatcgagagcggtggctccgcccgcgcggacgagtggttcgtcgtcctcgccgggaggggcgtcgagcacctcgccctaatcttctcggaggccgacaacttcctcttccacacgcttcacgccgccatcttctcgtgccgcgagctcaccaagctggagctcgggagctgccgcctcccggccgcgccctcggacttctcagggttcccaaatctcaccgtgttaaccctcaccatggtcgcttttccaccccatggggagaggactttggaggcgatgatctcctcggctccgttgcttcagtcgctggagcttaagaatgttagtatggaaggcggcgagtgggatgagtgggtgattcgggcaccaaatctcaaggatttgattattcagttagagttcgattttctatgggagatcgagcagcttccttccatccagacggcgactatcagtgttgataatgaatctaccgatcgtgattttgttcagctactgacatgttttgctcgaccttcatataccggatacagaagtggataatgctctggagggactttcatgttcttttgagaaattgaagaaattaacacttcgtacaaaattctgtgatgtctctaacattttatgtatgttttctttactcaataagtgccccaacattgaagttctggacattgaggtgatattgcatcagttcttttccctatttaatgctctcatttaaaatatttttacaggaactatttaaaatatttgttaatttttggcagatcatggaaagttattatcctcagaatgatgatatagatgtagattttttcaatacaattgggaccaacgatatgtttgctaatctggatggcataaccatgaggaataccccatgcttgtcaaatgatatgcactttattgagtttgttctgtcaagagctaggctacttactaaattttgggtttttcgagatgatagtagctcattctcaaagcctagtgaagaagcagttatcgagttagtaaaatatagaagagtgtcaccaaaagccaaggtcttctttaggagcatggatgattattgcatttgagtgccaagagcattcttggtgcggagctagaggatatcttttacatggactgtggtcaagcatgctttcgcatattacttgctaccggaacagcttgattgttaagttttctttctaccggacatgactctggtaatatttgttgtgggtatccgagagcatgtatcaattgtcactggttgattcagtgtcaattttgcagaaatggtggaggtaacagtggcttgtagtgtaatcttcttcgaagataaaaaagtgtttacagtaattgtctgtacaccaaatactagtcagacattttaatt

SEQ ID NO: 9505 - DNA, 1736 bp, Oryza sativa
  ref <308>: DATABASE ACCESSION NUMBER: AK106853
  ref <309>: DATABASE ENTRY DATE: 2002-08-28
atttcgatctcccgcgggccgttgccgcgaagctaggtctctaggaagagatcgccggcgattcgcgatggttccgtggcgccgctcctcctcctcctcttccgccccttcctcgcggcccgcgcggcgtcccgcccgcaccaatgcgagggtctccccagacgtctcgtcggaattgtcgccgttggcgggggaggagggggcaggcgaggagaggtggtcggcgttggtgcccgaccttctggcagatatcctgcggtgcgtggaggccggctcagagaggtggccgccccggcgcgacgtggtggcctgcgccagcgtctgccgccggtggcgcgacgtcgccgtcgccgtcgtgcagccgccgctcgagtccgggaagatcacgttcccctcctcattgaagcagcctggaccaagggacgcaccaatgcagtgtttcatcaagaggaacaagaaaaactctacctttttcctatatcttggattaacacaagaactaacagatgatgagaaatttctgttggcggctcggaggtgcaggcgtgggttgcataaggaatatgccatcaccattaactctgatggtctcttccatggaagccagtcatgcgttggaaatctaaagtctaatttcacgggaacaaagttcaccattcgtgattggcaaccaccatatgaaggtgctaaggcgttcagcagcagatccggtcgctggtttggaaacaaacacagatgcccactggtttccacgggtgatgtagaagttggagaggtatcctataaatacagtttactcagaccaagaggtccaagaagaatgagctgcagtgttcagtgtcccgtcctcaagggtactgcagtagatccacaagacggaaaacgacttagcaatagcatccctagttcattggttctgaacagtaaagtaccaagttggcatgagcatcttcagtgctggtgcttgaattttcacggccgggttatggttgcatctgtgaagaacttccagcttattgctccagtcgaaccaggggagccgtcggataagacagtagtactgcagtttggaaaaattgacgatgacgtttttacaatggactaccggcagcctctgtcggcattccaggcatttgctatctgcctctccaactttggcacaaagcttgcttaactttggcacaaagcttgcttaactttggcacaaagcttgcttgtgaataggtagctccatgcacttattattgttgtagtatgattttattgttttcgttaccagtaacagaatttatttataatactggctaggaggatgtctaaaatgaggctaacatcctacattacagtctttgttgcccattctgaccattttgttctcgtctctagccatgtcgtctaacaactccgacaagagatatagcttgtgcatggttacgggagttcatcagcactttggagctaatgcggtcaagatcgttgatgtgctgaaaagaatagtttgagtagtccagagtgaaaagatgggataaagggttttcaaagtgaaacaggccgaaagtgtaattctatatgtgaggtgttgccgtatcatgtcataatgcaacgttgtgcttgtgtgtttgggatcctattaaatctgtatatgtatccaggatgaggaagacttgtaaatctgcagtcctcagtgtagtcatgtatgactgcagaatctttaggtgcgataagactgttactac

SEQ ID NO: 9506 - DNA, 1923 bp, Oryza sativa
  ref <308>: DATABASE ACCESSION NUMBER: AK106854
  ref <309>: DATABASE ENTRY DATE: 2002-08-28
ctagagtgtgtttcttgtgttgatctgagtttgatttgattttcagttttgcaccatgcgatcgatcgagagtgtgttgttgttcttgttttggttcttttctagtagtatcagttgcactgattaattaattaatatagcttgtgttttgattcggtagacacggctatctgcagcgtatcaaagcttttcctgttgcacaccacacctaccatgagttcctttcaatcaatgcctctctctctctctctcgatctgcagatcaaatatacaattcgccttctcgatcgagtagttgatgaacagtgttccccttgattgattgatcaccattattataacatcctctttctttcttctcactgtaccacacacttcgatctctgcagcctgaaccaagcaagaattatagtattagaacaactccagatatctctaaagctgatgatctagctctactttctgcatcgatcgatctcgttaattagggttagatcaccggccggcacagtgcatcttcaaataagcatcatttgctctttgagtgatacagtactatgcttccccttctgctgatctgctctctctgtccctgcatgtattacagttaatttgtgtcagttcttgcttggctgagctaagttcacgccagatcttcaaaaccccaatcttgctactgtgttttgtttttcttggaccacccagttatctgcctttttttatttttttccaaatctcacaaagctttgcacgtcaaacatattagaagaagcattgagataacttccagattagctgaaaccctagttctttctcattctgaatcatccacagtatgtcaaattctcaatagcattagctgcttggtttgaccattggtcatggggttgacgaactgacacgcagcaattaatggttcatgtttggcaggtgagagattgaggagatggacatgatcggcatggcgtcgccggcggaaagccccggcggcggcggcacggccaggccgagcaggtacgagtcgcagaagcggcgggactggcagacgttcgggcagtatctgcgcaaccaccggccgccgctggagctctcccggtgcagcggcgcgcacgtgctggagttcctccggtacctggaccagttcgggaagacgaaggtgcacgcccatggctgccccttcttcggccacccctcgccgccggcgccgtgcccctgcccgctccgccaggcgtggggcagcctcgacgccctcgtcggccgcctccgcgccgccttcgaggagcacggcggccgccctgagtccaaccccttcggcgcccgcgccgtccgcctctacctccgcgacatccgcgacacgcagtccaaggcccgcggcatcgcctacgagaagaagcgccgcaagcgcgccgccgcctcccacaccaagcagaagcagcagcagcagcagctggtggaacaggcggcggcggccgccgaggcgcacgccgccggctgcatgatgccactgtcggtgttcaactagctcctccatcgatctccattaatccttaagcttacgcagcttttgcaaatgcattatggcgatgggccagcctcatcgccatttgatcatatcaaattgctcgcaaatgcaaatttgcatggatgcgtggtgatttgcatttgctttgggattaattcggaggttttatatataattagctagtgcatgcacacgcacgtaatttgcatggtttttttttgtacgaaatgtttgtagtaaaattttaggttaatttagttataaactgtcactaagctagcggcaagatggtcagctgttggggcgcatgttaattatcttcatggctttgaagtgacttttaattaattaaggactggtcaacgaaatgccaatgtaaattaatcaattaaatcttatat

SEQ ID NO: 9507 - DNA, 1679 bp, Oryza sativa
  ref <308>: DATABASE ACCESSION NUMBER: AK106855
  ref <309>: DATABASE ENTRY DATE: 2002-08-28
gtatgaggccatctcgtctgaaccagcactccttcctcttcctcctccgagaggcctccgcctccgccgccgcgcgccgccgcctccctcccctccacgctctcctcgtcgagctcggcctccagccctacgcgcgcgtgcacaatgccctcatccaggcgtacgccgcctcgggcctcgtcgacgacgcccgcagggtgttcgacggaatgtcccaccgggacaccgtctcgttcaactccatgatccacgcccacgccatgtccggcgacgtcgtctcggcgcgccggctgttcgagcgtgtcccgtcgccgacacccgtcacgtggacgtcgatggtcgcggggctctgccgcgccggggacgtcgccgcggcgaggcgcctgttcgaggagatgccggtgagggacctggtttcctggaacgccatgatgtccgggctcgccgggaacaggcggcccgtggaggcgctgtgcctcttccgccggatgatggcggagggcttcgcgccgaaccgcgggacggtcctcagcgcgctggcggcgtgcgcgggcgccggcgcgctggagacggggaagtggatccacgccttcgtcgagaggaagaggctcttccggtggtgggatgagttcctcggcactgcgctgctcgacatgtatgccaagtgcggcgccgtggagcttgctctggatgtgttctccaagttgagatcgaggaacacttgcacatggaacgccatgatcaatggcttggccatgaatggctactcagcaaaagcattggacatgtttcgcaagatggggcttgacagaacagtggtgccggatgaagtgacctttgtaggagtcctactagcttgcagccatggtggatttgtggatgtagggagggagcatttccacatgattgagaagaagtatggcataaggttaatccttgagcattatgcatgcatggttgatctccttgctcgctccggtcatctgcaggaagcccacaaaatcattgcaggaatgccgatgaaacccgatgctgtcgtttggagggcattgctcggtggatgccgtctccacaaggatgtcaagatggctgaaactgcaatatctgagatggaagcaacttgtagtggtgatcatgtcctcctgtcaaatctctatgctgcagttgggagatggagtggtgttgaagatgtccggaggaccatgagaagcaaggggattgagaagattcctggctgcagctcaattgagataaatgactccatccatgagttcgtctcaggtgacaagtcacacccatcatataatgacattcatgcaaagctggctgagattagcgcaaggatgcaacaacaaggttatgtcacagagactgcagaggtgttttatgatgttgaggaggaagagaaagaacaggcactcggtcatcacagcgagaagcttgcaattgcatttgggctcattggaggccctccaaatgtagcaatcagaatcgtaaagaatcttcgcttttgtgcagattgccacaagtttgccaagttagtgtcccagatctatcattgggagattgtggttcgggatagagccagattccatcattttacagagggagcctgctcttgcaatgatttttggtagtagagaaatctggaatagtggcataaagtatgctttcttgtc

SEQ ID NO: 9508 - DNA, 1047 bp, Oryza sativa
  ref <308>: DATABASE ACCESSION NUMBER: AK106856
  ref <309>: DATABASE ENTRY DATE: 2002-08-28
ctctctcccgagccctctcgccatcctcgcgttctttttctccaccgagaccaccggcgctctccttctcccagtcaaccccgccgatgagaccccttccctcctagtccctctccccatccccctctcctttactctaggcgaggcagagagcgacgggatcagcggcgctcgagctctccggcgatgagagagagttgggcgtctcggatccagcctcgtgctcgccggatctagcggcgcgggccacaacggcggcggatttgccagcaagcggcaacacagccacaacggtggcggcggttcctctccccttcctctttcacgagcaatggcagatccccacggcgatggaggatctagccgcgagctcgccggcctctccccctcccttcttcgcgagcgtcgcatcggctggcctctcccctcccacccccttctcgcaacggtgaggggccaccggcggcggcggatccgaccatgagctcaccagatccgaccacgagctcgctggatctggtggcaacggggagcagcggtggtggcggatctggtgagaggcgacgcgaccacaacggcggcaatgagcggcgacaacgaccacgacgagatggggacttagggtaggtgcatggggggaccaaccggacgatgtgatgcactgggctccgggctcatccatcgcaaagtcctcgagtcgtggcttcgcggctcccgatcctaggccggcgcttcaaccgttccctctgcaagaaccgctccggcctacggaaccacgagctcgactgccagctcagcttggctccgacgtgaagccgtgagaccacagggcagagtggagcgttatacattgccttagtaaaaaactcgaatattagggaagggcctaatatcaaataattagaaggagtaaggctcagaacccagatcatctagcccaccaccttgtaaagatagccgaaaaacccatggacatttctcatacattgccttagtggctctaaagtcgggtgacttaagtgacaaaaaaaaaaaaaaaaaaaaaag

SEQ ID NO: 9509 - DNA, 789 bp, Oryza sativa
  ref <308>: DATABASE ACCESSION NUMBER: AK106857
  ref <309>: DATABASE ENTRY DATE: 2002-08-28
aaaaaccaccaaaaaccatcctccaaaaccacagatcaacatcaccaaaccacaaatcaagaaagaaaaaaaaaacagcagcagcaatggagaacaagaagagatcaccaccattgccaccactgtcatcagtagcagcagtagtagtactaccggtactcctgctactgttcactttcatggcaacggaggccaacgcccaggtgttctgcaggtcgcagttcaacctggcaaacgaggcctgcagcctccggaccttctccggccccaacccggcggtgccgctgcgccagctcaacgagtcggcggtggcggtaatggcggagcaccgcgagcgcgagcacggccatggcggtggcggtggcggcggcggtgggcggctgcgcagccaccgcgccgacccctacgacacggcgtgctgccggcgtctgatgggcatcgacaacgcctgcatctgccaggccatgtcctacctcccggtgttcatgagcagggtcaagcacgccatcaagctcacccccgtccccggctgcgacgtctccttcgagtgcgccgccgcctactgatcgccggagcgccgccggcggtggcggcggcggccatgggtctttctttctttctccacagcattttgcatcccacagctgaattcagagaagttaacaacatctagagaaatatgtattcatgttcttcagatgctgcatcattagactactactacatggtgtttgtattagcagtaatgtggctatgtcaatcattttgaatttgaaactaattccatgc

SEQ ID NO: 9510 - DNA, 1668 bp, Oryza sativa
  ref <308>: DATABASE ACCESSION NUMBER: AK106858
  ref <309>: DATABASE ENTRY DATE: 2002-08-28
agacgaggcgggcggcgccgcagccgtccacccccgcggaccccaagcccaggaaggaagcttctcgaatcttctcgaagctccctgatccttcctcctcccccaaaaccctagatccctaaccccattcggccaccaccaccgccaccatcccccccatggaccatccatggcggttccccgccggcgacgagctctgcccggtctgcgccgcgccgcacttccccttctgcccgcctccgccccaccccttcccctacgatctccacccgcctccgccccctcctccgccggagtaccacgcccccttccaccctcctcctcctcctcctcccccgccggagtatcacgtccccttccaccctccgccgccgatgtgggcccccccggggccgcacccctacgaggtcctcgacatggaggccccccacaagcggatgcgcgtgggcgatccgtacggcgacgggatgcctcccccgctgcccccgccgccgccgccggggatggttcccgtggagggcgaccggctgctcggcttgatccgggatcacggccgccctccgtttccgccgccgcctgggatgttgcacggcgaaccgtacccacctcctgatcggttcggctatggaggagggagaggctatcctcctcctccaaattatgacaatccctatgcgcatgaaggcagttttcccgattacgagcacgccgggaggtttccacctgcgcatgaaaggcttgccgccttaggttcaagttttgtgcctggaggacctcaggaggggtatttcaaccatgatcaccgctacaatcgcttccaacgctcggaatcgcctgttgcgccgccgctccctccaccggctcgataccctgaggcgagaagccgttatgattcccacggttggcatcctgaggcggatgttccaccaccaccaccaccactggagcctcctgtaccgtcttcctcagattaccatgccaagccacctttgcaggcttgttttggcagtcgtcggccgaccaaggggacctctcggatgtggtgagggccagccttcagctgcagacggcgcctcgccatcaggctgcatcgccgccgtatgtgcacctcttaggaggaggaggaggaggaggagaagaccagcttgcagcagtgagccaacacgctgagcagcagcagcagagcatggtggatgcttctgcagcttgcgaccttctccatgcgctgttgccaccaccaccagtagtgcaggtgcagcagcagggagcgtcgaggacgaggacgacgattgaggaggacaccaccggcgacggcgaggagttatttgctggtgctcattatgtcgttccgcccatcaagcgaaggtgttagttgaggttatgggaatgtagctggtgatggattgggacttatcacgctagacaatgggatgttcaggctagagaacaatgcatgtggaggtgaaggttttcatatgacatacacgtagagttgtgcctatggaaagataggtcaaatttaaaacggagtccaagtttgagaagattggagtgtggagttgtatggtgacattgtttgcctagttcgtgagttgagagggaggagtgttttagatgcaatttataaacatatattaatgcaataaagttgatctactttcaagagtt

SEQ ID NO: 9511 - DNA, 1729 bp, Oryza sativa
  ref <308>: DATABASE ACCESSION NUMBER: AK106859
  ref <309>: DATABASE ENTRY DATE: 2002-08-28
cttccactgtgttcctaattccttccctgcaattattggttgctgcttcacttgatcttattggcaaccagctagctaagcttatacacacccacggccagacctgaaccttctacctactaccgcacaaaaacaacaagctacctagctctctaacaacaatctcatttgcatgaatcgcaggagatcgatagtagctactagttagcaagttcatatatagatcgatctatgatcgatgctagctagctaatagtatcatcgatcgggaaaacagacacaaattagagctagctagagcccccgccggccgggtcgacgtactgctgctaatcaatagccagcacaagacgtgggaattgattaaggcgcatgcaggcagggcggagttaataattaatggaggagcacgactacgactccaactcgaacccgccgttgatgagcacgtacaagcacctgttcgtggagcagcaccgcctggacatggacatgggcgccatcgacgtcgacgagtgcgagctccctgtgatcgacctcgcggggctcatggaggcggagcaggtgtgccgcgcagacatggtgcgtgcggcgtcggaatggggcttcttccaggtgaccaaccacggcgtgccgcaggcgctgctgcgcgagctgcacgacgcacaggtggccgtgttccggcggcccttccaggagaaggtgaccgagaggctgctcggcttctcgccggagagctaccggtggggaacgccgacggccaagtgcctggagcagctgtcgtggtcggaggcctatcacatcccaatgacgacgcccaggcccagcacgagcatcagggccagggcggtgatcgaggaggtgtcgagggcgatgtacgagctggcgcagaagctggcagagatcctgatgagagggctgccgggcgccggcgagggcgagacgatggtgacgacgcgggaggagacgtgcttcctgcggctgaaccggtacccaccgtgcgccatggccatggggggcttcgggctgtgcccgcacacggacagcgacttgctcaccatcgtgcaccagcagcaggacaccgtcggcggcctccagctgctcaagggcggcaggtgggtggccgtgaagcccagccccagcaccctcatcgtcaacgtcagcgacctcctgcaggcgtggagcaacgatgtgtacaagagcgtggagcacagggtgatggccaacgccacgctggagcgcttctccatggccttcttcctctgcccctcctaccacacgctcatcatcccaagcagcagccatgtccacgacgacgatgcccattaccggagcttcaccttcggcgagtacaggaagcagatcatggaggacgtcaggagcacaggccgcaagattggactgcaccgctttcgaacccgatagatagatccacctgacctacatacccgccctactcctactatatatatcaaatcaccactgctataatgcattatactcgatccactatgcatttttcatcgccacaatatgcatgtacctagccaataattaattaagctgcactttgcttacttattgctagcttgctactgcatcgatctatatgcatgtacacacatttcattgccttagcagtgtatgtatatgcattattttttccttatttgcccttagcttgcagatttcatagcagctaatatatatccgtcggaattatttgaac

SEQ ID NO: 9512 - DNA, 2729 bp, Oryza sativa
  ref <308>: DATABASE ACCESSION NUMBER: AK106860
  ref <309>: DATABASE ENTRY DATE: 2002-08-28
ctggctctctctctctctctcttttgccttctcaattcccaccgttgtttcgctcctcccacccgccgccgccgccgcctcctcctccctccccttgactcgcgacgacgacggcgacgcgagctcgccggagggtcgccgcctccccttccccttcgcggtagccgcgcgcggcttcctcctcccgcgtcgccgcctcgcacattggggatctcccgttccccgttcccccgcgcaccgctggaaggctattttgccgcggccgcaaaccctagcttccgccgccgtggtgaggggcggtggcgggaaggggatcgagcggtgcggaaggtgttattggacattgattatctttggtggatgacgtcctcgcaataaagtgggtcagtgtttcgaaagattctgcaagatgttcagagagggtttagaaactattaccctagaagattattactgatgccagtacgtgaacggaaaaagaaaaagggaaggtggcttgcttaaccgaagggaagaaatgaccaaagctactcctgttaaagcaagcaagaaccttcaattgcagaaacaatctccaactaacttaaaagaaacaaatggccatgtttgtaagaaggaagtggtgaatggcgagtgtcctgtccgtgacgtgaaatgcattagcacttggatctgtaagaatttggcctgtaaagctgttgtaacatctgaagattccttctgcaagaggtgctcatgttgtatttgccatcagtttgatgacaataaggatcctagtctatggttggtttgtgcatctgaaaatgatgacaagaactgctgtgggtcttcttgccatattgagtgtgcgctccaacacaagagggttggctgctttaatcttgggaatattattcaacttgatgggagttattcttgcgcttcatgtggaaaggtttccggaatactaggttattggaaaaggcaattggtgattgccaaagatgcacgccgagtagatatgctctgccaccgcatctatttgagttatcggctactggggggaactacccgctttaaagaattgcatggtattattgaagatgcaaaagcaaaattggaaagtgaagttggtccactggatggaatgtcggcaaagatggcacgtggtattgtaagcaggttgcctgctggtagtgatttgcagaaactttgctctctagctattgaaagagctgatgagttgctgagttccccagacctgcatcttcaagattccttacctgctgcctgtagattcagatttgtagagataacatcttcttccattgttattattctaaaagaaactccattaccatcctctgacactatcaggggttataaactatggtactggaagagcagagaggagccaagcatggaagagcctgtagttttgtccaaagatcaaagaaaagtacttgtttttaaccttgccccatgcacacagtattccttcagaattatatcattcacagatgatgggatactaggccattctgaatctaaatgttatacggggagcaaggagttattgtttaaacgtaccacacagaatgtagcgggagcagatgcacatacacatagaagagagaagacacaggcttttaagtcgactggatttaagatccgagatgttgggaagatattgcggcaagcttggactgaggaaggccgttttgaagggttttgtgaagatatgcatgaagcttcatgtgacagaagtgtcacagacgtggagcaaacagagaacagtgaacagggtcaattgttatctggtgcgtgccgcaaacttcagttcagcacattttctgttcctgacctaaacgttgaggcacctgtccccatggacatttccccggacaagtgttacaattcaaagattgtaccagtaagatccaacgatagtggtggctcagagacctgcgcggtgggccggagtgctgaagctgaaccacctgctgttgaatctcggccagagggctgtgaacaagatggtgcttccactatttgccgtgagaagcagcttgcaagaccgagggagttggatgaggactttgagtactgtgtgcagaagatcaggatgctggaatgcaagggacacatagataatgatttcaggatgaagttcttgacctggtttagtctaagatcaacggagaatgaccgtagagttgtaactacattcatcaaaacactaatcaatgagccaagtggtctggctgagcagcttgttgattcctttggagaagccataaactgcaagaggcaacgaaatggtttctgcaatgagctttggcatgatgacaaaggacaataattcaagattttgctaactcattgatatcctacagtttttatgatcaaatgcagtgacatctgtttcggttgaccactacatttaggattcaacagcaaaagagggaggaggacattgatggaggtgacaaatttttaggcaccaaataggctgcaccaaaagaattctttttccaccaagaatttgtggaaatattttttttcattggttcagtagtttctagtttcctgtcgaaatctgaaaggtctcgtggtgttgtatctcttgctacctctgctaggtaaacttacgaataattttttggcactagatattggctagacaggcttatattcgtgtatatgttacttaatttggttagtatacatctttcaaatgcttcccgttg

SEQ ID NO: 9513 - DNA, 1617 bp, Oryza sativa
  ref <308>: DATABASE ACCESSION NUMBER: AK106861
  ref <309>: DATABASE ENTRY DATE: 2002-08-28
aaaaaaagaagtacagtcacttctgccccccgagtgataagctccacagcctccaggtgcaggaggtaacttgatcagatcacctcctcccaaatcaacccacacccgtgcaatccactccgctgctcctcggatggcgccgcccagctgcttgctccgcgttggctggctaccagcggctctgtgcgcgctcgcgctcgcgctggcgcccgcctcggacgccacgtcggcgtcgctggtgggcatcaactacggccgcgtggggagcaacctcccgccgccgcaggccgtgctgccgctgctcgagggcctcggcattggccgcgtgcggctctacgacgccgaccctgctgtgctgcacgccttcgccaagaccggggtcgagctcttcgtcggcgtgcccgaccagtccctggccgggctcgctgacccgggtggcgcggattcgtggctcaggtccaacgtcatgcccttcctgccggacacaaagatcgccgcgctcaccgtcggcaacgaggtgctcacgggcaacaactccgctgtcacgcgcgctcttctcccggcgatgcagtccctgcacggcgcgctcgccaagctcggcctcgacaagcagatcgccgtcaccacggcgcacaacctcggcgtgctcggcacgtcctatccgccctcgtcgggtgccttccgcagggacctcctcccgtacatctgccccatcctcgactaccacgcgaggaccggctcgccgttcctggtgaacgcctacccttacttcgcctactccggcgaccccaagggcatccatctggagtacgcgctgctcgaggcgggctacgccggcgtcccggacccaaactccgggctgcgctacccaaacctcctcgtcgcgcaggtggacgccgtctaccacgccatcgcggcggcgaacaccgcggcggctcaggtggtcgaggtgcggatctccgagaccgggtggccctcctccggggacccgggcgagacggccgcgacgccgcagaacgccgcgaggtacaacagcaacgcgatgcggctggtggcggaggggaagggcacgccgctgaagcccacggtggcgatgcgcgcgtacgtgttcgcgctgttcaacgagaacttgaagcccgggctggcgtccgagcgcaactacggcctcttcaagcccgacggcacgccggtgtacgagctctcctacaagctcccgcgcgacaactccacgttcggtggcgccggcaactccggttggagattccccggaggtggtggcggcaatgtcagcggcggttacgacaacaacggagttaacagcggctactacgacatctcggcggcatcgccggattccgcgggtccgtgtagatggtcacaagcggcagtggcaggagcaatggctgtcctggtggtagcagcgtgagatcgtcaagtggtgtcaactctcgtcttgatggaagaaagttggggtaggtagataaaaaatgaaatggaacggcatgcaggatgctccggggccatggtattgattgccatgacttgtggtgccccagtgtttgttgtgttcgctgagaccacaatgtggggaagctaatgagtaatttggcatcagct

SEQ ID NO: 9514 - DNA, 1791 bp, Oryza sativa
  ref <308>: DATABASE ACCESSION NUMBER: AK106862
  ref <309>: DATABASE ENTRY DATE: 2002-08-28
ggggaaataccaaggagaagccattccattcccccccaccgaccagtggccgccgcaccacgccgtctccgatcatctccctgagccggcgaagccgctgagctaggggagggcgccaccgggaggcggcatgaccatcctggtctggatcctgagggagaatgggtataatattccacctcagtcctcagtcccgcccggagccacggcccgcggcacatggacgacctagccggcggcgagggatggtgccgttttgtcgccgtcgttgggggcgaccacgaacctggaagcgggagtggcgcagtcgtctccgaggtctcgagttcgatctatttgtcaccgagaaaattggagctcgagcagccatggtggagctcgcgcctggtgggctgtcggccaacgcccgccgccaaccccggcgctctccgcaagtctcacctcaatactgacgaatctgctggtgctaattgggactaatgttggagagccatagctgtaataataatgcctcagccctgagaaaatgcctggaagaaatcaatttctgggctgtgcgattgaatagtaaagacagagacataatccctgcgtggaaaaagtggggaagctctccccccggtgacttggtctaaagaaaaaacttggtggaagtcacttggcacaagtggtgctggcaagggacacgagcctgactggagagtgagtaccctgcttgaattagatgttggaaggatgatcatcgggctaggatctgcaggaactcctgcgcatatatgatccaggaaccagcactgagtgtaagcaggcctccagtggcgcaggtctccgtctctccaaggtttccagcaggttgtcgagcaatggcagccctaatccaggcactctctgatggttagcctccccttccatctcagctcaccatgggtcccatttctctgttgaatccttgaatttgaaaatagtttaattactgcaatattaattactttgctggtgccaattggtagtttggtactgtactactgattattttggaaccatcactgtaatttttttttatatatgaaaaaggcagaagctctgcctagtcaattaagaagaacagaaagaaacatacatagaggttctcagttacaatttggaagaaactaattaaaaaactaaggacagaatgtgcataccaccaatcttttttgtacagaatgtgccagttggatctttccatcaaggctaaatcatgagcaaacaattttccatgaattgaccctctttgatcatagtcccatcctagcaagatggattggccatccgatgatgataatgcctcagtgttttcagtgaattgaattaatgggggtatggcttcttctgcttgagacattcagtttgttcagatactaataactattgcttttagtttactttcttaccctcaatttgcttttatgattgtttagttgtgaatagtacttcagtttgcagacaatatgatcagatcaaacttgatggaagtcactcggcattactgctgctggcaagagagtagagagtagagaaaagggaaacaggtcagactagagagtaccctagtttattgtaaagtcactgctggccaggatcgtaggactgcagcagatatgtgatccatttgcagaagtggagatgacacgtcttgctgtagttgtcctgtgacaataagcctaaggagtttttacaaaattgtggcatggtgctctcttcagattgtagttaaacagtttccaaggaatcatactattaatctgatct

SEQ ID NO: 9515 - DNA, 687 bp, Oryza sativa
  ref <308>: DATABASE ACCESSION NUMBER: AK106863
  ref <309>: DATABASE ENTRY DATE: 2002-08-28
aaaagcaactcccctcctccactagaccaccatgcacagatcgatggcctctcaggcggtggcgcccctcctcctcatcctcatgctcgcggcggcggcggggggcgcgtcggcggcggtgcagtgcgggcaggtgatgcagctgatggcgccgtgcatgccgtacctcgccggcgcccccgggatgacgccctacggcatctgctgcgacagcctcggcgtgctcaaccggatggccccggcccccgccgaccgcgtcgccgtctgcaactgcgtcaaggacgccgccgccggcttccccgccgtcgacttctcccgcgcctccgccctccccgccgcctgcggcctctccatcagcttcaccatcgcccccaacatggactgcaaccaggttacagaggaactgagaatctgagagcgtgaggaatcgagttcatgttgcatttatcatcaatcatcatcgactagatcaataaatcgagcaaagctttgataaagagcgagccgccttaattaatttacaataatcttggatgtcatcctgcatgcgtgtatgatcacacggttgtttaattaggcactttaattttgcactgtcgtgtgttacttattcctgatctctactatacggtgactaacccctgatcaaaagtttaattcaacatgttttcgagtacttgcgatcct

SEQ ID NO: 9516 - DNA, 1317 bp, Oryza sativa
  ref <308>: DATABASE ACCESSION NUMBER: AK106864
  ref <309>: DATABASE ENTRY DATE: 2002-08-28
ggcctgcgtctccctcctctcctcgcgacgctttcaaatgcaccaccgcctcgcctctctcgcagtctcgccttcctcgccacgccacgccacgccgcgccgcgccacgccacgccacgccgagaagccgaggagtagcaagccactcgccgccgcgcgcgcatcaccggcgcaccatccgcggcgggccgcgatgcaggttttccatggtgcgcagttcgtgcggctgcggaacttgtgggaggagacgtacatcaccgccgacgaggacgggaggtcggtctaccactacgacccaggccgccgcccctcgcacgaggcgatctgggcggtgcagttggccgtcgccggggagcccccgacgcagtacgtgctcctccgcggcgcctacggccgctacctcggtgccccggacgccgtcgagcgccgctggccgctctcctgctgctgtcccgcccccgtcgtcggccagcgcgacttcgaccagccggtggtcgacgccatcatgtggcatgccgtcaggaggaccggccacgtcgtctgcctgcacgacaagtccggccgctacctgcgcggcaaactgatgagtaccctggtttgcggtggccgccccagcctcaccgtcggcgatggccgcctcagcgacgacgagaaggagttgcggtgggaggtgcgtcccgtcctcccgagtccaggcaggccggagctcccgatcgccactgaggccggcttggctgagctcttcgtcaagatatgcttccccccgcggcggcgggagatccagttcgtggcgcccgacggcgacggcaacatcgtctgggattcgtttcagtaccaagggaggtcggtgcagctcctgagaaacgagctcgagaaccgtgtgggctacgccatcacgatgtgcgtccgcgccggccgccatgggcggctcaccccgctgctcatcaacctgcctcacagccgggagaccctgcacatcgtcgctctcaggcgcaacagcgaagcggatcatcggttgacattcccagatccggatgcatcgtgacgtaggagatataggcatcggaggagggattgattcagtgaatcctttcatgctgaatttctgacaggctcagggaaatcgagcgaagatcagtgtgttggttttagaggcatagagtagaattttcagtcgatgccggaaatgcagttttatgttgctctcagttgtagaatgacaggaaaaaactgaaattgtcagggtgtacaatgggtgtttttacgcagtttacatacttcgaaaacccggtaaaagtgaaacagggttttttaacg

SEQ ID NO: 9517 - DNA, 2055 bp, Oryza sativa
  ref <308>: DATABASE ACCESSION NUMBER: AK106865
  ref <309>: DATABASE ENTRY DATE: 2002-08-28
caaaaaaaaacaatttgtgcggccattaggcgttgagacctcggcgaatggcagccggcgacgtcgtcccacctccaccgcgcccacgaatccattccattccattctccatcgccccccacccatgtcgcctcctcctccaccatattaccaccacctcctcctcctccgctcctcgcccaccaccactggaggaggagctcgggttcttgccgcggcggagctcgcacgcatgaagctactgtgcagcgcgtgcgaggcggcggaggccagcgtcctctgctgcgccgacgaggccgccctgtgcgcgcgctgcgaccgcgacatccacgccgccaaccgcctcgccgggaagcacctccgcctccctctcctctcccccgcctcctcctcctcctcctccgccgccgccctcgcgccgccgccgccgtcgccgcccaagtgcgacatatgccaggagagccacgcgtacttcttctgcctcgaggaccgcgcgctgctgtgccggagctgcgacgtggcggtgcacacggccaacgccttcgtctccgcgcaccgccgtttcctcctcaccggcgtgcaggtcgggcaggagcaggacgagcactcccctgacccgcctgagccgtctcctcctcctccgccgccgccgcctgcatccaagagcgaccacccggcgccgctctacggcgagggcggaggagggttcagctgggacgccgccgactcgccggccgcgggcggcctccccgactggtcggccgtcgtcgaccagttcggctccccgccgccgcgccacacggacaccgcgaccgtgacgaccccgccgccgaccaagaggagcccacgcgcgccggcgttcggcggccagggcggcatgatggattggcccctcggcgagttcttcggcggcttcaccgacttcaccggcggctttggcttcggcttcggcgacagtggcacctccaaggctgacagcgggaagctgggagggagcacggacggctcgccgtactaccggtcgtcatcggaagatgaccggaacgccgacgagctcttcgggcaggtaccagagatccagtggtcggtgccggagctcccctcgccgccgacggcctccggcctccactggcaacgccatccagccgccactcacggcggcggcggcggcggacccgacaccaccgccttcgtccccgacatctgctcccccgacagctgcttcccggccaccacctccaaacgccggaggcaataatgctagctagctaatagctatgtccagaggttgaagacgacgacgacgacgacgaccagccatgtgagtgtgactgcgattgctaatagctcgagacgctgacgtgatcgtgtgtggtaccacctttcatggcgatggcgccaactacaatgttaggtaggagaagctttctactcgtctggtggttggttggttggttgttgacgatgatgatctgttgccatttccggcgacatcgaggcggaaacagatctctctgattttgagtgcctgacatatgggtttcatgtctaatgggttcttatattagcgacccacattagcagtattgtagagaagacttgttgaaaacagccgcaatcagcattggctgacaaatacagttgggggagatcaatggaactacagtgtacagtctatgctctgcagcatctgattctgatcctgaagtctggaaagaggaagaagaagattagaaagaagagaggcctctgctttttcgatggccgaaactgagatgcacctcgctaattggtgggcagtggacaggataggataggggccatgtgatggattgatggtgatgctctactttgttcagaacagaagtctctgaattttggttggatcacagaaacttgtaaaagattcttgcatgtgtacagaagttttatactacagtagttagatagaaacatggatggatccgtgagaaaagaaaaatgctggtaatgttgtattgtactagtaaaagaaaatgttatatgtttttaactcggctgattcattctttttcg

SEQ ID NO: 9518 - DNA, 2168 bp, Oryza sativa
  ref <308>: DATABASE ACCESSION NUMBER: AK106866
  ref <309>: DATABASE ENTRY DATE: 2002-08-28
ctctctctccccttctcttctccctctcgatctcgacatacactacacaccctgttcttgcagtacgccaattaaaccaccacctcgttcctttccctcatctgcaaagatcaagctccaccggagttgacgtacgaggatgatgatgatgatgagttctctcttcacttgcgtcgtcgcctccatttcgcggaggaagaggagatgcgctgcgacgagagcctaattaaggccacgccgccattgttggtgttgactggtgagctcgtcgtcgtcgtcgccgtcgtacctcctccccgttgttcttccctcgcttgcacgccgccgccgccatgagccactacacaatgcatgcgcacatcaactacaccgccctgccgccgacgtcgccgctgcagctcccgcttccgtacctcccgccgcctcctccgccgccgcagccgccattgctgcagctccagccgccgccgccgccgtcgtcgccggtgtcatttgacacggcgttccagagcaggatcagccctagcatcctgctgataatcttgatcttggctgttattttcttcgtctccgggctcctgcatctgctcgtccggttcatcctccgcccggcgccgcgtgacgccggcgacgccgacagcggcgacgcgaacgtgaccgccttccaggggcagctccagcagctgttccacctccacgacgccggcgtggaccagtccttcatcgacacgctgccggtgttcctctacggcgccgtcgtcggcgccggcaggaaggacccgttcgactgcgcggtctgcctctgcgagttcgccgacgacgaccgcctccggctcctccccaagtgcagccacgccttccacgtcgactgcatcgacacgtggctgctgtcgcactccacctgcccgctctgccgccgcagcctcctcgccgacttctccccctacggcggtggctgcagcccgctgctgttcgtgctcgagtccggctcggagggctccatctccgatcgcctcgacgcggcgtcgtcggctcatctcagcctcgtcatggagcaggaggaagaagcagagccggaacagaagcatgcagaggcggcggagaaggcggacgaggtggtcgtctccgtcaagcttggcaagtttcggagtcaggccaccgaagtcgccgccggcggcggctgcggcggcagcagcagcgccaaccccgagcaggacgtgcggcgttgctactccatggggacgtacgagtacgtcatggacgagaggtctctgctccgcgtcgccgtgaagccgccggccaagaagcgccccacgacgcagatgccgggccaccgggtcgccatgtcggagtgcgactgccactccaagcgggagagcttccgcggcctcgacgcgctgcccggcggcaagctcgcgcaggcgcagccgccgaagccgccggccaaggtggggaagaaggagagcttctccttctccaagatatggatgcgcggcgcgccgcggatcaggaaggacggcgcgtcctcccggcgcgcgtcgtcgttccggctctcctccgtgctgcagcgcgcggcgagcgacgtcggggcaacggcggcgccgaagccgctgcgcccggacgtcgtgagccccgtcacggagtcggagtacaacgtgtcggcgtgggacaagagcgagaagagcgcgagcggcagcgtcgcggactgggacctcgagtccgccgccgccacggcggccgtccccggcgcaggcgccggcaacgggctcagctcgagggccgacgaggcgccgtcgttcgcgcggcggacgctgctgtggatccgaggacacctgtgaaatgatccatccatggaagcatcatagctcttcgttcttcttgtgcattcccgccattagattgattcattcattcacgcggagagtgtggagtggaatcgaagaaattcacgagaaatttgtgttgaacgatctgtgaagtgaatactacgcggtaaagaatttaactactattgtttgcagagcattggaaatcttgtgtcattctgtgtagcttgtactttgcatttacttgttttcaactgtacattgctccagcagcaagggttttcttcaggttcagggtaaatttctggtctgaaactgaaacatcacaaaaaatcgaaatgt

SEQ ID NO: 9519 - DNA, 721 bp, Oryza sativa
  ref <308>: DATABASE ACCESSION NUMBER: AK106867
  ref <309>: DATABASE ENTRY DATE: 2002-08-28
ctctctctctctctcaagtctcagcactgcaccgtgcctcctcctcctccacgcccgcgcctcttccccattcccacacccacgcctctccccctcctctcggcagccggcagcctgcgacggcgacgccagcgatacgcacatggtgcacggggcgcggagctgaccgtggatggtgcggcctccccttgccctccagatctggcgagtctccttcctccttcctcctcgtcgagctgccgcatcgaccggcgcgagagaggcgccggcggcaaatccggccgccagagggccgcaggcggcaaatccggtcgcgggagaggcgcgggcgtcggatctgtccgccagacagcagcgggaagtgctcgggcggcgggagtggcgcggacgacggattcaacgtggtgagggtgcgggcttcggcaggcggtggtggtcgcgtgcacgcgcttcggctcgggcgtgggcttcggcgggtggcgacgatggcggcggcggtggtctcgcgggcgggcttcggcgggcagcgacaacagcgaccgcgcggcgaccacgacggcggccctgggctgccttgagcgggagctcgacgacggcaacttggctccctcaccgatggcaacctgttgttgttttgggattgtgactgtgatttacttctgcagctaaatgtgaactgtgattggggatttgggacaatgatttaggatttggggacaat

SEQ ID NO: 9520 - DNA, 1901 bp, Oryza sativa
  ref <308>: DATABASE ACCESSION NUMBER: AK106868
  ref <309>: DATABASE ENTRY DATE: 2002-08-28
atcacaagcagctttggtttgatcaatttacccaaagctgaaaatattcaagatcaatgaacaccaaacatttgtagtacaagtgtaccaggcagaggcagctagcatcgccacgctgacaccgagacgagctccgaccgctgccaccacagcgccagcgccgcctgccgcttctccacatggaacccatggctggccgtgcgcctcagcaggcattccgcctgcgcctccgccgcattgctcacctgcagcgccgcaaaccccgcggacgccaacatggactgcaacggcggaggcagcttgtcgccgccgccgaccgcgaggcgctccacccgtggccgcaggacgaactgctccaccttggacaccacgtccggcgacgcgcccgccgcgtccagagactccagcagcgccgcgcaagactgcaggaggttgagggcgccgcgctcgcacccgtggtcgacgcacaccacaacggcggggcggagctccttcacgacacggaggtgcgcgggcgccggcgagaaggccccggagccggccgtgagatggacggccaccgcttcgtcgggcgcggccgagagtcccaagggcggggacgcgctgctgagggggtcgaacacgagggcggtgaactcgaacgggatgccgagctcggcggcgaagcgcgtgaggctctcgttggtgaggtggagctcgagtgggtggctggaccccggcgacaccaatgcggtcaccttgaggttcggcggcggcccagcagcgcggcgccagtggtgcgcgagctcctgcatgagaggcggccaatgtgcaccgaagccgacgtcgaagtcgaggaggtggaggcggcgcgcggagccgagcgcgtcgaggaaggcctgcgtggatgtgaaggtggtgaactgcacggtcggggaggcgtccgccagggccttgtgcgcggcgagcttgagcgggacgtcgaggggagtagaggagacggggagggcggtgggcgggaggagcgcgtcccggaggagggcggcggcgcggaggagcggagggtgggcatggcccggaggcgacggaagagaggggaggcgatgattgagccgcgccaatatctccctagcggaagtggagtctccggcgtcgaggaggcgtgcggcgtcgaggaggtcgtcgacgagcggctgaggaggatggtcagagggcatgggcatggggagttggagcaggtcggagtcgaaggaggggtggtcgggaaaggtgtcggcgtcggcatagccggtatccatgatccagcggaggaaggaggagtcgggggcgggggcgggggcgagcatgtgcatgtgcatgtcgacgacggcgtcccagtcgcagtcgtcgtcggcggcgatggggggaggagggtcctccggtggtttggaggagcaggagccgagggaggtgctcgggctgctgcggttgtagagcacggaggtgggctccggcgacttgctgctgtccggctccggcagcggcagggtggtggggttgtggggatggcaagaggaggaggacatgagggcaatattgatcataggcagcatgtagagtactcctatcctatgaggctgaggctgaggcggaggcggagatagaaatggaggagaagagttcgctggggtagcagttgatctctctcagttactactacgggagtggattttcgtcccgagcgaacatcttctcattgtttacatgtcacctaaatagttatgaaaaaaaacatatatcacatgttaatacatcttttaaatttttttcataaccatttgggtgacatgcaaacaacgagaggatatcccctcgaaggatgaaaatagtttccctactactacttctatattttaatgtacgacaccgttgactgtttgcct

SEQ ID NO: 9521 - DNA, 1399 bp, Oryza sativa
  ref <308>: DATABASE ACCESSION NUMBER: AK106869
  ref <309>: DATABASE ENTRY DATE: 2002-08-28
gatttgcccgatgcttaatcgatcagagacaatgaagcaacacgcgggctagctagtattagatcgacaaggaggaaaatgaacaagtgcaggtctagcagtagcagtagcaatagcagggccttgtatgctctcctcctcacttctcttatactaacagtaataatattgtacctcccgcctccacctgatcctctttcccaatcccaattcgaattcgaccaactaaagcttgacgatcatccgccgccaccgcagctgcaccgccgcaggacgaagcggtgcgccgagcacctcaggtgggcggcctccctcgcctctcaacacaatgccaccctcctgctcaccgtcgatcgcaaccaggccgccggctgcgccaacttcaccaccatccagaaggcggtggacgcggtgcccgactacgccgccacacgcacgctcatcgccgtggacgccggcatctacagggagaaggtggtggtgtggtccaacaagacggccctcacgctgcacggccgcggcaacctcaacaccaccgtcgcctggaacgccacctccaactccaccggcggcagcaccgtgtacagcgccaccttcaccgtcctcgcccccgccttcgtcgcctacaacatcaccttccagaacacgtcgcccccgcccgagcccggggacgcaggggggcaggcggtggcgctgagggtggccggcgacgaggcggcgttccactggtgcggggtgtacagcgcgcaggacacgctgctggacgagtccgggcggcacctgttccgcggctgctacatcgagggctccatcgacttcatcttcggcaacgcacgatccctctacgtgggttgcaccataagctccgtggccatggcgagcgcgacggggaataaggaagtgacggggagcgtgacggcgcaggggagggcgtcggcggcggagaggacggggttcgcgttcgtgcggtgcagcgtggtggggacggggcaggtgtggctggggagggcgtgggggccgtacgcgacggtggtgttcgcggagacgtacctcggcgacgtggtggcggcggaggggtggaacgactggggcgaccccggcaggcggcagcaggtgtggttcgcggagtacgcgtgctggggccccggatccgccaccgccgccaccggcagggtgtcctacgcgcggcagcttgaccagcgccaggccgcgcccttcatggacgtctcctacatcgacgccaaccagtgggcgctgccaccgtcgacgccggaactctacggatcgagatatactcccagctagctaggatcacacacacacacacacacgagttttaatttaatttgatattgatttgtaagacaaggatgataaaaacacaagactcaattacaat

SEQ ID NO: 9522 - DNA, 1209 bp, Oryza sativa
  ref <308>: DATABASE ACCESSION NUMBER: AK106870
  ref <309>: DATABASE ENTRY DATE: 2002-08-28
gctctcggtagtaagctagagatagagagagagagagagagagatgccggagtactgcgtcaccggcgggacggggttcatcgcgtcgcacctcatccgcgcgctgctcgccgccagccacaccgtccgcgccaccgtcagagacccagaggatgaagccgaggtggggttcctatgggagcttgatggcgcgagcgagcggctgcagctggtgaaggccgacctgatggtggagggtagcttcgacgacgccgtccgcggcgtcgacggcgtgttccacgcggcgtcccccgtcgtggtggtcggcaacagcagcagcaacaacggcaagccgaacgacgacgacgacgaggaggaggtccagcagcggctagtggagccgatcgtgcgcggcgcgtcgaacgtgctccgctcctgcgccagggcgtcgccgcgcccgcgccgcgtggtgttcacctcctcctgctcctgcgtccgctacggcgccggcgcggcggcggcgctgaacgagtcgcactggagcgacgccgcctactgcgcggcgcacggcctctggtacgcctacgccaagacgctggcggagagggaggcgtggcggctggccaaggagcgcggcctcgacatggtcgccgtgaacccgtccttcgtcgtgggccccatcctgtcgcaagcgccgacgagcacggcgctgatcgtgctcgccctcctccgcggcgagctccccaggtacccgaacacgacggtggggttcgtccacgtggacgacgcggtgctggcccacgtggtggccatggaggacgccagggcgtcggggcggctcatctgctcgtgccacgtggcgcactggtcggagatcgtggggtcgctgagggagaggtacccggggtacccgatccccgcggagtgcggcagccacaagggagacgacagggcccacaagatggacaccgccaagatcagggctctcggcttcccgccattcctctccgtgcagcagatgttcgacgactgcatcaagagcttccaggacaagggcctccttcctcctcacgcttgattcatatgatccacacaattaagctgcttgattaattaactaattaatctaatattattaaggatcggaatcacgtagtaccgatcatatatatgttcatctcgaaattaactgcaagtgtgagatcgagaatacactaatacagtgctaat

SEQ ID NO: 9523 - DNA, 1615 bp, Oryza sativa
  ref <308>: DATABASE ACCESSION NUMBER: AK106871
  ref <309>: DATABASE ENTRY DATE: 2002-08-28
aacattccacactcttccttccttccttccttgtcagcgtcgctgcgccgcggcccgcggccgcgccgcgccgctcgtggtggaatccgctccactccccaatggcgcccgcggcggcgaaggcgtcggatctgtaccgtgaggagaccgaccgcgacgacgacgacgacgacgtcggcctcgccgtcatcctccccgacgcctgggagctccccaggcgccgcgtcctgcgcaacgtcttccgccgcctcccgcgcaacccggacttcgacggcgccaccttcctctccaagccatggctcgcgctcgccgtggacgggcacaacgtcgtcgccgagccgcagcggctcatgccggggctgctgcttccggaggagatggcgctcgacccggcctcccgcgccttcctcagcctcgccgacgggcgcttccacgacatcgccttcccccacgcccgcggcgcgcgctgcgtcgggagctcccgcggatggctcgtgatgctccgggagggccccgagggagtcgtcggcgccgcggccaccgcaactgtacatgtcatccacccgctgcttccgcacctcgagttccgcctccccgacgagttctccctcttcgagatccatgccgccgcggacttggaggagcacgtcgtgcggttgccactatcgaaggaggcgcgcctccgtgccggcctccccctggctgagaggctgcagcgcgtgtacaagcccgacgagaagaactacccctacatcaccatggtcgcgctctcgtgcagccccgccggctccgacgacgacgactgcgtcgcgctctgcgtctacctctgcggccgctgcctcgccatcgcgcgccccggggacgcgtcgtgggcgcgcgtcgaggtgggctgggagtacatggagccgacagagtacaaccgcaagttcgtgagcgtggtccacctcaacggcagcttctacgcggcgtgctacgacggcacggtgctgcgcgtcaccatcccgccggcgggcagcagcagcagcagcgcgtcgacccctcctcgggtggagaagttcgcggacaggccttacagatcgaagtggtccatgtggagatcgcggtggtggctcgccgacgacggcgcaggctctctggtgttcatcgggactgagcgctgcctgaatccctcggacgacgaaaggtacctctccgtgttccggtgggacgccgagctgcggttctggcgccggcccaagagcttcggcggccgcgcgctgttcctcagcgccggcacggcgttcttcgccgacgcgaggatcctgccgtggtgcgccggcgactgcatctacttcaccgacgacgagagcgtggtcaccggggagaacgtcaccgtgagatgctacgacatgcgcagccggaagctctacttcgtggaagacgctggggccaaggtggcgctggccccacctgtctgggtcatgccgttccatgaatagtactgtacagagacattcatccaatgatccaagcaggtaaatcattgatgtgtaggactttgattagcatttgttgctaggtgatttcttcatgtgaattctatctgtgagtaaatttcatgcgaattacttcatgc

SEQ ID NO: 9524 - DNA, 844 bp, Oryza sativa
  ref <308>: DATABASE ACCESSION NUMBER: AK106872
  ref <309>: DATABASE ENTRY DATE: 2002-08-28
aattattaccgaccacacacctcgtcggtgtgttcgagaacacgccgtccgcggccggaactcctcctcggagcgctccctgccctgagtccggtaggtggccatgacgaagatgtcattctccagcagcgccctcgtcctcgtgctgccgtccgtcgtgtccggcaccaccggctcgcaggtgagggcgccggcgttggcgcgggcgaagggctcggagccggcggggtcgaggacggcctcgtggaggagggaccaggcgcggacgagctcgtcctggtggtgctgcagcacgtagtcggcgtaggacgcggcggaggagcccccgccggccgggacgagggtgcggctgacggtggtgagcgagaagcggcgcggggaggaggaggtgtgctcggagaagacgccgcgggaggcgaggaggcggaggaggcggtggaggacggagagagaggacacaagaagaagacgagaggggacagacacaaatggaagaagaaaaagaatgaagaagaagcagcagcagagctcttgtttcccccgtttcctgaacaaagcttcgtgcagcaaaactttgctttctccatcagttttttcccttcccgacgttgtgcttgtctaatggcgttgcagggaggtaggcaattgtgtgtcctgtcgcccttctgtctgcgctgtcttttttcatccactcaagcaacagatgcatgcgcttattgcagcatttgtgcaaatctgttttttttttaaaccgtgcatttgtgcaaatctgtgttcttgtgtgttaaagtttgattttttttttgtctgtgtttatgtattcctttgttgggtgtgtgttcag

SEQ ID NO: 9525 - DNA, 1885 bp, Oryza sativa
  ref <308>: DATABASE ACCESSION NUMBER: AK106873
  ref <309>: DATABASE ENTRY DATE: 2002-08-28
aagacgagagcaaaattctcatccgggagggacgcatcggggaggggacaggtcacaggttgaggttgcaatcggggggcgctcgtgcgcggggcagcattttgggttcactgtcgcgtccatccccatgctgttccccccttcaggcgcagcagccgcgtggaaggtcgctcgctggtggccacgggggaatcccctgatgcgaggtcgtcgtcatggagacatccgctgctggtcagttctgttcctcaccaaggcggagcaagctggaccaacccgattaattggctcgtgtagaattaacttgacaatttgactgacatggatgatagccatagtggtgtcccatttaagccaaattattggttaggacagggccaagtaaggttttgggtgttttatgagtgagatctgacctggctgggtttagatcatcctcttttagttcgaacgcccaacaggcaacaacaaaggcgtgatgtagcagcatataggaactactaataagcaaactaacaagttcagatgataacggcgattggctaattttggacccacggtatgtagtcattgcttgagaaatcgaacttactcggccccaaaatcctggacattagtttaagatcttatggtctaagcgtcgtggaatgacatacgatgcttgattgaaaaggaagatatgaatccactcggtcttgctagctaccaatgatttcctagatcccaatatcctgtggcagtgaaattaattggtcatatatacatacatatatatatttctactgtatcatcgtacaacttgcaggggtagttagaactcgtggtaaattattccattgtctcatcatcgtagcttgttgttttgaaagagttagcctagttagattagaacctttctggatataacttctcaccattcatggtcatatttcagaatcaaaccccatgaaggcataggagtagtgcgccaacttctgtatgattcctgcagagacaaatgaattgaattgttccaatagaatacactctgtctgtcaaagaaaaatactcatgaataatttagtaggcactagaagttacattttcctggcagttcaatattccagttgattgctgcagtctgtgcctttacgtgaacttgcgataagtcactaagtctgtgcctttatagggatgtcttactgagggaacctgtattcaagatgcaagaagctaggagtggagaactagatgaaacttgaccttttcctacctaatccattacgctataatcaaactcagattggattacgcgttttccagctgcaaagttgataatccaggttgttattcagtggatttagctgattggaaatgtcggacctgtttcaattatatttgttgaatttttctaactgatcatgaactgaatccgtttggtccgatattaacctgaagctttaggaaattgctgtacttagctgctcgatattgtattttaatcttattactcttgttggtaagtacataagcactagatagtagttgctgctatgttatccatatgagcatatacattgactggcagaaccttctagagttgtagggattaaacccctgacaattgagagcatgaacgtaatatggtttgaaattcaaaagataggactgaacatatttttatataacatggttcaggaaattagttacatgaagacacctcgttaaagtacagtttttcctttcaaatgaccgctgaaaataaaacagtaaaatacgtatgttaaaagacacgaatattagggaaggacataatgtcaaataattagaagaggtgaagcttcgaacccaggtcgtctagcccaccatcttgtgacgctagccggaagaccccggggtgtttttc

SEQ ID NO: 9526 - DNA, 1846 bp, Oryza sativa
  ref <308>: DATABASE ACCESSION NUMBER: AK106874
  ref <309>: DATABASE ENTRY DATE: 2002-08-28
attttccgcgagcccattcccattcccattcccactctccctccctccgccgccaaattcgccggagaaacaaaaaaaatggaccgcccgcggcagcagcacgagccggagcatctcggcggcggcggcatcgacgtcgaggtcgagctcgacccggaggacctccagccgtcggtgcccctcaagaaggtccccgcgggggacctcttcgaggcggcccgcgcgggggactgcgcccgcctcgccctcctcctcggcggcggcgccaacgtcaacgagcgcgaccgctgggactccgtcgcgctctactacgcctgcctcgccggccacgccgacgccgcccggatgctgctcgaggccggggccgtctgcgccgagcgcaccttcgacggcgaccgctgccactacgccgcgctcaacctccgcctccggaggctgctcaaggcgttcgaggccaggcccccgccgctgccgccgctccccgccgcgctcagggccacgttcctcgcctgccccgccaaccgcgccgccttcctcgagatgctccagtggaccgccggctccgaagccgccgccctcgccgctgctgctggatttgggccaacggacaatccatcaagtactagcctattccctccggacattacattctacgtggatggaaaaccaattgaagctcatcgggtcattctttgtgcccggtcatccttctttcggaggaaattcaatacagactggaaagacaggaaggaagtgagattttctagccagaagttatcttttggtgccttgtacagccttgtccatttcttctattctgatagactcgaagtggatgtggatgatatggaaaatttggcgcgggcgtgcaaagtttgtaagtgtgagggtttgcaaaagatattgattaaagaagctactctccagagatatgcagaacacaagtcaccgagagatttggacagttcacagaagaggttcattttacatgggcaatccttgccagaggaggatcgccttccatcagccctgcggcatatttttgaggaatgtctagctaactcaagagaacaagaatgttataacgatgaatcaaatgaaatgagcagagactctggtgtagatgctgctgctgatctttatataaaagtatgtgataaggttttccattgccatcaggtgattttagcctcaagatcagagtactttaaagctaggctatctagaaacatggattttcttgaagtcaagagtgggcttcaatcaactcagagccttccttttcttgaagagcatgacatgagtacagaagcatttgaaaaggtgcttgaatacatgtatactgataacctagagcatatggatcctaatcaggctgaagaactatttgatattgcttcgagatacctgctattcccccttaaacgagttgtggcagatatacttttgccttatctggagcatgtttcacctgcagaactatgccactggctaatgttatcagacatttatgatgttgtgaaaataagggagtattgcttggatatcatcgcttgcaattttgagatgtttgcggacacaagagagttcagggcattgcttttgacacttccaccaccatctggagatgactcactgcgaacaactcgtcccagtgaacctggtactgcaggcaacactgaccaaggcaaccttcttgatgatttgcgtgagaaatggttagaagcagaggctgctgagctagacgagagagatgagagtgcaaagctgtttgacaaccgattggaaatgcttatgcttgtagcagaacaagaagccaatgatggcaatgtttgactccactgag

SEQ ID NO: 9527 - DNA, 891 bp, Oryza sativa
  ref <308>: DATABASE ACCESSION NUMBER: AK106875
  ref <309>: DATABASE ENTRY DATE: 2002-08-28
aaaaaggaaaataaaggaggaaagagtggcggccatggcggcggcggcggcggcggcggtggagagcgtggtggtggtgcacaacgtggcgaagcggcacaacgtggggacgctggcgcggagcgcgacggcgttcggggtggcggaggtggtggtcgtcggccgccgcgacgtcagcgccttcggcagccacggcgccacctcccacctccgcttccgccacttcgcctccctccccctcgcccgcgcctacctcaaggacgagagggggtgtgacatttgcggcgtggagatcacccacaacgcgctgccggtgacggcccatccgttccgccggagcaccgccttcctcttcggcaatgagggtacaggactctcgcagaaggagtgcgagatctgcgacttttttgtctacatccctcagtatggtggtggaaccgcatcattgaatgttacagttgcagcgtcgattgttcttcatcactttggagtctgggctggctttccagaacgagggcgagaaggtaataaattcgttgtagctgataaaccaaagggccaatctaggggactctactgtacagactcaattgaagaagtgattgaagaacggaagatgcgaagagaaaatgcctgtgacatatttgaggaaaatggaagtagcgagcatcaggaatcaaatgttttaggcacgatgctgtcagactagagtatcccatctcttctttgcttaccaatccagtctctgcattggttgagggatgaaactaatttgcaataccacatacagcacaatatccagcactggtttctcttttccagggtggcacaaatatatgtagagtaaatttcagagaactccatttttatggtcaaagttgcagtttcgcg

SEQ ID NO: 9528 - DNA, 2259 bp, Oryza sativa
  ref <308>: DATABASE ACCESSION NUMBER: AK106876
  ref <309>: DATABASE ENTRY DATE: 2002-08-28
agtccttgagttcaaattcagtcaccaactgttcgacggattgctagtttgccaccatcaccgacgctcccatgcccgccgccgccggagacgtcaactcgacgtggacgctggccatccgcgccgccgcggaccaaggccgcccacgccgcgccgtcgcgctctacctctcgtccctccgctcgggccgccgcccctgccccttcgcgctcgccgccgttctcaagtccgtctcccgcctcctcctccccgccgcgcacccgctcctcgccgcggccgcggcctcgatccacgcgcacctcctacgcctcggcctcctcgcccacccctacccgcgcgcggcgctcgcccacctctacgcgcgcctccccgatccctcccgcgcgcacagcctgctcgacgaaacgccgccccggccgccgcgggggcgggcgggggcgcactccttcctcgtctcacgaaactcgctcctcgcctccctgctccgttccggggacctcgccgcggcgcgcgcgctgttcgaccggatgcccgtgcgggacgtcgtgtcctggaactccatggtcgccggcctcgccaaggccggccacctagacgcggccatcgagctcttcgacaaaatgcccgagaggaacgccgcctcctggaacgcggtcatgtgcggctacatcgcccagggcgacctggcccaggcgagggagctgttcgagcaaatgcccgtgaggagcaacgtctcgtggatcacgatgatatccggctacgccaactccggcgatgttcacgctgccggcgaattattcgagcggatggagaacaagaaagatctttacgcgtggaacgcgatgatcgcctgctacgcaaagaatggctgtgcaagggaggctcttgctgttttcaatcgtatgttgaagcctcatgtgtgggtgatgcccaatgagaagaccttctcgtcagtcatctcggcttgctcgcagcttggagacttgaggtttggcttgtgggctgagagtttcatggggtctgtggggattgagctggatgatcatttgcgcaccgctctggtggatttgcataccaagagtgggcggatcgacagagcttttgatctgttcagaggtttggggatgcgagatgtggtgtcttacagtgcgattatcgtgggctgtgggatgaatggcaagttcaatgaagctgttagtttgttcaaggagatgtccgatgcaaagattagtcccaatgcagtgacctttgtggggttgttgtctgcttatagtaatgccgggctaatggaagaagcccgtgcttgctttgcttccatgacagaaaaatataagattagcccttcaatggaacactacaccatcatggtagatcttcttggacgtagtggaaaattggatgaagcatatcaactgatcatgcagatgccaatgaagccagatgctagcatttggggtgctctacttcttgcttgcaggttgcacaacaatgttgagcttggggaaattgttgcttccaagtgctttgaacttgagccaggagagagtggatattatattcttttgggtaacatatattcagaagcaaacaaatgggagaaagttaagaggctaagaaagataatggcagaaagaggcttaaacaaaatgcctgggagtagttgggttcaggcttcttaagtccattctcttgatttcactgatttcgattaattcattcagttcataaatcaacattcaaatattccttgcgtcaaaaaaacattcaaatattcaaagcttgactagtaaaatttgacaagagaatgctggagtctgctgtctcttgtttgggcagcttaacaaatttatacaaggttcccccgaaactttgagcattgatcaggaattccgtaattggtttgttatcatcaccctttgttcaacacgtaaatctttctgttagctatgtaatgtgtgcgccttccataattgatgctaattttccatgcacatagaaacgttcttttgaaatgctgatgaatatctttaatagttgcttttgggcaagtaggaaaatagctttgttaagttgataaattcatgagcttcaaacgcatataacactgattgttactgcatattgtaattaggatggaattttttcatttcaaatccacactaaatgtaatcacctgttttctgatggcttttctccttctcacaagaattctattacaaaacatgtgttcatggaatatgatagtgaaataaattatgc

SEQ ID NO: 9529 - DNA, 1740 bp, Oryza sativa
  ref <308>: DATABASE ACCESSION NUMBER: AK106877
  ref <309>: DATABASE ENTRY DATE: 2002-08-28
ttgcaagatgcagatggtggtaaagctgtaaataatagtggtggtatacgtggtacggtgagcatggaggggcaaggtcttgtgagccggagctggcaggagtcgaagctgctgtggcgcgtcgccttcccggccgtgctcgtcgagttgctccagttctccatcggcttcgtcacggccagcttcgtcggccacctcggcgtggtcgagctcgccgcggtcaccgccgtcgagagcatcctggagggcttcgcctacggcgtcctgtttggcatggggtgcgcgctggacacgctgtgcgggcaggcggtgggcgccgggcggctggacgtgctcggcctctacgtgcagcagtcgtggatcgtgtgcggcgccaccgcggtggcgctcacgccgacgtacgccttcgccgagccgatcctgcggtcgctcctccggcagccggccgacgtcgccgccgtggcggggccgtacgcgctgtggtcgctgccgcggctgttcgcgcacgccgccaacttcccgctccagaagttcttccagacgcagagcagggtctgggcgctcgccgccatctccgccgcggtgctcgccgtgcacgccgcgctcacctacgccgccgtggtcaggctccggtacggcctgcgcggtgcggccgtcgccggcaacctgtcctactggctcatcgacgccgcgcagttcgtctaccttgtctccggccgcttcccggacgcgtggaaggggttcaccatgacggcgttcagcaacctcgccgcgttcgtcaagctgtcacttgtgtcggccatcatgatctgcttggagttttggtactacgctgcactactcattcttgtgggtctccttaagaatgccagactccagcttgatatcatgtcaatttgcatcaattaccagttctggaccatgatggttgcgatgggcttcagcgaagcaatcagcgtcagagtatcaaatgagctcggtgcgagaagaccaaaggaggcaaagttctcagtggcagtggcatcattaacatcggccatgattggtgccattttcatgtcaatcttcttcatttggagaacaagcttgccaagcctcttcagcgacgacaaggaggtggtagacggagctgcaagattggggtatctacttgctgtcaccgtcttttttggcaatatcgggcctgtgctttcaggtgtggcagtaggagcaggttggcaaattctggtggcatttgtgaacatcggttgctactacttggtagggatcccatttggggttctctttggcttcaagctaaagcttggtgcattggggatatggatgggcatgttgacaggaacattactccagatggccatactatttttcattatcatgagaacaaagtgggaggcacaggcaatattggcggaaaaaaggatcagtgagttaggagaaacaacggccaatgattgagaacacataattgtacagatgaccactgaactcccaaatatatggaaattggcaaacagacgagctggaaaaaaatatatagaatttacatgtctcaagatcgagcccatgactttatatattttataaaggttttaggacattgtatttcctatttgtttgcatggatcgataatcagcatagcatagaattgacttttgttcatgtttaatttttaaaggaactagttttaaacccacaatctcacaattgaggatctttatttgtacctataaaggccc

SEQ ID NO: 9530 - DNA, 1895 bp, Oryza sativa
  ref <308>: DATABASE ACCESSION NUMBER: AK106878
  ref <309>: DATABASE ENTRY DATE: 2002-08-28
acatcgcgaccgccactagcccgccaataatagcagcgcgcccaaaggctaaaaaaaacccacgacgcgctggtcagtagccaccacacagcggcacaggcgctgcggcagcggcagctgagcgagtgagcgccgaggctccccggccatgtccaagcccgatcgccgctccggcgccgccacgtccccgtcgctccgcttcctcggcctcctcaagcagcccgacgacggcagcggcgaccacgagctggagctcgacgagcgcgacgtcgtctggtcgtcgtcgtcgtcgtcgaacacctcgccctcctcgtgggcctcctcaaccaattcctcgccgtccctcaccccgtccgcgtccgcgggcgtgggcgtccgccggccgctgtcgtcgtcccacgccttccccgccgccggcagcgtcggcctgtccgccctcctcgccgacgatcacgcccccacggcgtccatcccggccaaggcacgcccggagaggcagcagcccccgcagccgtaccaccagtcggcgccggtcgccgtgccggcctggcccaaggccacggacagcgacaggcgtcgccgtggtgtgcagcacgaggccctcaacgacgaggaggacgatgacgacgagctcgtggtgccgccgcacgagatggccgcgcgccgcgccgcggcggcggcgtcggtgatggagggcgccgggcggacgctgaaagggcgcgacctccggcgcgtgcgcaacgcggtgtggcgcaccaccggcttcctcgacctgtgaaaaaggatatgaacctttggaggtttctctcgctgccgccacacatcagcaacctgcttcgtgttgtactggattactgatgatccgtatgaaaaaaggtgaaggcttcggtggcaagaaaggggaaaacgacgagtccacacgacgaccagccgctcgagtccgccatggcttcgccttcaccaccgctaagctccgacgacgatgcaaggtgagcacatctagctgtcctactcccaacttagtacccctccctagatgcctaactacagtaccatatccccctccccctccactaaattcctcttccatggctgcatcgttgtctcgttgagtcactaactcacgttcggcggtccacaataagggacgccaatgcggtgttggaccagccatcgcatgctagacaggtacctagaggatgagttggtttcaattaatacagaaaactttaagattcttgatcggtggaaagtggctaggacaagctttcctacattgaggaaggtagcacgagatatatttgctattcctgttagcactgttgcatctgaatatgcatttagcacaagtggaagggttcttagtgagcatcgtagccggcttactccagaactcttggaggccttaatgtgctcacaagattggctgcgaaacaagtatcgaggtacatatgctgttttattcatacatcatgcttagcatagattttacaatgcaatggatgcaaaataattcttataattgttatcttgtagctgataatgaagaagcagcaagcttttggagttgccttcaagatatccaagatcagattgagggacttgctcttgtttgaagacatgaatgtatggacatgcactgttcttgcaatgattttggatgtttgtaacccctgttatgtgtcatgataaacttgtaaaaccatggcaatgcttttggatatttggcacaaaagacctactccgaactatggttttgtgtatgcctaggacaacatgtgttgctactgcaatgtggtgataactaatgagtgatgactgatgaatgatgaatgatcatgtattattgtgttgttgcttaatctgggaatatgatggatattgtattcttgggc

SEQ ID NO: 9531 - DNA, 1724 bp, Oryza sativa
  ref <308>: DATABASE ACCESSION NUMBER: AK106879
  ref <309>: DATABASE ENTRY DATE: 2002-08-28
aaagcaaccaagaacttctccttcccctgcttcccccaccggccatggccatgtccatggcgatgtcgagagctctcgccgcgcggcatcgaagccatttgggccaccgaattgaggtgaagagccaccatgcgtccccgccgcggcttcctcttcttcctcggagtcccgggctcacgctcgcgtcgcgcccgcggatgctaccggcgaggcccaggatgtcgtcgagtgagtcggacctgtcgccgacgccgccgtcggagcgcaccatgacggcctgggacctagccagcctctgggtcggccttgtggtcggcgtgccgtcctactacctcgccggcagcctcgtcgacctcggcatgtcggcgctgcagggcgtcgcgaccgtcgcgttcgccaacctggtggtgctcgtctcgctcgtgctcacggccgcgccggcggtcacgcacgggctgccgttcccggtgctcgcgcgagcggcgttcggggtgcgcggcgcgcacttgccggcggtcatccgcgcgctcgtcggctgcgggtggttcggcatcgagtcctggatcggtggccgcgccgtgttcctcctcctgccgtccaggctcaagtcgtaccagccgctgctcgcgccggtgccaggcctcggtgcagcgccgctggagttcgcgtgcttcctcgcgttctgggccgcgcagctcggcgtcatcatgcacgggatggagggcatccgcaagctcgagaagtactcggcgccggtgctcatcgtgctcacctccgcgctgctggcctgggcctacgtgtccgccggcggcttcgggcgcatcctctcgctgccgccgaggctgacgcgcgccgagttctggaaggtgctcttcccgtcgctcaccgcgaacatcagcttctgggcgacggtggccatcaacataccggacttcgcgcggtacgcgcggagccaggcggaccaggtgctcggccaggccgggctgccggtgttcatgggcatgttcaccttcgccggcctcgccgtgacgtccgccaccgaggccatcttcggccacgtcatctccgaccccatcgagctcctcggccgcatcggcgggccggcgacgacggtgctcgccatcgtcggcatcagcctcgcgaccatcacgaccaacattgccgccaacgtggtggcgccggcgaacgcgctcgtcagcatgagcccgcgcaagttcacgttcgccaagggggcgctggtcaccgcgttgctcggcatcgccttccagccatggcggctgctcagccccagcgagagcttcgtctacacatggctgctcggctactcggctctcatgggcccgatcggagggatcatcctcgccgaccactacatcgtccggcgaaccgcgctggacgtcgacgcgctctactcggaggacagccacgggccttactatttccagggcggtttcaacgtcgccgccatggcggcgatggcggccggagttgcgccgatcgtgccgggattcctgcacaatgttggagttctaccgagcgtctccaaggcatttgagacagcctacaacaacgcttggttcgtcagttttttcgtcgccggcgccgtctactgcctgctctgtcgccggaataggaatgaactgaaacaccagcacgattgattgtaatttgcaaacacaaaggagtaaaaaatgttgcaaatgatagttgaaagcaacatcagc

SEQ ID NO: 9532 - DNA, 1177 bp, Oryza sativa
  ref <308>: DATABASE ACCESSION NUMBER: AK106880
  ref <309>: DATABASE ENTRY DATE: 2002-08-28
attgtcaatcgctacgagcatctagggttagggttaatccaatccaagccaatccatggcggggggagtgcatagtagcgtaccttgatgacctcggaggggcggaagccgccgagccagaggaagcagcgctcggctgggctcatccagacgccggagatgaggtggaagacgtcgcccctgatggcgccgtccttgatggcggcgacctcgtcgtggtgcgccaggcagctctccacgtacacctgcagctccccctccggcagctgctgctgcagcgccgcccgcagctcgtacatcagccggtggtgctcctcctgccacctcccgtactccacgtcgaacatcgccgcctccgagctcagccccccgccgccgccgccgccgacgccatcgatcccgcccagcaggacccccttcccgctgcctccctcgccgatcagcccgccgctgccggggaagaacaccccctgcaccatgtatagatccgtacacattttcatccataatacataatccgaattggttgtgtttgatttgatttgggtgcagtttgaattttgctcgaatttgaaattatgaaattcgcctacctgggctctcgcggtgtgcagttcctgttcgagctgagcaagcctgatcctgctggactccagctgctggatgctcagcagcgaaaggttggtgctgcaggtggtggtgatcctgtctcctgctccctgtcgccaactcctccatggctgctgctgcttgctgctgatggtggtggtgatgatcaggtacatgaacaaggcctggtccagctcccccagatgatcataagctcctgcagatgcctccttgctgctcctggtggtgcaacacaagaagcaaaattaggagcagcacaagaagcaaaattgttggtgatgaggtatagctatatgtatgtgtgagatagatgcaggtagtatagtagcatgcatgcacaaggttgaggaagtagtgaaggcatcacacatcatcatgaaatcatgcttctataagccaattatgtatgatgctatattaattatttgtctggtccaacctctgcaagactgcaagagtaggagcagaagaataatatgaatctactctacctttgtagcatttattttggcacagcccagaaaataagcatggccatgtactctcc

SEQ ID NO: 9533 - DNA, 1758 bp, Oryza sativa
  ref <308>: DATABASE ACCESSION NUMBER: AK106881
  ref <309>: DATABASE ENTRY DATE: 2002-08-28
tgctgaaccaacgaagatggcacttgatccgatggctgcaagatgttgatgacgtggcttcacgtggaggctgctttagagaagttaatgcttgtagtggattacaactatatagtaagaagggattcggagacatggaacaccgggttcccagtgaggcagagcaccgtcaaccatagagcgggatgagaggaggggaaggcggggagcaacgccccaccaggctaccggggagcaccagcggcgctgtggcgatggtggtggggacctcctccttggtgaagcggaaaaggcggagcccagcagaggagcggtagttcgggaacccatccagatggcatgtcgatcgtgaagaggtcacggaggtcaggaggaagctagaggccacgcggaagagctcggggtcagagaggcctgggaggacagagaccctagcggtggcgaggtgagcgaggacagtggacggtaagggagcgactgtggggtaggaggagggagacgctgtggcgggtgacacgcgcagggtggtgatagcagagccatgggtggtgaggcgatggaggccggtggcatgggagggtgagtgcaggaggccatgcggcactggcaggcggtggtcgacgtcgaccatatggaagggagaggggaagagagaggagaggaggaagagaagtgttattcactaacatgtgggtcccactctgccacgttagctaaaagcggatcaatcaggatcctaggcagtattatgttcagttttagcactgaaagtttacgattttaggtttatagcaccgaaagttacctcagttacattttttagcacttcgtcacagtcaccctctccatttgtttcttcctcctccgaactccttgctattcttcagttcaatatgcacactgtacagaaggatgattctctgtttctcactcttccaagttccaaggtatgtggaaaatctaattgttgtattatgttgttttctaatctattacatcgcctctctcataaggtatatataggagtacataggagttagaaacttggagtacagtacaagtaagagcagatttatctctagattatctctaggattctatctctaggactctattgtatctctaagattctatctctagaattgtatcatatccctatatttgtatttgactcttatctttaactaacatatctgtgtttctaacaatgtaggcgtccgcccacgctgaaatcggccaggccgatgctgttcagtgctcactagtagaggcaagcggctgaccacgaacgccagggacgatgcgaatgcaacctgcatcgtctcaactgctcaccaggaacaagaacttaattaccggtggccatggtgacgtgttatcatgagcatggcgagcccagacacgagcatcgccatggcagcctatggcgatcgagctccgctgctcgaaagcgccggcctgggcattctcgagggcggcggccgcaggcgagtgtcggcctcgagggtgttggcatgggcaagattgagggctgctggggcggatgggctctaggacggcggccgaagtctaggatgagcgcaagatgggagaacggaaaggctaaagaatagaaggacattatcggtattttgcatgttttctttgacaaaaaaaataaaataagtatgaaacttgattgaattcctgacagagtgctaaaaattaaaacgaatgtaaatttcaatgctattaaagtgaacccaaaacttttaatat

SEQ ID NO: 9534 - DNA, 1795 bp, Oryza sativa
  ref <308>: DATABASE ACCESSION NUMBER: AK106882
  ref <309>: DATABASE ENTRY DATE: 2002-08-28
ctcgaagccgttctaccacctgctggtgctccaaagttgaaagtcgaaagcagcgagagctcttggcgcccatcgattcgccaagaaatccccaatctctccgcaacccgttcgacggaatgcagcagggagccgcggggcaggcgccgcggcgcgacgacggggaggcggcggggccttccggtggtggcgggggcggtggtgaggaccgcctcagcgcgctcccggacgcggtgctcggcaggatcgtgtcgcacctgaaggcgtggcaggcggtgcgcacgagcgtgctctccaagcggtggcgcgacgtgtgggcgtccgcgccgcgcgtcgacatccgccacccctgcgcctgcaacgagcgcgccgaccaggagaggttccacggcttcgtcgacaccctgctcctcaggcgccgcccgttcgctcccatcaaggcgctccggctgtgctggagccacgacggcgacgccaacaactggatcgttcatgccgtcaggcgcggggccgaagaaatcgaactctccacgaggcatcaccaaggttctctggaaccggagccggagttcacgagcttcatttctcccaagatcaagatcttgaagctgatgcgtgtcggcatggacatcaggtctatcacgcaaatctgctctaggtgcacttctttggaagaattagagctcgaggatgttcgcctacttgaagggcagattcaatcggcctcgctgaagcgcttgtctatcatcaaatgctatatcgatgatggctttttggttgatgctccgaaccttgtctcgctctgcttcatcagacctctcggcattgagagaaaggggggatccaattcctcgtctgatagactttggtggccagtgtggctgaatgacgacgatggatatgatcatgatgatgatttctttgcaaatgctagtgctgtacaatctgacgataagagaggcagtaaatctgatcaagatgatcttgaaggttgcaatgatgatgattgtactgtggcctatgatgagattgcagatgagtactccagtaatggtggtcctggtgatgaacatggaggatattctgagagcgatgattctacaatttgtggtccctatggtttatttaatgttcttgtaaagacatctctgatcatgatagcccgggaaggagagctgcttctgaggagggaattggaaaatttccccatgttcattaacctgaatactctgtcccttggtgaatggtgtatggttcctgacttcagtgctttgtcaaccatacttgagaaatcacctaatgtagaaaggctttatattcaccttgacatggtccacagaggaagaggggacatcgatccaagtggaggatcatttgcttgcaacaacctgaagagggttaagatcacatgttgtgaagatgatgtaatggtccataagctggcggaattcctcgaagctaacggcctacagcgtcagaggatttttgttcgtcgcacatccagaactcgtagagactccagggcgaaacagaaagagcaagaggatcatttgaggctcgcaaagaagtggtgaacggtgtgaaatagtagaagcctggagtgagggaaaggtgcctaaaatgccgaaagccggtgcgggcgttgaggaatccagtgctgagtttacattgcagttaacactaggattgtctactggatgtgtatatgcatcagttttagtacaggtacctgggtatgtgcaagactttgcattcgttggtgttgcatgaaaatagatggctgatcagaatgttt

SEQ ID NO: 9535 - DNA, 1760 bp, Oryza sativa
  ref <308>: DATABASE ACCESSION NUMBER: AK106883
  ref <309>: DATABASE ENTRY DATE: 2002-08-28
ataccatacccctgtaaggctgtaaggtgtaagtgtgttcagcgagatgcgagcttcttcttgacctcgacgtagatccatggccggcaccggaggcagccctctgctccgctctccctctccggtgatgaacaccatgccgacgccgccctccgccgcggtgttcgacgtcgaggccgcgtccggcgctcgccgccttggcatcaagcccgccgccgacgccggcgccgccttcgtgctcgagtccaaagggaagtggtggcacgccgggttccacctgacgacggcgatcgtggggccgacggtgctgacgctcccgtacgcgctgcgggggatggggtgggcgctcggcctggtggcgctcaccgccgtcgccgccgtcaccttctacgcctactacctcatgtccagggtcctcgaccactgcgaggcccacggccgccgccacatccgcttccgcgagctcgccgccgacgtcctcggatctggatgggtgttctacttggtggtcaccgtgcaaactgccatcaacgccggtattaccatcgggagcatccttcttgcggctgactgcttacaaataatgtactcggaccttgcaccaaatggacccctgaaactgtaccatttcatcatcgtcgtcgctgtggttctgtccttgctctcccagctgccgtcgttccactccctgcgttacatcaacctcggctcgctcctcctcagcttcggctacaccatccttgtctcagctgcctgcatccgagcaggtgctttgagcgatgtcccggagaaggattactccctgagctcatccaattcggagaagaccttcaatgcgttcctctccatttccatcctcgcctccgtcttcggcaatggcattctgcctgaaatccaggcgacgctggcgccgccggcggccgggaagatgatgaaggcgctggtgctgtgctacacggtggtgttgttcaccttctacttgccggcgatcaccggctactgggcgttcggcagccaggtgcagtccaacgtcctgcagagcctcatgccggacaagggcccttccctggcgccgacgtggctgctcggcctcgccgtcgtgctcgtcctcctccagctgctcgccatcgcgctcgtctactcccaggtggcgtacgagatcatggagaagagctcggccgacgcggcgcgcggccggttctcgcggcggaacgtggcgccccgggtggcgctccggacggcgtacgtcgcggcgtgcgcgttcgtggccgcgatgctgcccttcttcggcgacatcgtcggcgtcgtcggcgccgtcggcttcatcccgctcgacttcgtgctccccgtcgtcatgtacaacatggcgctcgcaccgccgaggcggtcgccggtgtacctcgccaacgtcgccatcatggtcgtcttcaccggcgtcggcctcatcggcgccgtcgcctccgtacggaagctcgtgctcgacgccggccagttcaagctcttcagcggcaacgtcgtggactgaaatggacctaacgaatagcgatagtgcttggtttttggcgcctttttgactattgacatttgtattcattaggtttcacaaaaaaaaaacattgtaaaagagaaagaggaaaaatcatcgattcatgaagaaaaagaaaaggccaaaaaacgtaaagacgcgtgtgctgaagaaagttcactaaggtgttgtgttgtaaatttcatgaacactggtgaaaattccagattcgaac

SEQ ID NO: 9536 - DNA, 1577 bp, Oryza sativa
  ref <308>: DATABASE ACCESSION NUMBER: AK106884
  ref <309>: DATABASE ENTRY DATE: 2002-08-28
accaccgcctcacatttccaacgccgcgccgccctctttcctctccgacgacaccacgccgtgttcgcgagttcaggaagcttccaccgccatggcggcgaccagtgctcctccagtggaggtgctcatcaacgacgcttaccgccagatcctgctccgcctcccgccgaccgccccaagctgctgtatcgcttcgccgccgtctgcaggacatggcgcagcctcctcaccgacccggccttcctccgccgctaccgcgagttccacgggctaccgcacctgatcggctacgtccacgacggcgctgatggacgcgatctggtcgttgcaaggttcgtgaccaccgccgacaccaccttccgcccgcgcgtgcccgagaagggcgtcgacctccacgtcctcgacagccgccacggccgcgtgatcttcaggaggattggcaagggatggctcgatgagtcgtcacttatcatttgggaccccgtcgccgaccaccaccaggaggtgcccctgccggaggcgttcgcgcaggaggaattcaacctcaccgccaccgtcctctgcgacgccctgggatgcgaccacctcgactgccacggcggcccgttccgcgtggtgttcgtcggcgtccgcgacgaggagggtgcgtctgccacttccgccttcaactacacctcctcctccggctcctggaccgcttcgcccgccgccgcggccgccgtcgccgacgaggatgactggggatttcgcatgcccgcacctagcatcttggtgggggggaccacgctctacttcaggagccctgggaggatactccggtactggttcggcgacgagatggagcatctgtcatacgtcgacatcccgccgttcatcactcaggagacacgcggaacggtgctcatgccggcggcggacgggaggctgagcttcgcggctatgtacggcgacatgacgatcagcttctgggaaaccgaggtcagcgctgacggtgctgttgattgggtccacacccagaacgcgctcgtgagcatccccctacctggagtcctcatcggcgccgccgcgagcttgcttttcgtccgcaccgaggacggtgggatcgtcagcgtccaagtggggaacggacgattccagatgctaccccagccagccccccagcggcagcagatatctgctctcatccccttcatgagcttctgtaccccatgaggtttacatatctctgtcgctaatactacaaaggtggaggctgaagtacaaggaggagacatggctgatttggatgattttcagaagaaatctttactgcggacgacagattatgtgcctgatgacttgggatagtcgtggtttagactttagatgagtagttttcgtcttgcttttgtttctcagtagaaaaaaagggggtgcttagttcctttgtgttgttctgaaccctgtcatggaaggctggttgttcccagcgcctctctattttggttctgcattctgctttctttttgttattaagtcgttgtgaactctgaatgttgtctaggctgtctcaataaggagagaattccttatatgcc

SEQ ID NO: 9537 - DNA, 2774 bp, Oryza sativa
  ref <308>: DATABASE ACCESSION NUMBER: AK106885
  ref <309>: DATABASE ENTRY DATE: 2002-08-28
gcatctccccttttgcatgcctcaccggcctctccacctccccctcctcctccgcctcccaatgctctagctgcttgctcccgattgatttgatttccccccttctccgagtctacgcgatctgcggattggccgtctccccactcttgattcagtccagggagttttgatctgaccggattttgcggtggggttttcttttttgggttgggttgatcttttgggtggtttgatctgtggtggcgatgatgtgtgcgaaggtggtggcggcggcggcggcggaggagagggagatggagttgctgctcagcgagatccctcaggtcaccgcgccgcatgggcagcgcggtggccgtggcggcggcggcggtggtggtggtggtgctgcccagtgctacggcttgcatggacctacgcgttaccatgcgcacgcgggggcgcccgcgcgctacggcggggatccgtgcttccccctggtcttgaaccgtcgcgacgatggtggtggccagcagggcggcgctcgcggcgccatccacgtgccgctatcggggggcttcgcgtcgtcgccggcgtcgagcacgtccgccggtagcgcgccgtcgccggggtcggaccggttcgtcggccgctcgccgtcgccgatggtgcaggcgacgaccgacgaggacacggagaggctggcgagccagctcgacggcttgcttgtcggggacgcgcccgccgcggacgcgctcgccgcagcgctcatgccgccgcagggctcgccggcgtccgccgccaagaacgtgtacctgccagatgtctccgcggtgcacggtgcgtataacaatggctacaactttggggagccgggttactcgcttcaccatgagcccggcgtattagctgatcaggccatggcgtccggttatgtcgccccatctcagtgctttccagtggacgtcggcttggatggctacggcggcttccctccaagcttgggtaccagtgttggcagcttcatgtacactaggactaggaacagctccggcattggttgggaacaagggctagtgcaccctgatcatgctcgaccggtcttgcttcctggacagtctggtgcagaacacaactgggggtacgctggtacgggtcagatttccctggacccccgtggcagaagtttgccaaaatcgccctacgaatacagtgttgcagcagcgagagacattgggtacatgaaaggtggtttcaatcaaatggagccattttgtgatgggaggaagaatgtgccttttctgaaccgtgcaaaggagaggagatttcagcagcatgtcaacaataggtcagttgagctggggagtcctggtatgctgatgtatgagaacatagttgagctggagagtcctaggatgctgaggtatgagaacatggttggagccaagggctatatctacttcatggccaaggaccagaatgggtgccggttcttgcaacaaaagtttgaggaagggaaagatcaagccgatctgatatttgaaggtatcatcgaccacattcctgaacttatggccaactcgtttgcaaattatcttgtacagaaactactagatgtgtgtgatgaggagcagaggctgagaattattgctgtactgactgaggaccctgtgaagctgctgagagtctctctaaactcgcacgggacaaggtcgatacagaaattgattgagactgttaaaaccaggaagcagatcatgctcattatttcggctctacaaccaggctttattcatcttgtcaatgatcctaatggtaatcatgttatacaaaaatgcctgaaaaattttgatgcagaagagaacaagttcatatttgaagctgctgcaacccattgtgttgaaatggctataaatcgccatggctgctgtgtgttacaaagttgcatatcaaatgcatatggtgaatatcaaatcaagttaattatgcaaatatgtgctgatggcttatatcttgctcaagatcaatttgggaattatgtgatccaatatgtcctggatctgaaaattccttttgcaaatgcacagctggcatctctgcttcaaggaaattatgtgtatctttcgaagcaaaaggtgggcagcaatgtggtggagaaatgcttgaaggttttcccagatgatgacaaagctgccataatatgggaattaatctcagcctcccattttgagcaactgctgcaagacccttacgcaaactatgtcattcatacggctcttgtgcagaccaggggccatctccgcagcgctcttgttaacgcaatcctcccccatgaggaagctattcggaccaatccctgttgtaagagaatctctaaagtcctctctaggaggtaagaaagagatgggatgtgtacaatctgtggtaccaagaaggttgcaagtgaatgcctagtgccctctccaggagatgagatgtgtacaatctgtggtacctagaaggctttgttgtttatttatgtgcactagctgttaaactataatgtatctgccatacaagcttcggagttcaggaggtggttttggttataggttataaccaggctgtagaatcgtcatgtagtttttgcagcacgccggcaacgctgtagcgttgtattttctttaaaatttctagttctttctgaactgcctgttctgtatcttctgtaatactctttttggttgtgctaaacggagtgaccattacatttcgtcaaagttgtcatacctgtgttatattacatagttgcatcttcc

SEQ ID NO: 9538 - DNA, 1028 bp, Oryza sativa
  ref <308>: DATABASE ACCESSION NUMBER: AK106886
  ref <309>: DATABASE ENTRY DATE: 2002-08-28
atccagaatggcgctctttctgccactactagtggcggcgtcgttgttctcgccagcagcagcgctgctcgccggcggcgagcatggcgtcgtcgtcgtcgagccgaggcaagtggagatcatgttcgacctcgccacgcagtcatggtaccacgagctctacaggcccctcaaagccgcgctcaccgacgacggggccggtccggagctcatgggccacgccgtcgtggacctgctcgacgacgaccagccgccgtcgaagcagatcacggtccgcctgttcgccagcggcggcggcggcgacgaggcgaagctcctcgtcgcggaggacgacgcctacgtggccggcttcgccaaccggacgggccactggcacacgttccgcggcgggcgctgccaccacccggtgatcatccccgccggcggcgcggcgccgtgcacggagctcccgttcgggggcacgtaccgcgaactcatcggcggcgtggccaacctgcgcgccgtgccgctggggagggcgtcggcggagagcgccatgcgggtgctgtcccgctacgacccggcgaccaccccggccgccgacgccaagatggtcgtggccaagttcatggtgatggtcaccgagcccatgcggctgaaggccgtgtcgcgcgccgtcggcggccggtgggaggaggagagctacctgagctccgacgaggccaagtacgtgccgtactggggcgagatatcggccatgctggtggagtggaacagcaccggccggtggggtgagctcggcccccggagcaagatggacagggcgcggtgcccgcggcccgccggatgcgaggacgacggcggcgacggcgacgacggcggaggcaagctattcatgatataagatttcatgattgtatatgcacggtctggtctgatcggttcattgtcggcacttccataatctggagtgattaggttgatctgcacctgtgtctctgtgtgctctgctgctaattaataaagtctctgctgtgttttggttgatc

SEQ ID NO: 9539 - DNA, 1921 bp, Oryza sativa
  ref <308>: DATABASE ACCESSION NUMBER: AK106887
  ref <309>: DATABASE ENTRY DATE: 2002-08-28
aatggcagaggcggcagcgagctagccagcggagagctcctccaagtgcagagtaggggtcccttctccgccgctctgctcaccatttcctctctcgtagccatggctctcctccgctgcctcttcctcctcgccgtccttcttccccaccgcaatgccgccgtcgtcgccgccgcgtcgccgcaccacggccccgcgccgcacgactacagggacgcgctcaccaagtccatcctcttcttcgagggccagcgctccgggaagctgccgccgtcgcagcgcgtctcctggcggggtgactccggcctctccgacggctcctccatcaaggtggacttggtgggagggtactacgacgccggcgacaacatgaagttcgggtccccgctggcgttcagcatgacgatgctggcgtggagcgtggtggagttcggtggactcatgaagggtgagctccagcacgccagggacgccgtccgctggggctccgactacctcctcaaggccaccgcccacccggacaccgtctacgtccaggtcggtgatgccaacagggaccacgcgtgctgggagcggccggaggacatggacacaccgaggaccgtgtacaaggtcgacccgagcaccccgggcaccgacgtcgcggccgagaccgccgcggcgctcgccgccgcctcgctcgtcttccgcaagtccgacccggcctacgccagccgcctcgtcgccagggccaagagggtgtttgagttcgcggacaagcacaggggcacgtacagcacccgtctctcgccatacgtctgcccatactactgctcctactccgggtaccaggatgagctgctgtggggggcggcatggctacacagggcgaccaagaacccgacgtacctgagctacatccagatgaacgggcaggtgctgggcgcggacgagcaggacaacacgttcgggtgggacaacaagcacgccggggcgaggatcctgatcgccaaggcgttcctggtgcagaaggtggcggcgctgcacgagtacaagggccacgccgacagcttcatctgctccatggtgcccggcacccccacggaccagacgcagtacacccgcggcggcctcctcttcaagctcagcgacagcaacatgcagtacgtcacctccagctccttcctgctgctcacctacgccaagtacctcgccttctccaagaccaccgtctcctgcggcggcgccgccgtcacgccggcccgcctccgcgccatcgcgcgccagcaggtggactacctgctggggagcaacccgatggggatgtcgtacatggtcgggtacggcgccaagtacccgcggaggatccaccaccgcgcgtcgtcgctgccgtcggtggcggcgcaccccgccaggatcggctgctcgcaggggttcaccgcgctctactccggcgtcgccaaccccaacgtcctcgtcggcgccgtcgtcggagggcccaacctgcaggaccagttccccgaccagcgcagcgaccacgagcactccgagccggccacctacatcaacgcgccgctcgtcggagcgctcgcctacctcgcccactcctacggccagctctaggctctactaccttctttgggagatttgatcaaacaaatcgtcccagataatagcatcactatttcgacgtcgtcttaatctaattagtcggtggatttgggggcaggttaaatttagtgggtagtaattgtgatttggggaccccagtgcaagcaaaacaagagcactagtgggtctaagtattcattagggtacgtaattaacgtgctcgctggtgttaaaccctgtgttcgtaaagcggtcgacggatgttcgtccggaaaatgtacccagttgcaactcgcaactgattgcgaaatcaacaagtgttcttatgtct

SEQ ID NO: 9540 - DNA, 1729 bp, Oryza sativa
  ref <308>: DATABASE ACCESSION NUMBER: AK106888
  ref <309>: DATABASE ENTRY DATE: 2002-08-28
aaacgtagcatgctcggcggtggattcaacctgcgcctcgtgccctcgtttccaccggaagtcgaagctccaatggcggcggcggcggcgatggcggcggtagccatgtcaggctccatggaggcttctccggcggccgcggtggtgccctgccggcgagacatgaagcggcggttacaggaggagattgacgcggtgcgtggcctcctcggcaaggcggaggcgttggtggccgtggcgagcgaggacgtcaatggcagcgcggcggcgtcggcgtcggcggtggcgaagcgctccccacgacgagtccggtcgcctcctcgccgtggtaggagcaatcgcgaggagctcgatcgagcgagggatcgtcgccatggcggcaggagcgatcgcgaggtgttcgatcgagggagggatcgccgccatggcggcaggagcgatcgcgatcgcgaggtgttcgatcgagcgaggaagattcctcgccggcggccgcacgaggcggagtccgaaccgcgcaagatcgaggccgcagcgggcgcgccgccgcaatgccaggccaaagacggcgagatcgcgccggcgatggacgcgtcgccgtcgctctgcgagcgggaggagggcgagatcgccgacgatcatggcgcggcactggacatcgacatcgacatcccccgcggcggcgccatctctcctctagtggtgaacaaggctcagtcctcaccgctcgccaagaacgacgacgacgacgagctcgtcgacatctccggcgaagcctccccggtcgcaatcgagaacttcccggaagccactaaatcgagcatcagtccgagcagcgatgaaccctcactgggaaactactccggcgacgacgacgacgacgacggcgacgacggtgagagcagcaagaaaccggacacgacatgtcttcccaccgaagccgcggcgacggcgacgacgccattggtggcggcggcggcatcacctccagccacacagacgagccagctgatcgccatagccaaggagaagcagaggctccggcgagagctcgagaggagggcggcgcgggaggcgctggaggcgatggcgagggcggcgcggccgatccgcgacgacatcgccgccacggacatgatgcagctcggtctcttcgagacgcagtacatcgtcagcaccgagaaatcccaggatagcctgcgccgcggcagcggcggcctgcttcagcagctcggcttcttcctcaaaccagagtattcatgagagcatcgagcagagcaagtagttctaggcttctagcctctagctgggcaattacacagtttttcaacctccagccatctagagacatttagtttatcattcatggtgagaaaattgaagagggtgctccggggtatccatgggtctcgtgggtgggaccctagtcccccctgcacccacgttggatccgcccctggctaagaggaatgtaggtatgtgttcttgtgaaattgggatggaatgatggatcatgatcatgatctaagtgtgttcttcgattctttcacttgctctcaggattgcaagccttgatttgagcaagctgtgtcaatgcgatgtaaattaaaccattgattagtttgcacttgcacccagtttgtgctggcaatagctctactagatgttactgtatttgtttctgatgctgtgatatgaagttatgaattgtattaaacaatcatttcgcctt

SEQ ID NO: 9541 - DNA, 1868 bp, Oryza sativa
  ref <308>: DATABASE ACCESSION NUMBER: AK106889
  ref <309>: DATABASE ENTRY DATE: 2002-08-28
tggtaacagtcgccgccgccgccatcgaagagggccaagacggcggccggtatcgccaccccacagaaggtggggaaggcggcggctgcgttggccgaccagttcttgacgccggagaagccgacgcggaaggttgcagcggcggcagggcacatctggacgccggataggccggagcagccgtcggcggcggtgcggaaggcgcatggcagcagcggcggcgtggtgttctctgtcaaggggggtccggcgggcggcgctcgagctgcggcagtggtcggagaggggggcggcgtcgctggcgccagatgaggacgagctcgaggccgtggaacggcagctcgatgttggtcccacatccgtccggagccccgtcaagcgcaaggccaagctgccggagagctacgagatgctctgcgagttcttcaattgcttcgagagttccacccagttgcttcgtatgaagggatccaaggcatccttccccaacatttgtgctaccacccagcatttgtctgaacgatggtgtagaaagcttgactggagtatttgtatttgctgcaacaaggttagctctcaaagcataagaagatgtagttggtgcagcatgccaaacaattttaaatggactgcaatgaccagtcgcaaatcgtcaagaaatagttagcatggaatgaaatgctatgaagactgaatttttactgtaagccacaatcaattgatgttgcactcttgtggcctggaagatttgtcttatgtgattttcctggatggcatgagtgtttggaaattctggaggttcactctagagaggtttcattggcaagtgatgccagtctggaagacgttgcttctttgactgaaagatttacagttttacctggttggtttacaattcatcagtacgcactgtgagacaacctctgaagaatttgaaggacaggtaaaactagaaacattttttagttgttttttctttaaatatttgtcgatatatgcactaattggatgtttcctcagtgggccactcactacgtacaatggtgatgctttgcctcatttatgcttagtggtacattatgtcaatctgttttgtgcatagcgagggagtggaagtaagcttaccaaccaacatttccctcctcctaggcttaacctacctcaaagactaggtttgcccattggtgcaagctgaccaccactgctaggacataatacggtttgcttagttactctatctcttaccttccctgtttttgcacatatggtaaaatttcttgcagttcctatacaatccgcatgtttatccctgctcacgtataccaatgatgcatgtttattcatgtatacatggaagttatagattggtgcaagtgattcaattaagttgcttttctgtttgttgatttatgagatagaactccagcattgttcatcaattgatatgtttatcaggcatcaattaatatgtttcaattggtagcttaaaccggagaagactccagctagatcataggcttatgattcctcagaactgaaatccctggtcctgggcacaagcaaagaatgagcagcattctggagctgccttgctagctagacttatgtctgtgcatatacactgggcggggctatcttcgttccttgcatcctctgcgttgatcttctttgctctatcaggaagtaaaaaagagctgggaagtggtcttctctatagatagaagagaaaatggaaaaaggagaaatgcaccatcgtttgggaagttgatgtgaacatctgattgacatctctcatgtaatttagggcatgcatttcagcaaatgctcaggctaattttagtggccgaaggcatctgaattcacacctg

SEQ ID NO: 9542 - DNA, 2288 bp, Oryza sativa
  ref <308>: DATABASE ACCESSION NUMBER: AK106890
  ref <309>: DATABASE ENTRY DATE: 2002-08-28
atctcgtttttttttttctttttcgcgcccgtctccttcgccttcgccgtctcccccgccttcctcctgtctagggttccatggattctgccgccgcctccgccgatgggggcgcgttcctcgagttcgtcgactacgccatctccatgctctcctcctcctcctccgggggaaacggcgacgagtcccccggcgccgggccagcgcctgcgcggccgccgtgggggtgggcggtggcgcaagtgctcaagtcgtgctgcgcttattccagcggcgtcaccgccgccatcctgctctccgacctcttccagtcttggacagaacaaagcaagtctctgaccgcaaagaggaaagttgaattgaccaatcttctaaaaacaagaaatagaagaaggcggcttcctaataccatcacaatcgattctatccatgagaagaacttcctatctcctaagagtgtccttgatgctgttgtcattgatgtgtttgtcatccctggtacaaacatatacatgcttaccttgggagacatgtggagcacatcgactatcgatctatatctacaccgaaggtactacaactacattggacagcatgatgtcttgaagaagggtcgagaagttatgctcacgggatgttgcctacgtacagctatggagggatcaggccatgctcgtattttgccaacagaatatatggtgatgttacttgatgaggaggaagatgaagatgccatgttacttgccgcacagttttgcatgtattctttctcatctatgatgctagatgagaacagaaacaatatttcctattcgttttatgccaggatcgaaaagatcgagtctttagaaccatttggatctacagaaagaaagcagattgtacttgttgacaatgatgatgcaaaaataaaatttgttttatggggggagcaggttttgcttgcaaatcttttcagcgtagggagcatgcttgcactgcacagaccttttattgcaaattatgtgcacaataatcatgaggagtctcaggaactttgccttgaatatggcagtgctacacaggtttatttggtgcctattgctcagcaggaggaacaggtacttcttacacctactcaaataaggagtcaagggtctcgattgtcatgtgttccaagtgatcatatggcttcacaagtaacattaccacgtgatttgcatggttcagttgatttcagcaaatatccatttcgagtatacgtaagtgaccttcatgataaaatggttggagttagtctgtttggcatggtaacaagtgtttgcaaagcaagtacatcaggcacttacttttatttggagatagaagatgcaacaggagttgtcctgatgaagcttaacttcattggactctggtcgctaggcagggtaggtgttggtcatatggtgtacatgtctggtttgacttgtaccttgagttcaacaaacaagcttgaagtcgcgtggactgaaaaggaaccagggtctctatttgttaacataagcttgctgccagcgcttcttaattcaacatgcctgcataatttgtcactcttgtcagatcttccccattcaactaatagaacacatatatgccatgttcgacttgaccacatcgatgtcaacagtttgaaggtattattattccacaatctttgtgggtgtgttgtgagtgatcaatcaggcggacttcagtgttccttctgtaagtgcgcatgccatatcagtggatgtacacatggctttcagcttcacttgaccattgcagatgacagtgaaaaggtttttgcctggtgcattgggcaaacagccgtagagttccttcaaatatctcctgatgaatatatggaactccctgaggatgaacgagcaatgtatctctatactcttcagaatgagaattttacggtcgctattgcaaataccagccagcggattgaagcgtatattgaaggcgagaaatttcttccagtatgggagatcacaagagcccaaaaatgcgagtgagatccttgagctggatttggtagctattgcagaagaagaaaggcggcaatattaataagtttatggtatatcaatcgtaaaactattcaggattagcaatggaatggagcatctttgtatctgactcgatgatcttgtagtgtttctcgctgatgtgttttctgttcatatgatgcacgcctgcatctctgtcctgtaatgtggttcgcggttgtcaattgtgaggaagtaaaaacaatttgccagcagaattagctatctggt

SEQ ID NO: 9543 - DNA, 1601 bp, Oryza sativa
  ref <308>: DATABASE ACCESSION NUMBER: AK106891
  ref <309>: DATABASE ENTRY DATE: 2002-08-28
gataataataagatttattagaggtcgagcagctggcagttctcccagagcgtcttggcggagcggcggaggcggcgggcctcctcctcggtgagctccatctcggcgacgccgaggacgccggcgcggccgaggcgggcggggaggctgaggaagacctcgtggtcttgggggatgccgtggaagccggaggcgaggatggagacggggtggatgcggtgctggtcgcggaggagggaggcggcgaggctggcgacggagtagccgatggcccaggaggtgtagcccttgaggctgatcacctcgtacgcgctgtccaccaccgctcgccggattccctccagggcctcctcgtcgaagctctggtggctctcccgcagcgacttgagcaccggcatcccggccacgctcatgctcgaccatatcgccaccgagctgtccccgtgctctcccaccatgaagctagtcatccatggaaataggaaaaggctaaaggctgccatgtcatcacatgtgggtgggcagtgacaccaccactcagccaaccatatgctttagctaggccccacaccacatgtcactttgtcgcagagagagagagagagacagcaacaatggccaatggacaatgggcaatggcaatggcagtggaggagagagagagaggggtaaggtgttgacctggacatcctgggcgttgacctggaggtgctcggcgaggaggaagcggaacctggaggagtcgaggttggtgccggagccgatgacgcggctcgccgggaaccccgacagcttccacgccacatacgtcagcacgtcgacggggttggagacgatcagcagcagcgcctccggcgagtgctccgccagcgccggcacgatcttccggaacagcgccacgttccgctgcagcaggttcaggcggctctccccggggatctggcgcgcgccggccgtgacgatggccaggtcggagccgcgcgtgacggccaggtcggtgtcggagacgaggcggacgcgggggaggaacgccgccgcgtgctgcaggtccagcatctccccgcgcagcttgtccggcaccgcgtccaccagcgcgatctcgtccgccatgtcccgggtcaggatggtctgcgcgatcgccatccccacgttgcccgcgccgatcaccgatatcttcgtcagccgacgccggtgcgacgtcggcgtcgacccgccgtccgccaccggacggaagaaccccgacgacgcgccctccgcgtcgaaccccagctccgacagagacgaagccttcttcatgtcgcgagaccgagatcgagatctccctccctcactcactggatgaaaggccaacggcgatgtggatctctcctgaaaatggaaatggaaatgatcgatggtggttttgtggctcattccatggaagttctcctcctctttatagagaagaggtcgctctggagacaaaaccgctacactacagacggcggttttccaaaccgctcatgctgatttgactctcaaatatactcacacaagatctaatgatgctgacaacaatttcttcttcaaaatcaaaaactaaggcgttgatggttttgttc

SEQ ID NO: 9544 - DNA, 1905 bp, Oryza sativa
  ref <308>: DATABASE ACCESSION NUMBER: AK106892
  ref <309>: DATABASE ENTRY DATE: 2002-08-28
gtgcaagccgtaaattcctttcgattacgaatatacatcgttcgaagacgaaggccaagtgagcagcggctcgctcgtcgcggccgtggaaattaccatgatgacgccgggatcgtcctcgacttcggtgccgggagatgaggccgacgccggcaactgggatgcgggggtggagacggcggcgcggctggaggcgatggttcatgcggaggacgaactctcggaggagcagattcaagccaacaaccagacacaggaagatgagctgctggcactacaggccatctatggtgatgatttggttatcttcgacaataaggacggccttcgatttttccagatttctctgcactatcaactcgccggtgacatccgagttcacctgaatgtctgccccaacgggagaacagaaaccggagcagaaaacgacgacgacgacgacagtgaccgactcttgtatgcttgcagcctgcagcatctgcctcctgttgtgctagcctgcctactaccacgtttatatccgagtcaccgtgccccctacttcgtggtcgccgcgaagtggctggacgagccggaagtttcaagcttctgctctgttcttgatgagatctgggcagagcagcctgcagggcaagaggtggtgtacaaatgggtggactggctgagcacctcttcctggttttgcattgcttcagatgatcagattgtatttggaccagatgcagactcggctggtggtgatgaccgggcaatcggaagaagctgctcccttgattctatgatccctctaattcaacgttacagcaaggagagatcacatgaaattttcgctcgaagaatccatgagtgcggagtctgtctcagtgaaaatacaggcagaaacttcatacagctcccatgcagccactccttctgcgtcaagtgcatggagacgcagtgcaggatccacgtgaaggaagggagcgtggcgaggctgacatgcccggacacgtcgtgccgccggccgctgccgccggcgctgctgaggggcctcctcggcgacggcgagtacgcgcggtgggagtcgctggtgctgcgaggatgctggacacgatgcccgacgtggcctactgccccaggtgcagcgccgcgtgcgtggcggccggcgacgacgcccagtgctcgaggtgcttcttcaccttctgcgccgtctgccgggagcggcgccacgtcggggacacctgcgtctccccgaaccagatgctcgacatcatgctggaacggcagaaggagaagaggccgttggcggcgccgtcgccggacagccaggcggtgtcgtcgaagaggaagatggaggagcttctgagcctccgcgaggtgatgcgcacgtcgaggcagtgcccgtcgtgcaagatggccgtgtccaagacggccggctgcaacaagatggtgtgtagcaactgcggccgccccttctgctaccgctgcagcagggccatcaccagctacgagcacttcgctggggagtgcaagctgttcgagagcgtcggcaaggggtggttcccggggcaggcgatgtggatgaacctcgaatacgactacgacgagatcgccgagatcgggacgccctcgtggatacgggctatcaggtatccctgccctacctgcggcgccaagcgcaccaagtcgggcaacaatgaccttctaacgtgcagaggatgccgaacccattactgcgcgctgtgctcgaagaaggtatggagcatcgccgagcactatgggccagcagaatgactgacatggcagtacattaactcagcaaagagtagatgacccactgttcacataagcatttgcaaattttacttactgtgtaatgggagtaatttaaaaggaatcaagggcgctgccggctgccagttcagc

SEQ ID NO: 9545 - DNA, 1657 bp, Oryza sativa
  ref <308>: DATABASE ACCESSION NUMBER: AK106893
  ref <309>: DATABASE ENTRY DATE: 2002-08-28
aatgcccatccaccggaagaagcaagcctcggactgaggtcgcagctcaaagcctcggaccactccgccgccgcgccggcgatctcctccggtaggtcatctcctccgctccgatcatcgcagcgcgccactggtcggtctcttgccccgctgcagagaaatcttgatctcgtctcgcttttcttggctgtctcgttcgtgcaggccacccgctcgacggaatgtcccggagaaacaccaccgggtggccggtgcctcgtggcggggcggagccgacggggaagccagggcccagcgcgccggtccgtgccgcccacgcgttcggccaaatgcctcggaggaggaccaccaccaccgcgcggtgggtgcggcgccaccaagtgcacaaggggaagccccgcggcgccgccaccgtcgaccgactcagcgccctcccggacgcgctcctgcaccacgtcatgtcgttcctcaaggcgtgggaggtggtgcgcacctgcgtgctctcgcgccgctggcgccacacctgggcctccgcgccgtgcgttgacatccgcgctccgagctctcgccgcgagcggggtcccggccgcgacagcgacccgccggaggacttcggcaggttcgtgtaccgcctgttgctggcgcgggaggtttccgcaccggttgacacgctccggctgcggtcgagcaacggggaggaatatgccgagatgtatgacaatgatgatgtcaacatgtggatctcttctgcgatcaaacgcaatgctcgagtcattcaccttaacgggcaccgcgaggacgacgacctggtgttggagcacactgcctttgtctctcaacgcctcaagatcttgaagctgtcgaacgtcaatcttgattggaagatccccagacagctctcttctcggtgcacttcccttacagagctagagcttaacaattgcccggttaatggcggcgagatttcgtccgtctcactgaagaaactgaggatggtcaaatgcttgatcactgtggacctctcgatctgtgctccaaaccttgagttgctatgctgcatcaccccataccatcgtgttcccttgttcaaaaacctgagctcactggttgccgccactatcgtacttgatgactctttcttgtgccgtgacgatttcctccatgaggatgaaaggggaagcagcgatgatgaggatgacaataagactatatcagatcattatgataaaatggttactaatagtgatgcatgtggtgatggtaatttggttgatgaatacaattatggctctgatattgacagtgatgacgatatatatgaatatagtcagatagcaaatgaatgtagagatggaaagtatagccactgccatgacagtgaatgctgcagtagttatcatgacacttgcaagcttgccaattctttcagtggccaggatttgctttgcagcctttcgaatgccagaagcttggagttactagctcattcaggggaggtatttcaggacctttttcttctgataaatttgtatcaagtcttgtttcctgtacttgcattataatagttatgattatgataaatagcacatgtagaacaaacttgtttcttttcttggtactattcgtcttatcaattcaaaagatggcactcaaaatc

SEQ ID NO: 9546 - DNA, 1789 bp, Oryza sativa
  ref <308>: DATABASE ACCESSION NUMBER: AK106894
  ref <309>: DATABASE ENTRY DATE: 2002-08-28
gcagcccaagccggcccaagtcaagtgctctgttctgttctcagccaaccgaaaaaagtctagtttgcctccctggcactgttcatcttccagctctgggcagagcccgagccagccgagcctgtgcacagtgccgccttcttccaccaaatccggcctcctcgttgctcctctttccaaattagttgaggggaaatattcctcttattctcctcttccttttccccaagaaatccccaaaattttatatggaaatcctttccaatttcgcggatcaaatcctttcctttttccggcgaagataaactttcccgagtttttcccgtcgttttgggcccggacccgagcttccaaggctataaataggaccccctagtcctcctctttcgtttgccccctctcccgagctctctagtgcctcgtagcctcgtcgccgcgcgcgtttagttcgtcgccgccgccggccgagtgcagccgcgccgccgcgccgcttctgccgtcgccgccgcttgccgccgtcgccaagaggtgcgccaaggggtggagaagcccggccgcccgtccttcttcgccgccggccgccgtagctcgccgtcgtcggtaaggtccaagccgccgccgcctcctctcgtcgccggccgtcgtcggacgtcgattgtcgttgtggtgagtaccgttgggttcgcctcgtcgtcctctacgtgtgcatgccctccaaatccgcagccggccgctctatctccggcgaggtcgtatcgtggttcgccggcgccgctccagcagccccgcgccgtcgctgtggtcgtcgccttcggtcgccgctgccgccgttgggttcgcgaggaggagaagaagaccggcctccacttccccgtcgtcgaagaccccgggaagcccgtcgtcaccgtgaagccgatccgttccatcttcagccgcgccgttcgtcgccgtccatcgccgccttcattcaccgtcaccaccctcgggatcgcaggagcgaggtgaagaccgtccgccctcggttgttgcctctcgtcgccggaaagccgtcgccatcgtcaacccaaggtcgccgcctttggagctcgtcgcctgccatctccctcgccgtctgtcgtcgcataagtggtgcttgtcgtttccgtcgttgcgaaggttcgcgagtgcgccggaagtattcaagaagattaattgaagaccgattattgcaagttgaagaaaaagaatccagaaggagaagacgtttggcttataccccagttgagctgcctgtgggagtggagccggagcttcgctagattttattttccgctgcagttttcttcttggtgaggacttagtgcctcttaagaggtggaagtagacctgcgggttcgccaggaacgccgcgcgggagatgacgtagccggcggcgcccggcgccttcatcatatcatcgccgccgccggcgccgaggccggccacagcaagtacaagaaggcggtcgacccgacgcccacggccacggcagcgatcatcgacggcgccgcaaccatcggcactacaagtttgtaattccagatcgcgcgcgtggagaccaacgaacaatggaggagatcgacgaagagatcaagcagagtgaaaggtgcggccactggtggtaaagctagtggtaactggttttatagaggattgcaaaacacaggaaagacatagaaatgactgtttgattgggccgcaggaaaaacataggaatttgaggagaaataaagactcaaaggattctttccatgaggttctatctcatgtc

SEQ ID NO: 9547 - DNA, 1438 bp, Oryza sativa
  ref <308>: DATABASE ACCESSION NUMBER: AK106895
  ref <309>: DATABASE ENTRY DATE: 2002-08-28
gtctcctctgcttttgcgctgctcgctcgcctcatcgggcgccgcgcgcgccatggcatccgaggtggtgaggaggaggaggaggatcgcggactacctcaacgacggcgaggagctcgggatcgaggggtcgccggcggtgacgccgcggtcccccgcgctcgcggcggcgaggtcgctgctgccgaggtttaggtgggcccgggcggcgagtaggattgggaggaaggggaaggcggagaaggagggggtggtggtggtggaggaggagattgcggtggagaagaacggcgagcccgtcgccgccgccgccgccgccgccaccgtcgcctctacctcagtgttcgacaacgagagccacacgaggactcccgacctcggcgttggcctgagcctggtgttcctcctcgccaagacatccgacgagttcaacaagatggcgaaggttcgcgcggagatggagacgctgctgagagagatcaaagagcaggtgaggcagagcagcagcggaggggttggtgacgacgacgcatcgaaaccccgctgcaacctcgagtccgccgcgtcgagctgcctcacggacacgaacgagaacgagagggcgagcgcgcgcatgatggaggatcaggccacctcgtcgtccaaccacatggaggaggaggaagtgagctgcgagaaatcagcggaggagtacgagtgctgcttcccgaggatggatgtgctcgaggaggagttccatgccgagctcgatcttctccaggttaactatggttcagatgttcagctgttcttgcctgaagaacatgatgcagagcaaccggatgagatcactggatgccgggaagaattcaatgatgatgttgggagagaagatgaagtagtggaggacgaagactacgacgatgaagctgaatacaatggtgtcaatgccgtcgagcttgagaggaggctgcacgagctcctccatcagaggaaccaggagcggatcgaagagctggaactcgcgctgaaacgcgcggagaagaagctcgtcgagaaggagatggaggtgtccatgtggaaggacacagcgaagctcgcgctgcgacaggacagtagtactatgttgtgacatggtgattgcaaagctggcatgcttcatgtgcgcaatactgcaatttgtacatgatttaggattattgcttcatggggcacacacgcagacacgctggagcgtggcacttgcgacgtatttttgtagagttttacgccagttatagtgaacagttcataccgaagtttagtgttagcctttcttaggtgatctctaagcaagtttgttgtttcgggtttggggcaaatgcagttcaattagtctgactgatgtccggttctatatttgtttgtaccatgtgtacgtctcttcgtatttgagaattcagatggcaatttggttgcc

SEQ ID NO: 9548 - DNA, 1791 bp, Oryza sativa
  ref <308>: DATABASE ACCESSION NUMBER: AK106896
  ref <309>: DATABASE ENTRY DATE: 2002-08-28
ctgcctcctccatcgatctccttcgtatacgcaatcggtgtctcgatccatattccatttcagtaggcagctaagcttgaaacgtccactgcaatgatggcactgacggagcggcagccgcagtcggagaagaaggcggcgagggcgaggccgatgtcggcgaaggccgtcgtcgtgctctgcgccacgagcttcttcgtcggcctgctgctcagcggccggatgacgcttctgatgccaccgccgtcgggcagcgtcggcgcggcctcctccggccatggctccaggctctccctcttctccgacgactgcgagcaccggcataaactggacgagggcaacccgaacgacatcatgaacgaggtgtcaagaactcaccaagcaatccagtcgttggacaagtcggtgtcgtcgctggagatggagctggcggtggagcgcgcgaagcagaacggcgggctgggcgcggcggtgccgtcgaagcgggggcggcggccgcccagggcgttcgtggtgatcggcatcaacacggcgttcagcagcaagaagcggcgcgactcgctccgggacacgtgggtgccgaggggcgagaggctgcggcggctggaggagaagggggtggtggtgcggttcgtgatcgggcacagcgccaccccgggcggcgccctagaccgcgccatcgacgtggaggacgccgagacgcgggacttcatgcggctcgaccacgtcgagggctaccacgagctctcctccaagacccgcacctacttcaccgccgccgtcgccacctgggacgccgacttctacgtcaaggtcgacgacgacgtccacgtcaacctagggatgctgacgagcaggctggcgaggtacaggacgaggccgagggtgtacgtgggctgcatgaagtccggcccggttctgtcacagaagggcgtgaagtaccacgagccggagtactggaagttcggggacgaggggaaccggtacttccggcatgccaccggccagatctacgccatctccaaggacctcgcctcctacatctccatcaaccagccgatactgcaccggttcgcgaacgaggacgtgtcgctgggggcgtggctgatagggctggaggtggagcacgtggacgaccggagcctgtgctgcgcgacgccgccggactgcgagtggaagaagcaggcggggaacgtgtgcgcggcgtccttcgactggtcctgcagcggcatctgcaagtccgtcgacaggatgagggccatccacagcgcctgcggcgagggcgacggcgccgtctcgaacaacttcgccgccgccgccgccgcatgatcgatcgatgtgtactgcaatacgtacgtacacacacgctagcagctagccacaaggaagagcagctatcttacggggttccccccctaatttatccttgttttgttttgtgggtctcataattagaaatggactaattattcacttggtttatatgaaccatggaggtgttagatagtcagacgtggcgtccggtcgatcggtaggcgagatcgatgctcggcaactgcactgcaaggggtagtttcaggcggcgattcactcaatctgtgttctaaaatagtactccctttgccataaaaaaatacatatgaccattttaaaacggattagtaattctaatattctggaaaactttagttgagagaaaaagatgaaatgagcctcactgatactccatccgtgggtaagtcatcttgtcctttgtagtttgtcttcaaatataaaagactttggtattct

SEQ ID NO: 9549 - DNA, 2162 bp, Oryza sativa
  ref <308>: DATABASE ACCESSION NUMBER: AK106897
  ref <309>: DATABASE ENTRY DATE: 2002-08-28
atgtcatgctcttgttcctgtgaggctgtgatcagtgcagacagcttcttctgctaccccccacaagcttcctcaaagaagagatcggccaccattttgtggtctcatttctgagctccctttttgtttcctgattgctggtgtttgattcctgtttttttttggcacaaggaaattttctctgaatttcagttagtttgaggtctctgaatttgcctgctgattgctgtgtattttcctcacttctcttgttccatttcagctgttcttggtacacttggcacttggctgtgtaccaagaacaaatcagattccacatatatataagttctttcttgatcgatcaatctttcctctaaccttttggtgtgtcacaaggtttgaggctgttgatgatcatctctaagaatcaaacatacccactctcccagccttttctgaccgattcctgatccaagattaacaccacacacaatccacaaaatccccaaaagtatcccaagaaacacctcatttcttgatcagaactacactctgcagaagcaaaatggcgccggcgccgctcgccggcggcaggctggtgctggtggtggtggtggcggcggcgtgcatggcgcggtggtcggaggggatcggcgtgaactggggcacgcagctgagccacccgctgccggcgagcacggtggtgcagctgctcaaggacaacgggttcgacagggtgaagctgttcgacgccgaggacggcatcctggcggcgctcaaggggtcgggcatacaggtgatggtcggcatccccaacgacatgctcgccgacctcgccgccggcgccaaggccgccgacgactgggtcgccacgaacgtctccaaccacgtcaacaacggcgtcgacatcaggtacgtagccgtcgggaacgagccgttcctggagacgttcaacgggacgtacctgaacacgacgttcccggcgatgcagagcgtgcaggcagcgctgaagaaggccgggctcgccgacaaggtgaaggtgacggtgccgctcaacgccgacgtgtaccagtcgccgacggggaagccctccgacggcgacttccgcgccgacatccacggcctgatgctcaccatcgtccagttcctcgccgacaccggcgcgccgttcgtcgccaacgtgtacccgttcatcagcctctacaaggaccccaacttcccgctcgactacgccttctttcagggctcgtcggcgccggtggtggatggtggcgtgacgtaccagaacacgttcgacgccaaccacgacacgctggtggcggcgctgcggcggaacgggtacccgaacgtgtccatcatcgtcggcgaggtcgggtggccgaccgacggcgacgccaacgcgaacccgcagtacgcacgacagttcaaccaggggttcctcacccacatcgcctccggccagggcacgccactccggcctggccccgtcgacgcctacctcttcagcctcatcgacgaggaccagaagagcatcgagccgggcaacttcgagcgccactggggcgtcttctactacgacggccagcccaagtaccctctcagccttcgcggcggcggcaacggcaatggcaatggcagcacgctgatgccggcgaagggtgtgacctacctgcagcggcggtggtgcgtgatgaagccgtcggcgagcctcgtcgaccagaaggtcggcgacggcgtgagctacgcgtgcgggctcgccgactgcacaagcctcgggtacaagacgtcgtgcggcggcctcgacgccaaggggaacgtgtcgtacgcgttcaacagctactaccaggtgaacgaccaggacgaccgtgcctgcgacttcaagggcatcgccaccaccaccactgtcgacccctctgccgggtcatgccgcttcatcatcgagattgcgcccaccgccaacggcgtcgccatggcggcaacagttagggtcgccggcgtcatggctgccatcctcgccgtgttcatacacttggtggtgcccgtgttctgaatggctccaacatccttagcttatcctcttaatcatcatgtatttatctcttgtttaatttaatttaaacacgaaaaatagttgtttttgtttatcttgtttatcgcctcgcatcctgcattcaaatatt

SEQ ID NO: 9550 - DNA, 4032 bp, Oryza sativa
  ref <308>: DATABASE ACCESSION NUMBER: AK106898
  ref <309>: DATABASE ENTRY DATE: 2002-08-28
ttcctttcccccctccgccccgccccagattcctccgccaccaccgccaccgccatggacgacctcgagcaggccatcctgctcgcctcggattcccccgccgcggccgccgcctccccggccgtgcgcgccgaggcgctcgcctactgcgcgcgcgcccgcgacgagaccccgccgtcgtcgctcctccacctctgcctctacggcctcgcctcctccccgcacgcccacgtccacttctggtgcctccagaccatccacgacgcgctcctcctccgccgccgcctcgccctccccgacgacctcgccctcctccgctcctcgctgctctccctcgccgtctcctccaacgccgcctcccctcccttcctccgcaacaagctcgcccagctcctcgccctcctcgtccgcttcgagtacccccatgtctacccttcctacttcctcgatctcatcccgccctcgccgccgctgccgggacccaccgacatgttcgcccgcgtcctcgtctccctcgacgatgacctgctctcccaggactacccgcgcaacgccgaggaggcctccgatgccgggagggtcaaggacgccatgcgcgcgcagtgcgtgccccagatcgcccgccactggcacgaggccgccgtgtccctccgcgccgccgaccccgccgtcgccgcagtagccctcgatgcggcgcggaggtgcatctcctggatcgatgtctccctggtcgcgaatgacgtgtttgttcccttgctctttgacattgcgctgtccccggggagcgtggctcctcttgctgccgcggcggtggggtgcctctctgctgtggcagcaaagaggatggacgcgagggcaaaggtggcgttgctgaggtcgctcatgtctgcccagaaggggtttggtagccctgacagcggtttgaaaatggcacatttggtgacggcatacgctgtcgaggctctcgagtgttatcgcaagcttggctctagtgatgctgatggagccgcggcattggaaatgctggaagaggtgctgccagctgtatttgcggccgcagagagcggcgatgatgatgaggttgattcgggctcggtgcttgagtttttatctgggtatgtgagtacgatgaaggcaccgacagagaagcaacttggacacttgggacagatactggaggtggtgcggatgcagatgtcatatgatccagtttataggggtcatcttgatgtccttgacaagatagggaaggaggaggaagacctgatggcagagcagcggaaggatttaattgcactatttcggagcatttgtcgtgtggcaccaggtgccactcagctgttcataagagggttgcttgtgacggccctttcatctgcagaagttagtgttgaggatgttgaggtcgcgcttactctgttttaccggcttggggaaatagtgggtgaggaagagatccggactggagctgggttaattagggagcttgtcccaatgctcctttcagcgagattctcatgccacacacaccgcctagttgcattagtgtacctagacacaattagccgctatatcaagttcatgcaggagaatgaccaatatgtgccacatctgcttactgtgttcttggatgagcgtggcatacaccatcagaatgcccacgtgagctgccatgcaggatacttgctcatgagagctatcaggctgttgaaggctaagctagtgccttacttggataccattttgcagagcttgcaagatgccctagtgcaattcactgctacggactgggcaaacaaagatattaagttctccagctcagaggatggcagccaaatattcgaggctgtgggactgttgatcggcattgaagaggtgtcaccagataagcaggttcagtgcttgacagctttacttaatcctctctgtcaacagatcgagtcacttgttatggatgccaaagcacaaggacttgaagaatcatctccaagagctataggtcttcaacagattattgttgcattgactatgatcagcaagggatttaatgaacggcttgtgatgggaagcaggccgacacttggcgttatgttcaagaagacccttgatgtagttttgcaagtcctcatctcatttcctaatgtgaagcccctgcgatctaagatcatatcatttctccaccgtatggttgagatattaggcatttcggtgcttccatgtattccaattgcactgcgacagttgctcgttgataatgaggcaaaagatatgtcggaatttctgtacttaataaaccaaataatatgcaagtttaaatcttcagcaaatgccttattggaggatgtgtttcctgccatcgcaagtcatttatctgtgatactatcacacgatgccttttcaaatggttttgcaagcaatactgaggaaatgcgtgagctgcaagagctggaaaagagattttacgcattcttgcttcatatagcaacacatgatctgtctacagttctcctaactcctagttgtaggcattatctagagaacataatgcagttgcttttgattacttcatgcagccataaagagatatcacatcggaagacatgcgtacagacttttgtcaaccttatcaaagactggtgtagtagctctgaaattgaagataagcttcctggcttccgagtgtttatgattgagaagttcgctactggttgctgtttgcagagtgtccttgacaagtcatttaacttccgcgatggaatttcgattgccctgtttggtgaaatcatgatggctcaaaaggttatgtatgaaagatttggcgagaactttgttgtaaattttgtaacaaaacttcgagaagcacactgcccaccagaccttgctgaacagtactaccaaaagttacagggaaatgatgtcaaggcattcaagtcattttatgaatcacttgtcatgaaaataagacaacagcagaatgggagtcttgtcttcagatagcgtcattcaattattttaaatctgtttgccagtgaaagattcctcagttctacaatttgaatatagggtagttgtatcatctatgtacataaagctctaccatttctgagatcagaagatgtatactgcgggaatatttttaccgagcctggctaccgtggcaaagttccttgatcaaggcatgttagtgagatgcaggggatacatccccagagtttctgctgtgagcatacagggtttcattatgtttgttttgatatttctctggaagtgatcattgttctgctccgagcttgaaattttttgtaaggcgattcgggtgaagctaaacagatgggataggcaaaagagtgatgtgtgggccgtgtttttcctgacagaaactgtcacaccgcctgttgtcgtgttaccaaattttggcagtggtttttcacccctttgttagctggggtgctgtacagattctttaatatagttgcgtcgttcgcattaataagtttccgtggtcaccttctcgttaccctgattatccagtgacagaagaggcatgctatgctgactgcaatgtaagagttcaactttgatctcttctccttttgaggtagtggaaattttctttttacccatagaggtcggtatttttgaacggtcgaaatctttcatccttgtttttgcccattctgtgactttcgtgcttgttcggcttcctttcagaatttggataaatttgctttggattagaccacgtaacagagtctagtcactgttacttgttaggcaggatggatatggctgtgaagtgaaggccaggccatcaaagttgggtttgatcatatcttctgttcttgttcttgtgatccaactatccaaggacttggccaggagcacatcagcgtgctagagacggacataacgatattgattgtctagcttatatgactgcacatagaggcccatatttgtaggttgacaagatgtttatggctttatggccatatgacttttgttgaaaatttgcttgcctgctgttggtgc

SEQ ID NO: 9551 - DNA, 1785 bp, Oryza sativa
  ref <308>: DATABASE ACCESSION NUMBER: AK106899
  ref <309>: DATABASE ENTRY DATE: 2002-08-28
atggcaccgcttcccctccccttctcgctcgctctcctccgacggcgccgcttcggcgcttcccgacttccagcggcgagcagccggctgcggatgcgcccgcgctgctccaggaggatctggatcccgctggcgtagtctccgtggcatcggcggcggcggccgggcggtgggaagcttcagctccggccaggtcgacggcgcgctcgccgccggcttcagcgaagaccaccaggtatgccccgcctctactccctaggtagggtctgcgcggcgtctgtaggctctcggactgaatcgcgtccagctatcgagttttgtcccacatcgccaattttgagagcgagcgacctgtttatcaacgcggttcgattctactccatcgcctccccagaggcacccaccccgaccgaatacagcgaaaagatcccaaatgtgggcatcggctgggtgtgtatccccttccggttaatggctgtaaaaaaaaaaagataaaggagcagtgaaaagatcccctcccgttatggggcacggcaggcgaccccctgccggttagctgcatccacgttaagatgtcaatacggcaacggtaagttgtcaaatacggcatatgcatgcagtcgggcctctggtggaaggcagcgctagacactagcgcttagcttttttaaaatttggatgaaatttttatttctgttgaatcgttttttaattccttgtcttaagccaagagaagcttaaataaggtgaatttggatgaacttttttttttctgttgaatcgtttttcaattccttgtcttaagccaagagaagcttaaataaagtcttaaaacattaagatagggtaggagatgagaggagatacttgctgtgttgatatgcccttactgctagcaatttcgccttaagacgcaaaacttctaaccgactgcatttccaagtttcgactggatgccggtcagagatgacttggcagatgaataattttgatcttactctgcagatactatggttagcatagtattagtaatgctttgtcatttgttcactgaattttggcttgtatgcagttttgtttttaatagtaaatttctctgtaaaatttgcacttatatctgaattaatttacgctgcaagactatgacggtaaagatttggctggaacatccaatattttcagccaattgtctgaagatgtgattaccaaagttgcaaataactagcaacaagatcaggtatgtgcagagttgcagacaaccgttgagactgaaccaaattcgtcctggcatggacagggaaaaatagaccatagcagcatagttttgatcaggtagatgaagaatcctacattttgaaaagtattttatgatgctcagggattcatgtaagcaataattctgatccttgagtcaaatgattttcctcaatttttatttgtaaaaatgactgtccttttctttgtaaatatgctgaaggaaatagcattgtcgcaaagaggcgcaaaatctgaaacatgggtgctgaagaataactgccagtaattttagctgaagctgaccgtagcaatgttttgttagtgtagcatactgcaaacgttaatttcattcagataagacatgcaaatttgattgatgggaaatgtctcccatgtctttttaaaaccttctggtatggctagctggttctttttgtaggaaagaaacaaatctgaaacaagaacatgtagatgacagattgtacatactggaatacaaacatttggtattgactggaggaccgcaac

SEQ ID NO: 9552 - DNA, 4164 bp, Oryza sativa
  ref <308>: DATABASE ACCESSION NUMBER: AK106900
  ref <309>: DATABASE ENTRY DATE: 2002-08-28
tcttgttgctccctctggttcgcaatttactctccgttcgtcaatttacccgcgacaataaatgttccattgagtttgacgagtttggtttttctattaaggaccctcggaccaggcgcgtgattcttcattgcaatagccatggcgagctctacaccctcctggccgctgcaccttccatcgccgcccagtgcaacctcgccacctcctccacgttatggcatcgcctcctcggtcatccgggtccaattgccatcaccactctccaacatttatccgccatacctcgctccaagacaaataattccctttgccatgcctgtcagttagggaaacacactcgtcttccttttaataagtccacttccagtacctcttctccttttgaacttgtgcactgcgatgtatggacttctcctgttatgagcatttctggcttcaaattttatttagtgatggttgaagattttactcattttagttggacgtttcctcttcgccacaaatcccatgttcatcgccatatcgttgagttcgttgagtatgcccacacacagttcggccaccgcctcaagtgtctccaagccgacaacggtaccgagtttgttaatcacaacaccacctccttcctcactggtagaggttccctgttacggttctcctgcccatatacttccccacagaacggcaaggccgaaagcatgattcgcaccctcaacaactctgtctgcaccctctcctacaagccttcatgccaccctcctattgggccgaaggtctagccaccgccacatacctcctgaaccgtcgaccatcgtcctcagtaaacaactccatcccattccagcttcttcatcgcaagattcccgattattccatgttacatgtgtttgggtgtttatgctatcctaaccttagtgccactgctgcccacaaacttgcacctcgctccgccgtttgcgtctttcttggttacccctcctcgcacaaaggttatcgatgcctcaacatatccacccgccgcatcattattttgcgccatgtcatttttgatgagacagtttccattttcgggagatcttgtcgatgcttcctctttggactttctactgcagggtgctactgctccttctgtggtcgctccaccactggctggtgttgagcagccgcacgctccattccctgtgaacgtcgagcagcggctgcccacgggtgctccctcggctgaggacgagcacctgccctactacatgtagcgcaccacactgcgggcgggacgatgccaagttccatgcagccggctgccgcgtctccatcttcctcaaggagggcgccgtcgtcaccagctgtccggccgcccacatcttcttcacgaccagccggcacgttggagccattcccgtaccactaccaacgacgactggcgctgactcctccgccccaagtcgtcgctccggctgcacccgcacctcctccacaagtccacaccatggtgacgcgctccaagaccggttctctcaagccagtggatcgactcgtgctctcggtgtcccacaacgccatttctccactgtcggccaactaccgctctgccctcgccgaccccaactggcgtgctgccatggccgaagagttcaaggctttgatcgataacggcacgtggcgcctcgtccctcgcccacctggcgcaaacgtcgttaccggcaagtggatcttcaagcacaagttccactccgatggctcgctcgcccgtcacaaggcaagatgggttgttcgtggctactcccagcaacacgacatcgactacaacgagaccttcagccccgtcgtcaagccctctaccattcgtgtcgtcctcagcatcaccacctcccgctcctggccgattaatcaacttgatgtgaagaacgcctttctccacggcaccctcgatgagacggtgtattgccagtagccatccggcttcatcgacccccctgcttccgacgctgtgtgcctcctccagcgctccctctacggcctcaagcaagcgcctcgagcttggtaccaacggttcgctagatatattcgtcagctgggtttcatgccatcggccttcgacacatcgctcttcatcttccgggacggtgatcgcctcgcctacctgttgctctacgtcgacgacatcatcctcacggcctcctctgctgatcttcttcgccacatcacggctcggctgcacaatgagttcgccatgacggatcttggtgacctccatttcttcctcggcatctctatccgccgcacacccaacggcctcttcctgtcccagcgatagtacgccgtcgaccttctgtagcgagccggcatgtctgaatgccacctcggttgatgctcgcgccaagctcaccgcctcggagggtgctcctgtcgccgatccttatgagtacaggagcctcgccggtgcgctccagtatctcaccctcacccgtcctgagatcgcctatgccgttcaacaggtgtgtctcttcatgcataacccccacgagcctcacctcgccttggttaaacgcatcccgcgctacatcaagggctcactctccgccagcctccacatcggtaccggtccggtcgggtctctgatcgcctactccgacgcagattgggccggctgccccgactcgtcgctccacctccggctactgcatcttcctcggcgacaacctggtgtcttggtcctccaagcgtcagacgacggtctcccgatccagcgccgaggcggagtatcgtgccgttgctcacgcggttgccgagtgttgttggctccgccagctactccaggagctgcatgctcccatctccaccgcgaccgtcgtcttttgtgacaacgtcagtgctgtctacatgaccgccaacccgattcaccaccccacaccaagtacattgagatcgacatccactttgttcgggaaaaggtggctctgggacaggtccgtgtgctccatgttccgtctacacatcagttcgccgatatcatgaccaagggcttgcctgtgcagttatttacagattttcggtccagcctttgcgtccgtgagcctcccgctgcgactgcgggcgggtattaggaatactttgccatatatgtacagattgtattgtattgtctctttccttgtattctcctctaattgaggatcatgtacatgtgcttcctatatcaatgcatggccacccctcccattgggtgtgaggtgttctccccattccattctacactttgaaacaaagcattagatcatcaataaaattagcaatggtaggggaaattttttttagttggctgagctagctacctgccttgctcccacagcatgctgtctaacctggccttcccctgctccttatcatggtacctcacgttgtgcatgtgcgcgcatggtttcttccacatgtacattagggccatgtcggatgctgttcttgcacattatcctttaatttgtcacaataaaaatcatgggttttcctttgtcagaggatgtgaaatcaatgctgtaacagacaggcaaaagcaagaaaaggataaccagagagctaaagtaaggagcatagtactaacctaaagaaatactcaaagaatggaatagtaccgtgccttcctggttgcctaggctgggacaacaagccagcacggctcaactcggtccagctagtttagataatgagctgtctcggcttctaaatgatctctcatttatgcgaaaaaataggaatataggaagtccccatctttattttgcctcaccttctgcaggatgtgttggtgttggatatcactttttttaaaaaaaaattttgcaatgatgcaatgttcctttcctgtgtgcaggtttcttccacatgtacatcatggcagatgtaggtattccatttggtgttgtcacaacaaattaaagttgggagagcaccaccaatgtgaggacccggcttgtttaatggatgaatgaattaacatgcacgtttctcaaacttctaaacagtgagattgttgcaaaaatattctatatatgaatttcttatgatattgttttgaatccatttcccatcttcataatagttatctaattcctttgtacccttgaatagttattggaaatcattcagttatttagctattcggcc

SEQ ID NO: 9553 - DNA, 2128 bp, Oryza sativa
  ref <308>: DATABASE ACCESSION NUMBER: AK106901
  ref <309>: DATABASE ENTRY DATE: 2002-08-28
accctgcatcctcctcgatcacgaattcctcgtgatgccgcctcctcaccctgcgcctcaccgcctccaccacgtcggcctccaccgccacctgtctcagccccgcgcgccgattcctcgcctgccaccgcctgtacgtctccggccgctccacccgctccgccccttccccggcgatcacccccaccgccgcccgcctcagcacgtccctctccagcaccgcccgcaggtggctcccctcctccggcgtcgtcgcgtccagcatgtcgaacagcgccgagaagaagaagagcgcctcccggaacctcgtcgggaagaagggcgcgccgtgggcgccgttcaccacggcctggacgaacaccgccgggcgcatgtcgcggatgctgccgaggaccgtgtcccgagggctcgggtcgtcgaacacgccgctctcgtccatcagggtgcccaggctgagcacgtcgttcacgacgaccgccgcctcgtcgtggtcgacgccgacgacgtcctcggcggtgaccgtctcccacctcgccgccgccacggcgcggaacttgaatgggagcccgaacgcgcgcgcgcagttgctgagccggcgccccgtcctctcgagccgtcgggctggccggaaacctggctgcgggtggccgacgagcgtcatcctcacctccggtggcccgccttccctctccgccagccgctgcagcaaggatggccactggaggccgtggtactgaccgccgtagtccacgatgtgcaccttgctcctcccttccgccgcgcggaggatggccatgttggcgaacgtgaacgccacccacttgaagcagcacgccgccatgaacacctggtacgcttccagcaactccatggccgacgcgcgctcctccgcggacgcgagcagccggtgctccaggctcgccgcgccggccagccgcgcctccaggccgtcggcgaagtaatgcgccagccgctcggtggcgtcccctgtcggcgacgagtgccgcttgatctgctccaggagttcgccggcgctccggcggttgcccgatgccaccgcctgcgcgcacgacatgagcagctcgcgcaggtccaccacctcccccttgccctgcctcctcttccgccgcgccgccttcccgccgtttttctccgcggggacgcgtggcgcgttcatctcctcgtccccgttgagcatcatcttctccaacatctcgccgacgccatcgtcgtcgtcgtcctcctcctccggcgtggccatcagtttgctcgccctgcccacctcggcctccagctcgtccccgccatgcttactacccttccgtcccctaccattgccgctcccctgcatcatcaaggcagcagaatcctccatgggtgcactgttcacctcaccggcgatgccggaggaggaggagaggatctgggcgaacggctgctgcgcctcgaggagagcggggtggtcggggtacaggcagaagaacatgtcgtcgtcgatgtcctcctccatgagaatacgcgagatgtacgggagcaccacatcgtcggccgccgcggcggcttcggacggcggcgcggctggccccatgaactccagcaacgcagcgccccaagaaaacacgaactcctctcatcaccggagtgccatatgatgtactaggtggtttccatgcttacattggagtcatcgatcagctaatcagccagcgtatcgacatggctgtggctgatggcatcaggcatcagctgaacataggcatcatctaagctcattgataaatgcgatgcgaccaacacacataagaactgacgttgtcaatcagatcatcagttttgttctctgaaaaggaaattttgttacgtttgttgtatggatagtgaaagttacaacttacaagtgacaaaaaggaaggaactctagcatcagaaacaaagccagcacctcatctgcttgttgaatttttcagacgaatatgcagcaacaaaccagccgtccagatcaaacccaactcatcctggcgagcagaacacgatgtagagaaatggacaaacttgtattgtgcatctgtgtactatgtttaccatgtcaacttgaggcaattctatataaatcctgtcaatttgagcg

SEQ ID NO: 9554 - DNA, 1945 bp, Oryza sativa
  ref <308>: DATABASE ACCESSION NUMBER: AK106902
  ref <309>: DATABASE ENTRY DATE: 2002-08-28
accccgactccccgaagcactaggccctagaagcggggggcacgcggcgccagagccaccgactccgccggcggcggccggatccggcgagcttgcggcgccaggctagggctcctcctcgccgtcgtcgtcgaccggcggctaatccaccagcgcctgggtgatcggtgagtcggctcttcgtttcttgccgcgcggtgcccttcgcccgccacctgttcgacggaatgcctcctaggcgaaggggctcgagaggcgaggagatggcggaggccagcaaggagggcgggatcaacgccctccccgacgagctcctccagcacgtcctgtccttgctgtcagccgatgaggccgtcaagacctgcgtcctgtcccggcgatggcgccacctctggagatccacggacgtcctgcgccttgatgctgataaggagagatggaagagctccaagcggttcaagaagtttgtcaaccatctagtgctcttccggggctgctcgcctctacgcgagtttgatttggaattcagttcatgtcgagagaaggatgaaaagggtgaagacagtgacgaggatgaatcagacgatgacagaggtgaggatgaatcagatgaagacagtgatggcgatgaatcagatgaacacagtgacgacggtgaatcagatgacgacagtgacgaggacgaagacagtaatccattccaatgtgtcatgatgtgggtcatgtatgctctaatatgccaagttcaggtgctcaaaatccacaacttcaatgaaagatacattgaaatagatggcggcatgcctctcgtctcacagcacttgactaagatagaactttctggtatagtgttaaaggattgttttcttaacttctcaagctgtcccgcattgaaagagctatatttcaccaagaattgctgctttgactctgtcaagaagatcttcttccagtcaatgcaatgccttcggatcttctgttgtcaattcagtgaatatcaccgcacactcatttatgcaccaagcctcattaggctctttcttgaaggtttttggggcagaactccttttctggaaagaatgccctcattagttgaagcatctgtcagaccccaccaggattgtgatgactggtgtagtaatacttacactggtaattgtgaagatgaagactgtgatggttgtcatggtatgatagataagatcggcaacagttccaattgtgtgctccttggaggtctatcagaagctaagagtttgaagttgatagctggacctgaaataattatttttggaagtgatttgagatggtgccctatgtttagcaagctgaagaatttgttactcaatgagtggtgtcttctgtctaatttctgggcactagcctgtattcttgaacactcaccagttctacggaagctcactcttcaaatttccaaggaagctaaatctatgatgcaaacagaagagaatgacaatccattgcggaaaccagctgcaatatctgaacaccttaaggtagtgaaagtccactgtaaagaagttgatgaggtggtttacaaaattgggaagtggttgagtacattggacataaaagttcttatcaaacggaggaatcaatcaccaaaacgtttctgttcaagtaaggtctaaaaactggattgtccatggatctacaggtctaaaatggtttcaccgcgttggtgcttactgcttaatttgctgtgacaactgagaaggttgccattttctgtctgtaggtgtcatatgtcagttccagtcatattgacagttggaaatataagtcagaatttgtaattgtagggccctaaaaaaaaggatttggaagtgcaggtaatctatgggtttctggtttgataaatctgctacctttaacatgtctagctctgtgaacattgctccgtctgaaatgtttgatagtatgc

SEQ ID NO: 9555 - DNA, 1705 bp, Oryza sativa
  ref <308>: DATABASE ACCESSION NUMBER: AK106903
  ref <309>: DATABASE ENTRY DATE: 2002-08-28
acaaccacttttccgcatctctctctctctcgcgtctcaagagcagcggcaaaggtgagagcaaagcaagttccgctatgggtaacagccttcctgtagaatcgaagttcacttttgaagaagagaatgacagaattaagtatgttgtgtcgtctatgcaaggatggggtgagaaaatggaagatgctcatgcagctattctaaatcttgatgatgccacgtccacgtctttctttggtgtttatgatggccatggaggagctgaagtagcattgtattgcgcaaaacaatttcacattgagctatgcaatcatgaagactatcacaacgatctgattaatgcactggacaatgtgtttttaagcatggatgagaacctgcaacagtccgatgcttggagagagttagttattcctcatgataatggatgtatgtattttctcaaggctggtgtctgtgctaagcctttcccacaggcgacatatactgggccagcgtatgaagggagcacagcatgtgtggttgtcatcagaggtaaccaaatgattgttggacatgttggtgattctcgttgcgtactctcaagacagggtggcctggctattgatttatccttcgatcacaaaccatgcacaagaactgagtctgaaagagagagagttcaaaatgcaggagggagatctcttggacttaggtgtgaacaagtaatggggaattatgtagtcaaggaacaatgggtcctcggtgattttgggggaggtgtaacaatctcaagatcaattggtgactttgctttcaagaagaacaaagatttagatcgtgaaaaacaaatgctggtatgtgatccggacatcctcgctgatgacataactgatgacatggagtttcttgttattgcaagtcaaggtctctggtcttgcgtggacagtgcggacgtggtttcttacatacatgaccgtttatcggtggagggtgcagagctgcgtgtcatctgtgaggaggttgttgagttcggcttggcatcgggcgagaacactaccgtcatcctggttcagttcaagcccggcgccttccagtaccagctggtggatcccgctggatttggcactgccgtctctaacattgccagcaccagtgctgcgccggctggtgccagcgacacaagcgacgagggcgtcatggccgactcctgcgccacggctgacaccagcggcagtgccagggctgagagcggcgagctcgtccccactcccagcgccaacaacaccgtcacggatgaggtcgatcccactggcactgtcgcagccgacgacaaggtcgatcccaactccagcgccaatgccgacgctgacgacggcgctcccaaaccttctctcggcgcagtcatcgagtccgacgaggtcgccctcgatgccactgcaacgggccatcaggtggccgtgcgtcagcaggaggaattcgacccaaagaagtgttggatctgcggaaaaggctacaagaagattcttcttgaaccttcttcggccagggcgagaaacccacttctggctcacgctaagacgtgtgagtcggaagacaagaaggcgaagaagaagataaccaagtatatgatgaaagccaacgtcaccaaccagtatcattgatactgtacgttaactacttgcacctgtacgttaactactttgcttttggtgaagttttcctc

SEQ ID NO: 9556 - DNA, 1497 bp, Oryza sativa
  ref <308>: DATABASE ACCESSION NUMBER: AK106904
  ref <309>: DATABASE ENTRY DATE: 2002-08-28
attgctgccctcctctccgtcttcctcctccctcctctgtcgcctgttcttcttcttctcacgatttttttcccctgtaaatttcccggcggcttctcgcatctcgttcatcgtcgtcgtctgctcgcgacttgacggacgaggaggaggaagaagggagcgattggtttggacggtaagaaagggagggacgcgcgggcggccggagccggtggccgacggccattttttcatgcgtggctccctggaggtccacgcgattggcagacacgccgcgtcgccgtgcgccctgagactgaaagccctcccggcattggacatgatgaggtaccaaaggcttagcccggactgcctcccgctagccaacggcggcggcggaggaagcggtagcgtgacacggaagccggcgtcgagatcctgcaaggacgacgatggcggcatggccgtcgccgcggacagctcccgcctctcgtcgtacctcccgtcgtcacagctcgattccaagccgctgcgcgctcgggcgccgcagccgtcgtcctcgtcggccgccgcctggagcccggcgcgcgaccacgcgcacgcccaccacaaccaccaccaccaccaccacccgtccgactcctccgacacggcctcgccgagctccaacggcgcgggcaccggtggcgacgtgctgctgcagtgggggcacaacaagcggtcccgctgccggcgcgacgcgtcctcctcggccaacgcggctccctcctcctcgcagcgccgccagaccgcctccgccgccggcaagatcctgcgccgctcgtcggcgccggcggagaagctcatgccgccgccgcccccatccaccaccaccgggtcgtacacgcgcgggtccaacctgaggtccgcttcgtccttcccgacgcggtccgccgccgccgccgccgtcggagacgcacaccaccacaggtccgccgtggaggagcgatcaggcggcgggtacaagcggtcgccggacaaggcgcacaagtccgccctggacgcggcgctgcacatggattccaagaacaaccaccatcaccaccaccacgactcgtcggtgaccgcaaacggcggcgccggcgccggcgagaagatcggctccgagcggtttgagctgccccggatctacatctcgctgtcgcgcaaggagaaggaggacgacttcttgatcatgaagggcaccaagctgcctcagaggcccaagaagagggccaagaacgtggacaagaccctccaatatgtattccctgggatgtggctttcagacttgacgagaggacggtatgaggtgcgagagaagaaatgtgtgaagaaggtatactccactctgcacctggcattttcagttcatgcattctgtgtatttttacagacaagaagaggaaaattacctagatttagggcatcagtgacccagattggttgggtctaatgcaaaaataaagccgaagagtaggtgaattacttgcccttttc

SEQ ID NO: 9557 - DNA, 1635 bp, Oryza sativa
  ref <308>: DATABASE ACCESSION NUMBER: AK106905
  ref <309>: DATABASE ENTRY DATE: 2002-08-28
gcggagtgggaaaccccaaaacccccacgtcctcctcctccgccgccgccgccgccaccgtcgccgtcgacgagccatgccgccgcggaagcgcccgccgccgccggccaaggcgccggaagccccaccggaaaccaagcccaagatctctccgcccgctaaacccatcgccgcggcgccgccgccgccgaaggcggtcctctcggacaccgtcctcgccgccttgtcgcagcacgagcgccccatctacaagcccgtgttcgccggcggggacaagggcatgtcgcagacggagatccggatcaagaccgggatgccgacgagcaccctcaccaagcacctccgcgacctcagggcagggagggtgtgctaccggaggggcggcccggtgcagggcggcatgatggagaggatcccgtgtggagtttgccccaggatcgatgagtgctcgccggatggcgttatctcgccgagcacctgcgtctactacaagaagtggctgcagatggacttctaggtgctttaatcttctgtgtagcaagctgatcaactaacatgtattcagagaaatgggacaagctgctgataggctaattcatgaaaataattgttttgtccaagaacatgggagttgacatattcttcttttatggtttgtactgtcatttggcttacatgttagttgtgtcatcatcttcatcactcatcagtctcaaatcaccttaagatgtgtgcactgcatctgaaggtgatgcactcttatgacttataagttgtgagtctttcatagaactatccacaattccatattattcatattgatgcactgttggcgaatcctagattttgcttccaacttggaggttgagttccatgcttgcttctgtccatactaggtgactgaatcttatgttactgcaaataaaatctcgaggtaatttgcattttatctggtaaatatacaaccgggtgtccttcataaaggatttttctgacaatgcttaacttgtgttgcatcctggagcatcatttgcagccatttctgaaggtgagtaagtgacttccattggaattcaatcaaaatttgaaaagcgacatctgatgaagatctcagacgcctttaaagtgacaagctccacgttgggcgttttcttgtacgcttctatggttgtgctgggccaagcgcaaggaagagcaacagtctgagtcaggtcatgtctcatgcctcctgctgctgctgcattgtcaaaccgggagaaagtgatggccatctctgaaacaagcttacctgctaatctttagcaatgagcgcgatctgcacctggcggctgtgtttaatttgcctttgcattgcatacatattgaagcagctccgaagctacggaaaaagtgcggttgctttaggttaatcttcgctcaccagtgacgttttttattccgatttaacccgtgttgtgtagtatttgttagtgcttggttatatatgtcaactttgaggtgcagttctgggtgaaaacggaaatactgtattttccatcagctgtaggcttctcatttggttctgaccacatgtgctgtgtacgcatatgaactacttgttgcaaattgcaatatggggtattgacttttgtcatc

SEQ ID NO: 9558 - DNA, 1520 bp, Oryza sativa
  ref <308>: DATABASE ACCESSION NUMBER: AK106906
  ref <309>: DATABASE ENTRY DATE: 2002-08-28
tggcgtcgtcgtcgtcctcccgtctcgtgccattcgccgcagagtccccaacctccactcccctcctcgcccgtctccaatggatggccatcagttcgggccatggaacctcttgcccgacgacatcctggagttgctggtcggccgcaacctgtgcgagatcgaccgcctccacgcgcgccgcgtctgccactcctggcgcgcggcgttcgcgaggatcgagcccccgccgccgcctccaccgctgccgttgctcctcctcccggaagccgacgacaacgagcacggtcttgccttctcctgcgtcctcagcggctgggacgcccaccccttcttcctcccgcgcgccgcgcggcaccgcgtccgctgcttcggctcgtgcgatggcgtctggctcttcctcgccatggaggacggcctgcaaggcgaccgagctcgagaccacgtcctcgtcaacctccacagcttccagttcctcgacctccccaacgtgatccgcctcgaccacacgttcccgcaattgatgaaggacatcgagatcgcgatcgtcgccgtcacgctctcgcgccagccaacccagcaaggatgcgtcgccgccggcatcatcgagctccctcccttccccatcggagtgcggccgttcgcgttctggcgcatgggggatcgggtgatcttgcctttctacgaagacgtgttcggggatcaagcagtagaggacgtcatataccacaacggctacttcctcttcctcacccaggacgaacacattcgtgtgtgccaagagccggtcttccacgacaccaacgtggacgtggactcgatcctgttgcgattcgagccgcgcgtcgacgacggcgacgccgtccttgctcgctacctcgtgctgtgccgggggaaggtgctcatggtcgtcaggttgggctgtccacatcgccgctcgccgacgtcggcgttccgggtgttcgagagagtggactatctggtggtgaacgccggcgtggtcgaggtgcttgagcacacctggagcgagattgacgagctcggcggcaggatgctgttcctcgggcgaggctgctccagatcctacgaggaggccgatgggtatcccggcatggagggcgtctacttcttggatgaccggagcttccgtgacccgatcttccacgacccggacatggtgttcgatcacacctaccattgctgcgacaatggcagatggtagaaatcaccgttcaatgtcgatcgccgcttcccggagcgaggccggtcgaaaatctctcctccggtttggattctcccttgaagaaattaacgaacaggggttagttcaacaggtcaagttagtttgtgattgtttgtttcttctttctgagaatctgagttcgatggtgttctcgtgttcaaattgttgctgattagtagtagatataatttgcctgcatttctttgtggtgcaaagctgaaggcagaacccgtttagtgctgaattgctacagacgatacttgccgttgattcagtg

SEQ ID NO: 9559 - DNA, 1557 bp, Oryza sativa
  ref <308>: DATABASE ACCESSION NUMBER: AK106907
  ref <309>: DATABASE ENTRY DATE: 2002-08-28
atctttgcaacatgttttctcctctccctgtcactgttcttgttagcattgctgcattggcgttcatctccggcgatgcaaccatcgtccatgagccagttgctgctgctgctgcaccttcttctgacgaggctgattccatcgacggcggcggtggcggattttctctccccctcgttcgccggaggtccaccaccaccaccaccatgatcgacgttgccaaaaaggagatccagcttgccaccgccatcgccgccggagacaagaagctcctcgtgccgttgtacggccggccacaaggtggcagcacctacctcgtgcagctccgcatcggcacgcccacggaccggatctcgccgaggtacgtcctgttcgacaccggcagcgacctctcgtggacgcagtgcgagccctgcaccaactgctcctccttcaccccgtacccgccccacgatccgtccaagtcccgcacgttccgccgcctctcctgcttcgacccgatgtgcgagttgtgcaccgccgtcgtcgatggcggaggcggatctgcagggtgcctgttcaggcggcgctacggcgacggcggcgccgtgtcaggcgagctcgtgtcggacgtcttccacttcggcgcggcaggcgacggcggcgggtaccagctcgagcgggacgtcgcgttcggctgcgcgcacgtcgaggattccaaggctgtcaggggttacagcaccggcatcctcgcgcttggcatcggcaagccgtcgttcgtgacgcagctgggtgtggataggttctcgtactgcatcccagcatcagagataaccgacgacgacgacgacgacgacgacgacgaggagagatcggcgagcttcctccggtttggttctcacgcaagaatgacagggaagagggccccgttcaagcaggacggcagcggctacgccgttcgcctgaagagcgtggtgtaccagcacggcggtcgcctgaatcagcagcaacctgtacccgtatatgttgccggagaagaagcagcagcagccatgccgatgctggtggactccggaacgacgctgctctggctaccgggcagcgtcttctaccctctgcagaggaggatcgaggaggacatctctctcaccaggaggtacgacctcacgcatccaagcctctactgctacctcggaaacatgacggatgtcgaggcggtttcagtgacgctcggcttcggtggaggcgcggatctcgagctgtttggcacttcgctgttcttcactgacgagaatttaacagaagactgggtttgtctagctgttgctgcggggaacagggcgatactgggagtgtatcctcagcgtaacatcaacgtcgggtatgatctgtccaccatggagatagcgtttgatcgtgatcagtgtgatcgtgtgtagtggtagctgatgtttgttaatatttttcatgctgtcgctctgcatttcagctcctctctaatgttagtctgtatgaacagaagttagcagccactatcagtgagaaatcattatttttatacattatattccctttctt

SEQ ID NO: 9560 - DNA, 813 bp, Oryza sativa
  ref <308>: DATABASE ACCESSION NUMBER: AK106908
  ref <309>: DATABASE ENTRY DATE: 2002-08-28
tggcctaaaaaatcgccgggggaaaaaaaataaaaaagagaggaggcggtggaggctgcggcagagtaacagactcggcgcctccctcctctcgctgtggatctgcggcggcgagccggcggcgaagcaagcagcgcggcgcggatcctcgggcggcgaggtcgttcgcacaatctcgctcatccgtcgcggcgattccatgagaggttgagagctttgcactgaagaagtgggggatattctgatctgctcagctaaagggggttgcagctaaacatggcggcggcattagcatggcggttcaatggaaccaatggaggcgcagatctggttggtgctctccccggtgctgtagttctgagctagtagaattgcagcatgtcactttcttagcgtcgcttgaattgtaagagtgctgtcgtctacgttaacggagttatttggattgcgtttgtttctgatgtggacatcatgggggtgaaacgttgaatagtatagcagtaggatatgctttgaaagtgagatcagtgttcggtctacttgagaaaaagatgtccatgcatatttgtcaatttttaagcgttggggatcttcatttcagctgcattttttaaagcttttgcgctaggcctatctatcaacttgggtatacaatcagtttgcaacaatgaggtcatgaactaggaatctgttactcttatgctgtcattttttctgtagtaacaaaatgagaatatcatgcttctgggtcattcgtgtttatgctggtaatggaacaaaaatggattggatggctttgtaatgctgttctac

SEQ ID NO: 9561 - DNA, 1569 bp, Oryza sativa
  ref <308>: DATABASE ACCESSION NUMBER: AK106909
  ref <309>: DATABASE ENTRY DATE: 2002-08-28
ggcgctgcaagacagacagatacatcgatcgatcgatcagagctttttctatcatcattagctagcaagatgaagcagtactacaaagcagcgctgcttcgctactgggtagtagtcccgttcctcctgtggctggtagccacggaggagcaactcgccgccggcgccgtggccggggcagctgccgagtcgtcgtcgacttggggcggccagggccagctgcagctgcctctctgggtgcgacccggagaccggcgcctcctggggatgtctgtggccggcatggcggtggatgccgtcgtggcggccgacggcaccggccagtacactaccatcaagcaagccgtgaaggcagcagaggcggacacgagcgggcgccggtacacaatccatgtgaaagctggcaagtacgtcgaagacgttgagatatggaggcctaatattaccatgataggcgacgggatcgggcgtaccataatcagcggcatgaagagcaaaaacaagaatcgggggacggcctgtacgggcacactgaacgtgcaaaaggacgggttcatcgcgcgagagcttacggtggagaacaccgcggggccgcaggcaatgcaggcggcggcggtggtggtgaagtcggatcgcgccgtcttcttcaggtgcgagataacgggttaccaggacacgctgctggcagatgtttacaggcagttctacagggaatgtgttatctccgggacaattgatttcgtgtggggcgaggcgacggccgtcttccagatgtgccacctcctggtgcgtcgcccgttggagggctcccacaacaccatcaccgcgcaagggcgcaaccactccgagcccgtcgtcgcacgctcgggtttcgtatttcaggagtgcaacgtgtcgaccaaggaggacctgaggggcgtggacacctacctgggccgcccctggcacccggactcccgcgtcatcttcatgtcgtcctacttggacggcaacgtggtcaatcccaagggatgggtggcgtggcgcatcaacaacgccaccgacgagcgctccaccgccagcaccgtctactacgcggagtacaacaacactggggctggggccaacgtcacccagcgtgttaactggcatggtttccaccttcttgcaccacacgaggtacgcaatttcaccgttgacagcttcatcgacggtggcagttggctgccagagaccaacgtcccgtaccatctcgatctcgatctcggtctgtaataatacctgctactctctttatttactgtttgcctgcctatatttgcttggtattggtattgtatcatcgatctcgatgtgctagctcctgtgtgtgtagtatgccatggtttgtacgtaactggtactgtatgatgcatgcgtgctcctgtgtgtgtgtgtatatgcgatatgatggtttgtaactggtactgtatgatctcgatgtgctccgatgtggctgtgtgtattgcgatggttaatggtttgtaacttaattttctttctttatgcactgtctgaacgaggaataagcactgtatatatgtttgtatt

SEQ ID NO: 9562 - DNA, 816 bp, Oryza sativa
  ref <308>: DATABASE ACCESSION NUMBER: AK106910
  ref <309>: DATABASE ENTRY DATE: 2002-08-28
aagtgctcaaaccctctcaagtttcatcatcacccaacacaatcgcaagcagctagcaacagggccaacccgacgaacgtgagatggcggcagccgtagaggaggccttcccgatcgggttcacgaaggggatacggtcctactggcgaagccgcaagtaccatagcgtggacagcagcgcggcgggccgcggcacgagcaacctggtgcggctcgggggcggaagcggcagcggcagcgacggcggggcgtgggccgtgcggctgggaggcatgttccgcgcgcgcgtcaaggcggcggcgcccgcggcgacgacgaccgccgtggcgaaggtacccgcgcgcgtgctggggcgggtacgggacgcgtacgtggacgccatggtcggcgtggccaagaagcaggcggccgcggcgctgtcgcagccgggagccgggacgacggaggcgctgtggcagaagcgcgtgccggtacgacggtcgcgcgggcagagcaagaagcagctgcggcagaaggcggacgagctcgggcagagactggtcatggagatgtacaagtccgtcctcgcgtcgagggacctctccagcatgctccaggcatcaagggcgcaatagcatgcaacactacatcgtgcaaaagtgatgcatccgcgcaagcttaacgtgaactaacggctgtatataaggagatgtacatatgtttgttgcacaatatgcatggccagaccggctagaagacacttattagacgctcataacccttggattccctttcatccctagaaaagaaaatccgtgttcccttctgttgcttttt

SEQ ID NO: 9563 - DNA, 1659 bp, Oryza sativa
  ref <308>: DATABASE ACCESSION NUMBER: AK106911
  ref <309>: DATABASE ENTRY DATE: 2002-08-28
ctgctccggggaggggtgcgccgggtcggccatcctcgccgggttcgacgacgccgtcgccgacggcgtcgacgtcatctccgtctccctcggcgcgtcgccctacttccgcccggacttctccgacgaccccatcgccatcggctcgttccacgccgtggccaagggcatcatggtcgtctgctccgccggcaacgcagggccggacgccgccaccgtcgtgaacgcggcgccgtggatccttaccgtcgcggcgagcacgatcgaccgctacttccaatcggacgtcgtgctcggcggcaacaacaccgctgtcaagggtggagctataaacttctccaacttgaacaaatcaccaaaatacccattgatcaccggtgaatcagccaagtccagctcagtttctgataccgagtcagcaagtcactgtgagccggggacgctggatgcgagcaagataaaagggaagatcgtgctgtgtcaccactcgcggaacagcgacacgcccaagacggagaaggtcggggagctcaagagcgccggcgcggttggcgccgtcctcgtcgacgaccttgagaaggccgtcgccaccgcctacatcgacttccctgtcacggagatcacctccaacgccgccgccgacattcacaagtatatctcctccaccagtgagcctgtcgtgaccatcacgccgacgatcaccgtgacggagtacaagccggcgccggtggtcgcccacttctcctcgagaggcccgtcgccgcagacgcccaacatcctcaagccggacgtggcggcgccgggggtgaacatcctggcgtcatggatcccgacgtcgacgctcccggccggcgaggagaagccgtcgcagttcaacctcgtgccggggacgtccatggcctgcccgcacgtggccggggcggcggccgccgtcagggcgtggaacccggcgtggagccctgcggcgatccggtcggcgatcatgacgacggcggcccagctgaacaacgacggggcggccgtgacgaccgactcggggtcgccggcgacgccgtacgaccacggcgcgggccaggtgaacccggccgccgcgctggacgccgggctggtgtacgagctcggcgaggaggactacctccagttcctctgcgactacggctacgacgcgtcccagatcaagctggtcgccgcctccctccccggcggcttcagctgcggcgccggcggcaacgccagcgacagcaaggacctcatctccggcctcaactacccgtcgatcgccgtcacggggctcggcaaggccggcggcaccaggacggtgagccgcgtcgtcaccaacgtcggcgcgcagcaggaggcgacctacaccgtcgccgtcgcggcgccggccggcctggacgtgaaggtggtgcccggcaagctggagttcactaagagcgtgaagaagctgggtttccaggtgtccttctccggcaagaacgccgcggcggcggccaaaggggacctgtttgggtcaataacgtggtcggatggaaagcatacagttcgtagcccattcgttgtcaccatctgagagtgagatcacacacatcagtgtgcaagagagagcacttgtgtatttctaatgaaatatgggactgtctagatgacatatgacag

SEQ ID NO: 9564 - DNA, 1640 bp, Oryza sativa
  ref <308>: DATABASE ACCESSION NUMBER: AK106912
  ref <309>: DATABASE ENTRY DATE: 2002-08-28
taaataggtaggacggcgcggctgctccggtgagccgcgccacggaatcgggagctccaagtgggccatttttggtaagcagaactggcgatgcgggatgaaccggaagcctggttacggtgccgaactgcgcgctaacctagaacccacaaagggtgttggtcgattaagacagcaggacggtggtcatggaagtcgaaatccgctaaggagtgtgtaacaactcacctgccgaatcaactagccccgaaaatggatggcgctgaagcgcgcgacccacaccaggccatctgggcgagcgccatgccccgatgagtaggagggcgcggcggccgccgcaaaacccggggcgcgagcccgggcggagcggccgtcggtgcagatcttggtggtagtagcaaatattcaaatgagaactttgaaggccgaagaggagtaaggttccatgtgaacggcacttgcacatgggtaagccgatcctaagggacggggtaaccccggcagagagcgcgaccacgcgcgtgccccgaaagggaatcgggttaagatttcccgagccgggacgtggcggttgacggcgacgttaggaagtccggagacgccggcgggggcctcgggaagagttatcttttctgcttaacggcccgccaaccctggaaacggttcagccggaggtagggtccagcggccggaagagcaccgcacgtcgcgcggtgtccggtgcgcccccggcggcccttgaaaatccggaggaccgagtaccgtccacgcccggtcgtactcataaccgcatcaggtctccaaggtgaacagcctctggccaatggaacaatgtaggcaagggaagtcggcaaaacggatccgtaacttcgggaaaaggattggctctgagggctgggctcgggggtcccggccccgaacccgtcggctgccggcggactgctcgagctgctcgcgcggcgagagcgggccgccgcgtgccggccgggggacggaccgggaacggccccctcgggggccttccccgggcgtcgaacagccgactcagaactggtacggacaaggggaatccgactgtttaattaaaacaaagcattgcgatggtcctcgcggatgctgacgcaatgtgatttctgcccagtgctctgaatcctttgcagacgacttaaatacgcgacggggcattgtaagtggcagagtggccttgctgccacgatccactgagatccagccccgcgtcgcacggattcgtcattgcagcaaccatggcttcgcctctatctgctctagcacctctgatcccgcccgctccgcaggtgccagtgccagtgccactgcttcctcctcctcttcccgtgccggtgccgtcgccgctgaactccggcttgcagaaactgtagtcgaggttcttgtgctgcggttggcttgttctcatgctgctgctgctgctgcccaccaaagcgtgagctaggatacctcttctgtagcagcggttgcagccttgcaggactgaagaaggtgacggggctgaggaatcagtcatatatccgctgctgatcgatgcattgacgctgtcgcacctgcaggctatactctgttgcggatatatgatttctgtgtttctaaaccgttaagtcgtt

SEQ ID NO: 9565 - DNA, 1950 bp, Oryza sativa
  ref <308>: DATABASE ACCESSION NUMBER: AK106913
  ref <309>: DATABASE ENTRY DATE: 2002-08-28
ctatcgctctccccttcccacgacgcttccgtggctcctcctcctcacgccctcgctgcgtcgccgccgttgcccgccctcctcgcagcgccgccgccgccacccgctctcctcgctgcgtcgccgtcgcctgctcctctcacacccagctggatcgccgtgccttcttctcgccgtcgtggtgagcttgtgggggtcggatgatgagctcgccatggcggagaccaaccaccacctcttgtgtgctgcattgagttgaccagccgagctttctcggagaaagaaaaaaaaaaggagaagggagaggcatctggttcctccttaacgccgtgggactaaatccggtggagggcaggccgtggtcaccggatctggcagccacgacctcctcgccggcagatccggtcatccggaggcgagggctagcacattgaggttcattgcaagtgtcgacgtcggccgttccttcagagtgatccaggttggcttttggctgtcgaatcagttgatggtgagttcttggtcgcttgatttagcggcaccgggctcgtcgatgacagatcgggcggcgctgaggaggatgaagttcccgtccactcccgcgtcctctgctggaagccttcttcgccgggaggattcctgcgcgggatgcggcggtgctgatcccggtgtacggatcctgggcgtgattcggtgagctgagaactggtttgctgctgctgcggcgtgcgccatggatggcgacgcggatgccgtggtgaatggccgcccgaaatgcaccgcaactcgtgggtggatcttgcggaggagagtccagattttgatttttggttttgtgggtgatctgttccgcaaaagtcggggaggcacgggagcgggcaggcgtgccagatcttaggtgacggagggcgacgtctgcggcttcccggtgtgccgcccctgctatgagtacgagcgaaaggatggcgcccaggcttgcccccagtgcaagaccaagtacaagcgccacaaagaggaggctgacgaactgaagcggcaaggcgaggcgatgaggctagggcctggggatggcgagcacaagtggacctgctgcgtgcacctcgacgctcctccatctatcccgcacacgaaccaccttattttctttctcctccggatttcggccgctcatcctcttccctgggggctgataactggaggtgtgattctgctcgtcagtagcaggaagaattcacacaattttctgttcagcaaggacctcttcttcgtgtattgcttccaccaatcatatttaatgctggctcggataaaagaagtggacacataccttatcgagactcaaagttgacacgcattctccagctttctttgggtggaaatgcaagagcatccatcatctgtaccatgagtccagcgcaaacacatgtagaacaatctagaaatacgtactctattctttgcaacctgtgccaaggcggttacaaataatgcaaaagttaatatggtggtatcagataagcaattggtgaagcaccttcagatagaagttgctagacttgaaactgaactgagaatccctgatcgtgcctcctcttctgagatcattataatggaaaggaacaggaagattagacaggtggaaaaagaaatggaggaactcaagaagcaacgagacaatgcacagtcgaaacttgaattacagaagaagatgggtgataatcagccataaggcttcggggtggccagggggcgacggaggtagcaagcaccctgactggccagcggaaaacgaggaacatatatagcagtggcagcgggagatgtgggagggccagcgccgaagaggatcgtgaagccgacgagccgcgtgaaacacatgcttggagccgatccaagcaaattgctcgattcgtggcatgttttgctgagtctaagcatgacgtacttatc

SEQ ID NO: 9566 - DNA, 1663 bp, Oryza sativa
  ref <308>: DATABASE ACCESSION NUMBER: AK106914
  ref <309>: DATABASE ENTRY DATE: 2002-08-28
taatgcaagctgaaaagatatcgcaacaggctattggctactccactacgaatcctctctttagagttgatacacattcccatcagctctattatccacagagacctctgttcaaaactgtagctgctgattgtcttggtaagagagactatacatctggaagcaaacatgactttgccagaccagagtatttcaatggccaaaatgcaatagtctcaatcagtgtccatcagggatttaaccaagaggattctttggtattgaatagggcctctttagagcgtggcatgtttcgaacacaacattttaagagctataaagcactgatagaaaacaaagagatcaccaaacgattaaaacacaaggaaaatatcaattttggaaaaactcctagcaagaaaggcctggttgacagtttagatattgatggcttaccatatattggagcaagtcttcagagtaatgacattatcattggaaaggtctcagactctggtgaagatcatagcatcaagctgctacatactgaaaaaggaatagtggagaaggttgttctttcagctactgatgatgggacaaattctgcgtttgttactctaagacagactcgctcgccacgcattggagacaagtttgccagcatgcatggccagaaaggagtcattggcttcttggattcccaggagaacttcccttttactcaccaaggcatagttcctgacattgtgatcaatccccatggctttccaactcgtcagactcccggccaacttcttgaagctgcactaggcaaaggaatcgccctcggcggtgccacccggtatgcgacaccgttcacaagtccatctgtggaagtgatcacagagcagctgcacaaggctgggttctccaggtggggaggggagagcgtgatcaacggccgcaccggcgagcgtgcggcgtcgccggtgttcaccggaccgacgttctaccagcggctccaccacatggccgaggacaaggtcaagttccggaacaccggcccggtgcacccgctgacgcggcagccggtggaggaccgccgccggtacggcggcgtcaagttcggcgagatggagcgcgactgcctcctcgcccacggcgccgccgccaacctccacgagcgcctcttcctcctcagcgacgtgtcgcgcctccacgtctgccgccgatgccagcgcgccgccgtcgtcgtgtcgcccgccgtcgccgccgacggcggcggcggccggaaggtgagggggccgtactgcaggttctgcaggtcggcggaggaggtggtgagggtgagcgtgccttatggcgccaagatcctctaccaggagctcttctccatgggcatctgcctcaagttcgacaccgagctcatctagagtagactctcagctttggacgggaaacatcatgatttattcttttaaaaatgggatttttatcattttttaagaacatttttaaggacattttagtctggtgaggagagttgacaatttactccattcattttatattataagacgctttggatttgtcgtaataagtctcttgaatgtcattaaaacctgtattgggatattatccaattggggcaattgtgttcttacccctactttcatatctaattgtgattttacccctcttttct

SEQ ID NO: 9567 - DNA, 2262 bp, Oryza sativa
  ref <308>: DATABASE ACCESSION NUMBER: AK106915
  ref <309>: DATABASE ENTRY DATE: 2002-08-28
caatctaacgctaaatttattgtattaccattctataacttttgtctaacacccctggtttaaaattttcatgtggaacctgctatggattggttgggatattttcatgagatctcttcatcaaagcatgatctgtgctgttattacaatataaatggtgcacgttgctcttgtttacacttatctgtgatttgttaatcttctgttaaacaatttgctccctatgtttgtcctgccctgaaatctggacttgtttagcacaaatggtgcattttctgagacatgtgaatggctttatctctaggtctatggtttaatttggcgtaggttgatttttgattctatacttttgtttccctatcatttgacgctttacacacaaaaaaaaaaacttcaccgttattgactgactggcattgaatatgaagcatctagctgtaatagtttctcagccattagtatggttacgagttgttatgccatactgattgtatttatcctttttttcctggagtgggcaagggaagctgtttttgtttttattcatcctcagtaaaaattttcatctagatcagattatgtttcctttgtttgcaagtgatgtttaaaagagaaaaaaaaataacatgtgggggctaaatcagtgaacaatataaaatttttcatgaaatgctggtgaaaagcagataaggtgtggcttgagcatagtaagttttgacctatagtgaggctgtacaaatcttctgatgtcaatcatcttgataatgataaatgcatgagttcttgcgctttagttcaaagacctccaccctggcgcgctgccgtggcgcctggcgatggcatggtggccgtggacggcacgcagttcgtggtggactgcggcaggacgatcttcttcagcgggttcaacgcgtactggctgatgatgatggcggccgacccggcgctgcgcggcgcagtggcgacggcgttccagcaggcatcggcgcacgggctcaacctggcaagaacgtgggccttcagcgacggcggcgaccagccgctgcagtcgtcgccgggcgtctacaacgagaccatgttccaggggctggactttgtgatcgccgaagcaaggcggcacggtatataccttctcctctgcctgaccaacaactttgacaattttggaggcaagcggcagtacgtgcggtgggcgggggacgccggccacaacctcacctccgacgacgacttcttcaccagcaccatcgtcaagtcctacttcaagaaccacgtcaagacggtgctgacgagggtgaacaccctgacgggcgtggcgtacaaggacgaccccaccatcttcgcctgggagctcatgaacgagccgcgatgctacgccgacccaaccggcgccatggtgcaggcgtgggtggaggagatggcgccgtacgtgaagagcgtcgacggccggcacctggtgacacccgggctggaggggttctacggcgccggcgagcacgagagcaaggagctcaacccgtggggcatctactacggcaccaactacgtcgccacgcaccgcaccgccgccgtcgacttcgccaccatccacctctacccggacgtctggctatggggctccagcgccgacgagcaggccactttcttccggaactggacgcgctcccacattgacgccacggcggcgtacctcggcatgccgcttctcgtcaccgagtacggcaagttcctctggaaggaggtcggcgccaacaaggcgcagaggaactacttcctcgacttggtgctcgacgccatctacgcctcggcatcgcgcggtggcccgctcgtcggcggcgcgttctggcagctgctgctcgacggtgacatcgtcgctggcatggacagcctcagggacgggtacgagatcatactcgccgaggacagccgcgccgcgagcatcatcggcgagcactcggagcagctggctgccctcaatggccaggacgcggatgtgctttgccgccgggcaagctctcaccggaggacgcgtctaagcaactcgcttagctgcggcggcggcgacacccttgaactgctcctccggatggtcttggcttgtttcgtctctttgtccagatcgatctcttcatttattgtacagaatttcattcttttgtgatttgttccatgcatccatcttcatgggtatagctgttcgttggcacatgttgcaactgtaactaggacaaattttcaggatttgttcaagatgattgtcct

SEQ ID NO: 9568 - DNA, 2809 bp, Oryza sativa
  ref <308>: DATABASE ACCESSION NUMBER: AK106916
  ref <309>: DATABASE ENTRY DATE: 2002-08-28
ccgttgattgtcgaaaaattgggaaatgggtttgagaagccttgaaaacccgacatatggtgtcggtgtgtttaaaaataaaatgaattgtgaaaactcgcgatgcgggggtggtgcctgcgtggcgctgtcccgtattcgcatataaggaccgattcctgtgtgaaactcatcaagcataacaaagtgcaaccacaaggtggtatgggacaccctagctaagtaactagtcggttcagggaaacctcgcatgccaatagttgggaacgccggggcggggtcagttggagccaacccgggttcctggtaaggcaagaacgcgaagcttgccagattaccgatcaaggtggttggagtttgatttgtgaaaactaaaatggcctatatttatgtgaggatttgattcttctatgtggcatgaggtaaccctgggtcggcttgggaaaggctttgttgcgaacctccgataccgatgggtgtttggaataagttcgtatcttatgggtaaagtgtacccctctgcagaggttaacttactgttcgaacagccgtgcccacggtaatgggcggatgtaaggtggttcccgttgcgtagatttgtttgcttgtgcttggtgaaaagttgttgtggtgtgggaatcgtaaccagaatcagcctatgtggcagatgggtgacctgagtggtcagaaacgaatctatgtgattcgggatgtctgcgggcatcatagactaggcttcccgagtggaagcggattgttgtgctgctgggcagctggactctgggagtccaagaaaatgaaaaaggctctgggagccgatttaatcaagtgaaatggctctgggagccgagaagtactgatctgacccgggaggttggtacattatcaattgagttgttgaaatttgatacgcaagtctcttttcgacccgaacttaaaaagaaataaatcacttagtgatttcaaaatgatttcaaacaaaagatttaccaaaacaaccttgcctctcttccaagcttgcatcaaacacctaaattcccgtgacttgctgagtacgaaagtactcacccttgctctatataaatatatatagttcctccgccctgaagagaagataaagtgaagtgaagattagggtttcgtcctggttcccagccgtcgcctgtggtgttgggtgttagtccgttggttccgctgctgctgctgttgttggtgttttcctcgtccgcgtcgtcggttgcattctcgggctgttctgagctgcaacctaagttaaggtaaataagtcctttatttattttaaggattgcaatgattcatatttttcatcgtgggtaccagcactatgtcctgggactggtactgtaatcgcggattcgtaagaagcggttcacgccgttttttctacgacacgctcctgtcaggtgccgttgtatggcagtgccgaattggggtgtgacaataatctactgaacagtctatcaaatggacatgatctttgcaccaccaaacctactatgtggcatccacaattcgacatgccacctcccctccaagcggccgtactcgattcatttttgcttaatatcatatcacacattaaatattctctctatcaaaaaaaagtcgaactctagggatgaatttaaacatggtaatgcatccctagagttggactcatttcgagatatagggagtagtttggaagtaagttggaataatatacttaatttaaagtgcgatgtgcaggcttagtccatggcgtgcactaattgaggcccaatcatttatcctcttcagattgcatcatgtactgtgacgagttctttaacttcatccgcgttacgttgagagtcaactgtcgaggtcaacgctcgattcaccatttagcaaatcgcgttcaagtcaatttgctgtttcagtcgtatatagtgtgacaaatcagatgcaacgcaacattaattaattagcaattactgataattaatcacagtaactttttcagcagcaaaaaaagtttcaaagcatagtctacactgtacaccatattatatgacaccaaccaaaccggcgagcttgctgcgaggctgcatgccacagatgaaagctccatcgcggcgacgacgacgacgaccgtgtccaagtccactcatgcctcgccatctcttctaccctacgcgattgcatcttgcatcaagaactcgatcgatctgatatatattactatgagctaagctgctaattaagttctagatttaattagcaacaatcaatggacgtgccgttcttcctcgccttcgcaatcatcgcgctcctgtccaggtacgtccccttcgcgctgccgccgatggcgcgggacctcctcgccgacaactccgccgagccggcgcgcgccgccaagtgcgcggtgtcggtggccgtcgccgggctgatgctgctggtgtcgctgcagtgcggcgccggcggcgagcagtactgccccgacgtcagggtggaggggagggcgctgtggctcaactgcgcggcgctcttcctcggcatggtcgtcggcggcgtcgcggtggtggtgatgccgccgctcgccgccgtgtcgccgcttgtccaggtgatggtcgaacacctgaccaggttcacggagaccatcgcggtgaccgcgttcgcgcatgacttctgcatctttataagctcgtgaggctgaaacaatgaggcgaggaaccgaaggccatttctcctttgtttttcttgaggcttttttattcacgttgtaaaaagattgatgaacttcaatgcgagaatggcattcaatgtt

SEQ ID NO: 9569 - DNA, 1199 bp, Oryza sativa
  ref <308>: DATABASE ACCESSION NUMBER: AK106917
  ref <309>: DATABASE ENTRY DATE: 2002-08-28
aacgcagcgccgccgcacgcggcctcctccttcccctcccccctcaacaacccaaccgcctcctcctccaaacaaatccacggggaaccatctctctctcctcgcccccgccgccgccgctgctcctcctccgatcggtggagcagcagccttcatgaagggcgaggcgggtctcgatcggtggagggggagagatttctcctccagttttcctctagttttgatcctggaggaggtggctgctgcatcttcttcttcaccgaagattggaggagtggatttcgtgtggttgttgcggccgaccgctttcttgctctcttggctcgtcggcctccgccgccgatgctgcgggatgccgtcccccgacgccgccgccggcgatattgagagcgccctcgacgacttcgcccgcgccgacgccgactgcatcgccgccgccctcgcctgcggccgcaccagcttctcctaccgccgcctccccgagccgcgccgcctccgcctcaccgtccgcaagctcgacgactcctacttcgatgtgcaaatcgcgaggtcagccgcggtgtgggagctcaaggcggccatcgaggacgtgttcgccgcgctctacgatgaaacggacaacaaggccatctcttggcagcacgtgtggagccacttttgcttatgtttcaaggacgagaaattgacagatgacaaggcaacattgcgtgcatttggtataagagatggtgatgaggttcattttgcccagcatctttctgttgaatacagaccctgcaagtccctttccctcagaaggtcaaggacttcattggatgatttcagtgctaggtcaaggagtttgttggacgatctcggcgaagatgatggtgataagtttatcgacacgaggcattctactagtgctttggaggaagggctatatgtttatcagcacgatgaggagcgcatggaagagagtcgcaagaagggaggcttctttagcggttggttctcctattctagattgaggggcaacagtaggacacattcagaggatgccatccaatcctcctgcgaaaagagagatactcgaactcggccaaagctggggagatggttgtcttccaaaaaaactaaaggcacatagcaatctggattgccaactgtatctcacacgtgttgctttgttcttctgaaatgaaaatcaaaattacatt

SEQ ID NO: 9570 - DNA, 1522 bp, Oryza sativa
  ref <308>: DATABASE ACCESSION NUMBER: AK106918
  ref <309>: DATABASE ENTRY DATE: 2002-08-28
gtaccccgcactcccgccgccgccgtcgtctacgtgagcgatcacgtcatcacatcgtcgtcgaccaaattaacacgcgtacgtactagcagctaagctgtatacatacgtgcatggattgcgagggggcggcggcggcggagatctaccggctgccggaggagtgcgtggcgtacgccatctcgatgacgacgccgggcgacgcgtgccactcgtcggccgtgtcgccggcgttccgggccgccgccgactccgacgccgtctgggacagcttcctcccccccgaccacgccgccatcctcgcccgcgccgacgacggtatcgccgccgccggcgaatgcgcctccaagaaggacctcttcgcccgcctctgcggccgccccgtcctcctcgacgacgccaccatgagctttgggttggatcgacggagcggcgcgaaatgcgtgatgctgtcggcgagggcgctgagcatcgcgtggggagacgatccctcgcgctggagatggactcctggcctccccggatcaaggttccctgaggtggcggagctcttggacgtgtgctggctggagatcaccggcaagctgcagctctcgctcctctctccggcgacgacgtacgccgcctacctcgtctactccttcgccgactacaccaccggcctcgagtgcaacatcggcatgccgactcccatggccacggtgaccgtcgtctccggcgccggcgggacgacgagcaggccgccggcggcgccggcgaccacgacgacgacggagcagcacaagatctgcctgcagcacatgggggaggaggagacgatcatgcaccggcaggagctggtgatccgcctccgcaaggccttcggccggacggtgaggttcgatcccgacatggacatcaggtgcccgcggccgagggacggcggcggcggcggcggcgggtggagggaggtcgagctgggcgagttcgctgtgccggccgccggcggcgaggatggcgtggtggaggtgagcttcaaggaggagactgggcggtggaagacggggctcatcgtgcaaggcatcgagctaaggcccaaatgcaccagcaaattaattaaactcgatagctagctaactcgattattgatcgatcattgcattgcatgtaaatgttcctaaattttttttcccgggggagaattcgatcgatcagtgagagagcaaaccaataacgcatcaattaagcatatgtgattgattaagaagctgcttcaatctgatcatatatcaggctagacgagcatttgatcgatcaagcactagctagctgcagctgttttgcgttgtgacgtgttagcttttatgcatatgcatgtcgttttatcgtacatgtacacgcatgacagcatataagcatggctcatctaggtggtgccagaagctcagagagaacttgattgacagtgtgcatgctgcacgctcgtgtcatcagtagtgtagaaagtgttatttgctgtactcctacaattaatttgttccgc

SEQ ID NO: 9571 - DNA, 1920 bp, Oryza sativa
  ref <308>: DATABASE ACCESSION NUMBER: AK106919
  ref <309>: DATABASE ENTRY DATE: 2002-08-28
ctgaaaaagcggtgtgtatgtgtgctcagctgaggcgctgagcgctcggctcggcacacgtcttccgcatactaaaatcctattctttttgcttgcttggctcgttgctgtctccagaaaggaagagaccttttctgctcttgttcttcttccacggatcgatcgcctcgctcgctttcgcctgttgcttcacgtttcggaagagcttgggtttgggggaattcgtgtgatcgtgttgatgagtaggtgaagaattcgggaagagctttgagagttttggcatctgatctagggcaaacgtgggcgtgggcgcgggcgcgtcgacggcgtcgtagcatcggcgacgtcgccggtcgccggcgagcatggagagcgagcaggtgaagaggcggttcgggcggtgcccctactgccgcgccatgatctaccaggaccccaacgccatcatctactactgcagcaagtgccgcacgcccatccgaggcaagaacccggagccgacggacgacgccgagtacgcgctctcccagctcgagatcctctccgccgacaccgcctccgtgttctccgacgacccggacacgctgagccgcacgtcctccgtcgcatacggcggcggcgagcagcctccggtgcggaccagctcggctccctacgcagcatttgatcggggcagcgttagggctggttcaagaagcggcgagcaatcgggggaagagagaggtggctcgccgatgcacagccgcgtcagcgaactccggccgacgtcgcggagaaccaggcggccgatgagcggcgacatgggtgcgttcagggacgatggatcgagctatggttcggacaacgacgtcccgacgtctgccgccgcgagctaccgccgccgggcgtcgccgctgacctcccaggaactggaggcgtcgtcgtcgtcgatggggtcgtcgggataccaaccgtccggcgtgtcgtcgtcgtcgatggggtcgtcgtcggtgtacgaaccgtccggcgcggcgaggtcgccgctgacggacccggcgttccagagggacctgctgcaggcgctggacaacctccggagggtcatcgccgccgtcgagcagccgtacggcgtcgacgcgcacctgcaacaagccggaatgcccccgaagagcgcgtcctgcaacgacgccgccaccggcggcagcggcggcggcggcggcgcgtacgcagcagcagtcacgcggcgcaactcccgcctcatgcgccgcctcgagtcgcagctcgtgcaggcgctgcccagggacggcctgcgccgggacaggagcacctcctcctcctcgtcggcgtcgagcagccgcccgggcggcgaccgggccagggcggcggggcggaagcaccactgccgcgctgtgctgggcggcacgccgttcgtcgtctgcgacaagtgctcggagatactgcagctgccggccgccgtgtcggcgaacagggcggccaggctggagtgcggcggatgcggggagacgctgtccatcaagctgccggcggcggcggcggcggcggcgagcggctcgacggaccggcccaagaagatattctccgcgccgcagcccgccgttcgccggctggatgacgacgacgcgggggaggagcacgcgtccgcgaggagcaacctgagcggcgaccagcgatggccggcgtcgccggccgaagggccgctccaccgcatgctcgggtacagcacggtgagctcggttttccggagccggcggtacggagagcaacactgagctgagcattcttttgatttgattttttttttaattccctgtcctttttatcagatggcattgcaattttgatacacaattgcattgtaaaaattgtaaacgattcttcatcctttttgtgtgtgtttcagtgtgtttgtttgattcatac

SEQ ID NO: 9572 - DNA, 810 bp, Oryza sativa
  ref <308>: DATABASE ACCESSION NUMBER: AK106920
  ref <309>: DATABASE ENTRY DATE: 2002-08-28
agatacagcccttgactctgctgcctcttcagttcagatggagctggacactgatcctaccaagctgaaggccaagcccatcatcaaaccaaaagtagaaccctgcgacgacgatgacgagttgccgccgccgccgccgccggcttcaggatccggcgaggattgggaggccaccacccctctcgccgccggcaaccccttcttcaccgccctcatcgccaagtctcatctccaccccaagttccagatgtggattccacctcggttccagcatcggctggcggagccggaggcgcgcacggcggcggtgctccactccggcggcaagtcgtgggcgacgagctactgcggccacctcaagatgaagaagctggacgcgggatggtcggagttcgcggtggacaaccggctcctggtcggggacgcctgcgtcttcgagctcgtcgccatgggcgccgccggaggtctggagttccaggtgcagatactccgcggcggcctgccggcggaggtcgtcacctccaagggcctcacctccgaccaacccatcctcatcgtcgactagcttagctatcgatctagccacagtactaaatcatcaaactccactattaattccactgtcactagctcgatcggtaattaaaggcaaggagctttaatttggtgtcaagcaaaaatttatccaaccaacttatgtatgatgtactgcagcagctgcaatggctactgtagggattgtagtttgctactatatctgtttgcaggacggatccaggaacaaaaaaataattaggggaaaaaaaaaag

SEQ ID NO: 9573 - DNA, 2530 bp, Oryza sativa
  ref <308>: DATABASE ACCESSION NUMBER: AK106921
  ref <309>: DATABASE ENTRY DATE: 2002-08-28
atgatgcatcaatcaaacaaacaatactacgctttcaggtctttgaccaatgggtttcaatttccatccggtgaacgacagcgactggttgatcagggcggcgatgctgctgagcttcaccctgcaggtgatcctcgtctttgtcgcgcccacgcgcaagcgctcctgccacccgcttccccacctcgccgtctggtccagctacctcgtcgccggctgggtcgccgtcgtcggcctcggcctcctcctcaacagcctcagcatcagcggcagcaacaatgggtcctcctccatcttcgccttctggacgccattcctgctgctccacctcggcggccccgacaccatcaccgcctactccctcgatgacaacgagctctggctgcgccacctcgccggcatgctgttcgtggtcttcgccgcattggtcgtcttcttcagctccgtcacgagcaaccccatggtcacggccaccgtcctcgtcttcgtcgccggcgtcatcaagtacggcgagagaatctactcgctctactccggaagcgtgagaggtttccgcgacaagatgctcggcgagcctaatcctggccccaactatgccaagctcatgacggagttcgagtccaagaagaacgccggcctgatggtcgagatcatcgtcgtcgacggcgagcacaaggaggcgctggagcaggcggaggtgatgaagaacggcaggaagagcgtggagacgatggcgtacgagctcttcgccatgttccgggtgctcttcgtcaacctcgtcctcagctacaaggagcggaggatcagccaggcctacttcctcgacctcggcgacgtgatgacggccgccgcggcgttcgaggtggtcgaggtggagctcggcttcctctacgacatggcgtacaccaaggcggccgtgtcgagcaccaggagaggctgcctcctccgcttcgtcgccacggcgtgcctcgtcgtcgccgtcgtcctcttcgtgctcatggacaaggccggcgtccgccacgtcgaccgcggcgtcacctacgtgctgctgcttggtggggtggcgatcgacgtggccgggtacctcatgctcctctcctccgaccggacgctggcattcctcgacggcaagccgaagctagcttggcttgcacgggtggccagggccgtgcggctgccgacgaggcggtggtcggagcggatcacgaagatgaacctcatcaggtacagcctaagcaagcccgaggaggacgccggccgccggtgctggtgctgcaggtggacgacgatcccgcgcgtcgtgcgctgcctcgcctgggtagccgacatggtgggcgtgagggagatcttggacgacttcttcttcatccggcacgagccggtgagctgcaggaagatcaaggattccaacaaggggaagaagtccatcgacgtcctcaactacgtgttcgatgggctcaggaagacggccaacgaagtaaggtactccggcggcaacgagatggaggaggtctgcgactaccgcggcggcgaggggataatcaatgagctcgtcggcgacatccagctgatggagctcaacgtgaacgacgtcgtgcgcgaaagcgtgagaagggagttcgacgagtgcctgctgctgtggcacgtcgccacggacctgtgctcccaccgccgccgcgaaatggaagtgccacggaacggcgacatccagagcttgatgtccatcagcgagaccctgtcggagtacatgctgtacctcctcgccaggcggccggagatgctgcccgcagcgacggcgacggccgccgtcatcgggctgctccggtaccgcgacacgcgcgccgaggcacgccgcctcttccggtcggcggcggcgtgggaccccacccaccacgacgcccagaggatgctgctcgaggtgaacacgtccaagaagccggcggttgtgaagggcgacaagagcaagtcggtgctgttcgacgcctgcatcctggccaaggcgctgctgcagctgggggacgacaccatgtggagggtggtggccggagtgtggagggagatgctcgtccacgtggctggcaggtgccatgggagcacgcacgttcggcagctcagccgcggcggcgagcttatcagcatggtctggttcctcatggcgcacatggggatcggcgacatgtacaggacccaggtgggggacgccaacgctaagctcgtcgtccttgaccagtagacatgcatgcctgctgccgcatatattttaatactccctctatttcaattcgtagcaacttaaaataggattagatccattttaggactacaaatctcgacatatatttattcagattcgtagtcccagatctaatcacattataagtagttatatattaggctagagagagtacatcacttacaagtgaccttccgcgaggcagcttgattcgttcttgttgtcttaggttttttttttttggtgtgtccattgaggatcaagtagatgatggcgactatgtgggttgttactacc

SEQ ID NO: 9574 - DNA, 662 bp, Oryza sativa
  ref <308>: DATABASE ACCESSION NUMBER: AK106922
  ref <309>: DATABASE ENTRY DATE: 2002-08-28
aaaaacgcactctagatccttctccttcgcaacaagagtccgcgcgacgcaagtcgaagcaccgccaccgagaatggcggatctcacgggcggcggcggcggaggcggcgggagcgcggggagccgtcggccgctgggtttcctgaagaacgcggcgaagcacaagcacgggttcgtgcagctgctcctgatggggagcgtcctcatgatgagcctgcggaccctgggccagaagcaccgccgccgcgacctcatctacgacaacgccgacctccgccgcgagcacgacgacctatccctccggatgcgcgacgtccaggacgccctgcgccgcgaggccgacgccgacgagtccggcgcgctcgcctcccatctccgccgcatcttcgccgcccaccccgcctccaccgatgacaagtagctcgttgcccggctaatctccgccgcactctcagtcctcccccgcgatgtgtgatcgctgcgtatttacttgtcagatctttgccccatggcgtctaggcttgcacgcgatttgttcgtcgaaatgccgcacaggctgtgagcctgtaccgaaccgtgaactcgctgtttgaggcagaaacgcatttttgttgttggactgataagacgtcctataattctgagatgcctgtttttcttgc

SEQ ID NO: 9575 - DNA, 1882 bp, Oryza sativa
  ref <308>: DATABASE ACCESSION NUMBER: AK106923
  ref <309>: DATABASE ENTRY DATE: 2002-08-28
ttactaaagccctgaaaatcatgtattaattccataagactacagagcatttcatcaaactttagcaatcaagttgtgtacatcaaaatagcaggcaatgcaactaaccatgcataaatgcaacagtgggattctgcttgcagaacatgtatcttccatcgcagtatcaacattcagagtcaggaatgaaaaaattgggatttaacttgcacagccaaatcattatagcttcatgtgccaactctttccccttagccttctatgtaacacatgattggaaatatgtataaatagaaaaaaaatgtcttataccaaggaattttagtgcaagtagtttttttacgaaaatgtggagtaggaagcattccttccctcccagattacagaaaaaatatacactctcctgctgaggattttatacatgaaggaatacaaaggaatgttagaaatattaaatataatgccgagttgatgtcaggagcgtatcgatcttagaactgctttgatatatcgggttcccacccacctagtatgcgacaactgtttagaaattagaagagtataaaggtttgacatctaccgagaattttgaaaacaaattacagttgataaaaaatattagcctacaggatatcgatcattaactattcactcttgagagtagttcaaaaaatatttgcttaatctcctgtcttacttagcactttgtcgagcacttggcaggcataatgtactcaagcaattcatcaagtcctgcagggaagaatcaagcaattcgtgaagcacgtaccaataatcaaggcggcccagtccgttgcctatcacgatcatgtcctgcacgacgtcatcccgttggtcccgtggccgcccgtcaccaccaaccgatgacctgggcgaagcaactgagggcgtcgagcagcgggtgttcggggacgaacgcagccaccaccaagcacgccggcgcagcaaaaccgccctggcttcgaccgacgccgccaccaccaagtacgccgccgcaacacggccgccccggctcttcgcccaacgccgcccaagcacgtcggcggcgcccagccagccgccagcctcaccgccaaccacgccagctcctcggccgatgccatcagccgctgccaccggcgtctcaccggccagccgcgccgtcgcccgcgtctcccgtcgtccgtctcccccgccaaacgccgccgtcctcacgccaccagccgccgtcgaccgctccgtcagctcaccggccagatcaggtggtgacgggccagatccagccacgaaagggccagatccggcggcggcacagcggatccgcagccacgcgccgcgccgccgcgaggccttcccggtgcgctgtgccgcctcctcatgccggagacgggtcgccgccgggggtgcgagagcggcaggggcaaaagtccctgcgcctgagacgacggcggcaaaccgtgggcggcgacggcggcagaacagcttgaggggagcgataggataaagccacggaggaggagatcgcgcaaggggatagggaagagatccgggtggagggcgcggtgatttgccggggtaggcgaggcgatccggtctgtatcggattggatcaggaggtgctcgagagaggcgcgcggatgcggaggcggcgcggcgattgcggcagagagggaggtgtgggacacgcgcgctgatatgggacattggatctaaattcttcagatgggtttcaaccgttggatgtgtcacgtgatgaatgagtaaaacaatttgttgaaccataggatagattatgtgggagcatatatggtgaattggacagtgttctgtggatatttacgaagggcattaggctgctgcttgccgaagcagccgagcaatc

SEQ ID NO: 9576 - DNA, 1682 bp, Oryza sativa
  ref <308>: DATABASE ACCESSION NUMBER: AK106924
  ref <309>: DATABASE ENTRY DATE: 2002-08-28
acttgttttctttcagtctttctttcttcttcttgtttgctgatcttgttccttggtggaaggatgcttgtcacctactcctttttgagttccccactctcctcacacttgttctacctctcttccccataaaactattatcatctttggagccaaaagccaaccaagaggagaaagcaaagggaggagaaaagaagcaagcaaagcaaagcaagaagcaagaagcagctgctcagctcagctcaagcaagtaagtgaattcttgcttgatcgatccatcgatcgatcgatcggtttgctggtgatggacaagcacacttgcaagctctgcttccgccgattccacaatggccgcgctctcggcggccacatgcgctcccatgtcatggccgccgccgcggccgccgcgtactgtccgtcgtcgccggcgatgtcactggcgtccacgtcgtcgacggagatcgagatggatgagaagaaggagatgacgaagaagacggagcaggagaagacgctgacgtcgtacgtgttgcgcgagaatcccaagaggagctacaaggtgagcgccggtgaattctccggtggtggtggtggtggtggtggcggcggcgagtcgtcggtcgtgcaggacggcgagagcgacacggagtcgtccccgccgcgcggcggagcggggtcgttcttcgccgtgagccggaggcggtcgaagcgggcgcggcggcggcgtcgcgcgccggatcccgaaccggcgagcagcgtctccgacgcgacgacggaggaggacgtggccatgtcgctcttgatgctgtctcgggactcgtggacgcgttccagatccgagcacgagacccaccaccggggggcgagctcggaggccgagcagaacaacaacaacgtcgtcaacgtgttcgacgaagaagacgaggacgcccgcgacgtggccggcgaggatcacgacgaggagctcagctacggcggcggcgaggcggcggcggcgcgccaccgcaccagcaggttccagtgcggcgcatgcaggaaggtgttccggtcgtaccaggcgctcggcggccaccgcgcgagcctcaagagaggcaagggcggcggctgcgtgccaccgccacgtccggcgccggcgagctccgccgccgcgccggccatccacgagtgcccattctgcttccgcgtgttcgactccggccaggccctgggcggccacaagcgcgcccacatgccatccggcggcgcgcggtcctcgccctcgccgtctccggcgaaatgcggcgagagctccggctccatcgatctcaacatgccggcgacaatggaggacgacttcgagctctccgccgtgtacgacgccgagttcgccagcacgagacagtgaccacacaccaccaaccagctgatcatccatggctgccgactccagatcaccaagaaatcggtaggacaaactgcttcctagctgcatgcaaggatggattcattcgaggtaagaagctctgcatctcttgcaagaaccagaataccagatcatggagaattctctgtcttgttgcttaagcttcagttactgttgctgttgctgctattgctagagctgaaaattcagttgagcagctgaaaattctttttttcattttgggcgctctgtatctaaatcaaattgatatttttgctcc

SEQ ID NO: 9577 - DNA, 1867 bp, Oryza sativa
  ref <308>: DATABASE ACCESSION NUMBER: AK106925
  ref <309>: DATABASE ENTRY DATE: 2002-08-28
aacgtaatccatggctgtgtggggtgggttggggcaggcggcgacggtggcgcagctggtcggcgcggacgtcggcgggctcatctccagcatcatccaagcggcagcgacggctcggcagaacaagagggagtgcgaccagctcgcccgccgcgtcgtcatgatcgccgacctgctgccccacctgcaggacccggaggtgatgcggcggccggaggtccggcggccgctggcggagctcggcgacacgctccgggaggctcacgagctcgtggcctcctgccaaggtcggagcgcggcatatcggttcgtcatggcggggcgcctggctgacaggttcagggacgtgcagagcaagatcgactcctacctcattgtcttccctttcatcgcccacatcgacatcacccgtcgcctcgatcagatctacagaattcttgctccaaacgatacggccgcagcatcatcttcttcatctgcaggcagctcacagtcggatcaaatctacaacattcttgtttcaaatgatacgaccgcagcatcttctccttcatctgcaggctccctgcagtcaccagatgcgctggagtttgcacggatttctcaaggagatggaggagaggagttcaccgtgaaggagctcgtggcggcgaccaacaactttgccaacgagatcggcagaggcagctccggcagcgtgtacaagggaaggcttcgcgacgggcgggaggtggcaatcaaatccttggtaaagacatcgccggaccatggccgggaggaatctctcatgagggggctcgccattctctcccgtctccgccatgaccacatcgtccgcctccttggcttctgcgtggtaagggagaagaagagggagagcacgctgctgctatccttccggaagaaaaagaaggcggcggcggagaggcaggctggagagctccttctcgtctacgattacatggagaatggctcactcgccgatcagctgcatggccacctgtcgtcgtcgtcgtcgtcgtcgccggtgatggcgtcgtggaagatgcgcatcaagatgctgctcggcgtgtcgcggggcatccagtacctgcaccacggcgccaccacgacgccgatcatccacggggacatcaagctgtccaacatcctcgtcgactcgagctgggtgccgcatttgacggacttcggcgcggcggtgatcaacggcatggagcgtccgagcaccgtcgtgcacggcacggccggatgcatcgacccggagttctacagcacaatgaatcagacgcggagcagcgacgtgaacagcttcggcgtcgtgatgctggagatgctcacgggcaagaggccaattttcatcgatcggaaggaggagggcgaggtcaccaacttggtagccttttcgcttccaatcattgaagacggcgagctggggaggttgctggacaggcggccggcggagccaacggcgaggcagctcgaggcgttggaaatggtggcgcggacggcggcgcgctgcgtgcagctgcagcggaaggagcgaccggcgatatcggaagtcgtggccatactcgagactgagcttgatctcctccttcgcgatgggtagaggtagagcggtcgtccgatactccgatgtgaatgtgagttcgtcccaccatttgctgcatccaaattccaacggaaaaaatagcttcagaattccaatcgtcaaacatagcttcagtaagatgcttttcaaggaagacatgtatgaatgtatgcttctttaacttgagtttcagacgtcatgtaaaacgatgtaaaggaaatttacctgtttctcctattttcatggagaaaaaaaattgtatgtgaacggtgaacc

SEQ ID NO: 9578 - DNA, 1794 bp, Oryza sativa
  ref <308>: DATABASE ACCESSION NUMBER: AK106926
  ref <309>: DATABASE ENTRY DATE: 2002-08-28
actataagccatcatatcacttgaaacactttggtaagtcaataattcattctttccattgttgcagatcaggggcctccttgcagagctagcaattgtggaggatgagatattctacctggagaagaaggtggacgacttacggctgcggcttcaccgggagcgcaagtggactgatcagtgcatttttcagcagcagcagcagaattggccgcaaaatcgccatcagaggcactccatctgcagccttggtggaaggagggagcttcaaggagctgagttgctaccaaggctaccttgtcctggcagtgatgaagctcttgaatgtgaaagcaaggcttctgttggatctgtctctagcaaaggtgaggaagttgagcaaatacgaagaagcagccactcatttgagaatttgaagctccctgaaaggaaaatctgcttgagtggcccaaataagctctctgaggagctgatcagactgacagtgaacatcttccacaagctgaataaaacaacgaatgcagcagagctggagatgagcagcacatcaaagctcaacatctcctgcattggccccagaagtcttgttcctaagtcgtctgcgatcaccggcgcagccattagcactcaagaaccgcagaatgtcacagggcggcgacggagcagagaaggagattgggtgccacaagagatttgttgaatttacgaagagctcgtttgatgtaagccgcatatcgtcgtgtcttgtagacatcaagaacttgagaatcttgatgcagaggctttgcaatgttgatccaagttttctgacgaacaagcagaagctggcgttctggattaacatctacaacttctgcataatgcatgcatgtcttcagcatggcttacctccatctccagataagcttcttggattgctgaatcaggcttcagtgaacgtgggaggaacagttctgaatgttctgtcgatcgagcatctcatcctgagacactcccctgaaggcaagcaaggaatcatggacgaaagggagagagatttgcagctctcctacgggctaggataccctgaacccaacgtcgtgttcgctctgtgcagaggcagccgctcctcgcctgcactgagagtttacacggcggaggacatctcgaacgagctggagcgagccaaggtggagtacctggagtcgtcggtgcgcgcggcgagcaagaagaaggtggtcgtccccaagctgctgtactggcacatgcgggacttcgccgacgacgtcgcgtcgctgctcgagtggatctacagccagctccccggccggtcgtcgtcgacggggcagctcaagcgcaccatcagggagctcctcggcgcctccggcgccggtggcaaggcggcggtggcgaaggcggtggaggtggagccttacagcgccgaattccactacctgctgccactctgatgcgatgaacctctgatgatgagtttcttctccttgcatgcagcattgctacgtacggctttgaagatattctgttatttcgccgcgtataccaacgtgtacatcgttgcaagtgactaatctagtcaatcaaacaaataaatttagtgaagtatatatagttcaattttcccccctactgaatccaacgatgtgcagccattttagaagttagtagttgtagtatgactgatactccctccatccatcccaaaatgttttgggggagtaattgttagaaggaaaaattgcaaaaatgtacctcaatatcatcctgagttaagatcccctataaaatatttgttgc

SEQ ID NO: 9579 - DNA, 1730 bp, Oryza sativa
  ref <308>: DATABASE ACCESSION NUMBER: AK106927
  ref <309>: DATABASE ENTRY DATE: 2002-08-28
tactatacgtatgaacataagttgctgcgcatacaatacaggtgaggattctaccattaaatgcacaatgacacaatttgaggatcagtttagcactataaaacctgatgggattcaagtcagatgccataagcaattttgcatcatcagatgctcaacagtacccgtgcccccgcgcgccgtcgtcgccgccgccgtcgtcgccgccgccgccgtcgagaccgagggagccgcggatccaggtgaaggccaagacccgcaagacctcgagcaagatggcagattcggattcacccgctacctgggagttgagcttaccccaatcggagggttatgtcattgagctgcatcggatgttgaggcgtctgcgataccctggttttccgtcataccgagtgaggcagtgtggcccagtttgggaggctcgggtcgagattcacccccgagtcccttccaagttggactacagctttcagacacgtcaccaccgagacctgccagagaccgcgatgcaggatgctgctcgggaggcctttctccgactcagctctatccaccgagctgagttagtgagtaccgagtttgctcatcacccgttccgggaggagggcaactcagtttgcacagttcaggacacgccctgctgctacaacccgatagtgactcggttgtcacgataggctgaggcagtagatgactactacgaggaggctttgttggagattgacgaccaccagagacgtgtgggggagttagagactgaggtgaccgacctcacagcacagcagcttcagttggaggaggagcaccaggcttggggcagtgagatagactcactgaaggcacagctccaggtccacggcgatcagttccagcagttatccgaccagtacaacgatcgccgcgggatgatggatactcttgaggagcagctgagagagagtcaggagcacgtcagccagctggaggagcagcttcgagcagccaagatcagcaccacaggggcctctacttccacagcagtaggccgtgaccgctacttcttcctcaccccgccgtacccaccggcgttccacgctcttctgggagaggctagtatgctagctaccgagtcagcgccctacctagtggaccctacagcagcacagccacctgttccggagttggtgcacacttcactgatccctacactttctccgcagctgggttccagtttggagactccgatccaggtcgactccgagacagaggggaccgacaccgagccagagatcgagccagacatcactgatccttcagaggatgaggctcctgttccccgtatcaccttcctcggaggccctcgcaccctcagcactgctcgcaagagcacacgacccccgggcaagaggcccaagccagatccagaggccactacctctgagccgtggggactccggtttgcgcgagccagcgaccaccctctacctgccccgggatcctgcggatggctggaggattagactgacggactccttgcagcttcgatctcgtatcagatggtttttggatagtatgcgagacaccccttcccttacctagattgacgagtagtttgatgattggtttgatgtatcgtttggatgaaccttatttggactgcgtatgtatgcagtcaattgcatcatgatttatgtaccatttgtgaaactctgtgatgttatttatgatatctattgttgttgtgttgt

SEQ ID NO: 9580 - DNA, 2598 bp, Oryza sativa
  ref <308>: DATABASE ACCESSION NUMBER: AK106928
  ref <309>: DATABASE ENTRY DATE: 2002-08-28
aaaaataaaccccatttataatcatatttgatttttaaaatctcaataacaataaaaaggagaagcagcgggcggggtgtataagagtatagttgtagagccgccgacggttagcgggacctctagaaaataaaaaataaattccgacgatagttatgttcgatttgtagaatcccaatgacaataaagagtaggtggcgaatgggccgtagaggagtatactgacatcgtttgacgggacttctaaaagttacaaaaaatgaaacctaacaagacaataaactctaaaaactacaaggtccaattaaggttcagaacttctaaaaagtaaaaaaaaaaactaatgatgatcatgttcaattttaaaatctcaatgacaataaaaaagggagacaacaggcgagccataaagaagtacaatgacaaagccgctgacggtttggtgggacttttagaaagtaaaaaatgaacttgaatgatagttatgttcgatttttaaaatcccaatgataataaagaaaaaagacagtggacgggccgtagagaagtataatggcagcgtttggcgggacttctggaaattataaaaacgaaacccagtgagacaataacctctaaaaactaagatccaatttttaaaggtttcaaagagaatgaataaaaatagtggtagatcgagcaagcaaataaagaaggatatgatagaagtaaggggtagcagctagggcgacttttaaaaattatataattagaaatacggggatgataatgtttggtctttcagctatttaataaattttaaataaaatcatactgaaaaatattgtttgtttgctagccgcgcaattgcgcgggccacccagctagttcatatagatgttaatgaatctaaacatgtgtgtgtctagattttttaacatctatataaagatgagtcatctaccctataattcaccaactcatcttactcatatctcatccttacactcttacaccttacatatccaacggctcatatctacctgctctataatccaacggtccagatcgtgtgcagcttactcccttctccctccgcgctcctccccacgtccacgcggctccttctcgcgattgccccgtcaatctcgtgattcccgtgaatcgccccaatctcgcccccttcatcggctctagccgtgtctcccatcgccccgcgccgccgcctcaccatcgtcgtcgctcccttccctctccaacgccgccgtcgcctatcacgcccgaccccctccatcgcttccccaaaccgtgtccctccccgccgccggaagccctccgtcgccaggtcgccgccgacgctgatctgctccaccacccactccccgctgcacgcgaccagttcgccgtcacgcgccgtgacccgtgctcccacacctccccgccgccggaagccctccgtcgccaggtcgctgccgacgccgatctgccccgccacccactccccgctccccactgcacgcggccagttcgccgtcgtgcggctagacccgttctcccacacctccccgccaccggaagccctccgtcgccacgtcgccgccgacgccgatctgctccgccacccactccccgctgcacgcggccagttcgccgtcatgcttcgccgtcacgcaccgtgacccgtggtcccaccggttagtttatgcctagcgctaacacaatgccaattgctgtcgttcagtacgtgcaatgctcagtatatacaatgtttccgccaatatcaggttatggaatggggtgaactaatacatccggattggtgagatcagggtgattgggctttttttttcagttttttctcatgatgaaaattttgggatgtttctcatttaagtgggatggtaatgttgaactataaatctggtgtgtagcattgctactgtggcagcagtttgctgcttactggctgaataaactcataaaattgtttgcctatgtgctcaatgatgtacagttgacaccatcctccccagctccccgccgtcaccacgcatcccaccgcgtcgcccccagtctccgcatcgtcaactgcctccgctcctatgtgagtcatcaatcgcctccactccacctcgtcaaccacctccgcgcgtccacttgtcttggcctcttcaacaacgtctcccgcctcgacctgattcaccggaagatccatcgccgtcatctggcaggagcagaagcgaccaattcatcttggcatatttcttaagatcaccgacaccagccgcgccgtgattccgacaccgggactccttgcccctgcgacagcttctctaccgcaacaccgtcaagtgatatcttttgcaccctgaccggaaacctctctactgcgttgcgaacagggttttggaaatccttaacggatgacttttgaagtctaaatttttctttcatccctgccacaggaggtacatactgtgccgtggaagatgtgtaatcctcagcaagtgatcctttgcctttccataaaaatgtgcaaaaaaggtgtaacaagacaatttgacaggataattcgtactaaaatattgggcataatgagaatatggcttgttgagcttt

SEQ ID NO: 9581 - DNA, 2044 bp, Oryza sativa
  ref <308>: DATABASE ACCESSION NUMBER: AK106929
  ref <309>: DATABASE ENTRY DATE: 2002-08-28
gcggcgcaatgccgctcttccgcgcggcggcgctccgccggctgctctccaccgcggcggcttcgtcggcacccccgaagctatggaaccttccctaccgcctccggcgcgccgccgtccccgccgcgcgcgccgccgtctccgagtacctccacgccacgcgctgccttccctcctcccacgccgacaccatcgccgcgcgctccccgcgctccctgcacgccttcctcgccggcctccccgctgtgcccagctccctccgcacctccgctttcccctccctcctccgccgccacctcgccttccacccgctcaacgagctccccttcttcctcgagtccatcggcctgcccccgaccacgcgctccgacctcatgttcctcgccgaccacccgtccctcctcccagccgtcgccgcgctcgcgcatttcggcttcccctggtcccgcctcggcctcctcttccccaccgtcctcctccgcctcccgcccgacctcatcacctcccgccttgcctctctcgaggcttgcctcggcccgctcccccgtgccgccatcatcgccgcctgcctcgccttcccctcgcttcttgagaacgatctctccagcagtgaccgtctcgtcgacgatcttggcaaggtgtttggaaggctgggccctggtttggggacctccaatgacatcgatgctttcttgggggtttgccgcaggacatggatgttctatgatgctggttcagaggtcgggggcattggggaccttgtcggctgcaacaaccagagggtgtttcttgagcttgaggaggagaggattggtaaaatgttgaagtttttcaaggggttggggatggcgggagaggaggtggggagattcttgcttaccaatcccatggttttttatcttgaatttggtgatgttgtcatttcggtgccggagtacctgaggagagttggtttggcagtgaatgaggttaatgcagcggtggagaagcacccgtacgttgttgggaagaacctgctgcagaacctccctggtgtgctgcgggcaatggaactggatcattggttcctggagaagatttctgatggtggggagagtttgcggtatttatttccagattttgtgttggaggatgttagttatgacgttgagattgagcgagcatccttgggagggatgattaagatgaaggctgataaaagagctcagcatattgacggcaagctggaattcttgaagagcattggatatggtgagaataagatagccacaaagataatagccgtactgcacagcaatcgggatactctgcaagagagatttgattgcctcctggaaagagggttggagtacaagatgctgtgtcagatcgtgagtgtattcccaaagattctcaaccagggaaagaagatgcttaatgacaagttgaactatatgactaaggagctaggatactcagtggagtacctcgagttatttccagcatttctgtgctttgatttggagaaccgggtaaagcctaggtatacaatgcttcggtggctccgagagaatggtcttcttagaagaacattagcccctgcaactgtgcttgctaactcagagaagaggttcatttccaacctgtacaatgtgcatcctgcagctccaaagctgtggcttgagtgcttttcttcaagaaagcacatggagtattatctcaggaacatatatcaccagcatgctgataccaaataatttaatgtatttaattctattgatacgattctgagaggttaatgattgttacctgcgagtcttttgtggcatccctctccctattgagggtacttcttagttgctacaggtttcactctgcaaaattctttgctcctgcatattttaacaatagtatgcaggatgtaggatggagtagaatatagcaatggaaaatgaatgtaacttaatttccataaaaactgagttgtacattgtacctgaataatttataggttgtaactgatcttggcttcgtttattcatgagtgcatggctttgattgcatt

SEQ ID NO: 9582 - DNA, 1823 bp, Oryza sativa
  ref <308>: DATABASE ACCESSION NUMBER: AK106930
  ref <309>: DATABASE ENTRY DATE: 2002-08-28
atcgatcacacaagcactcgctccgacgactccggcgagcgagagatcgtcggcgatgggagaaggcggcggcggcggcctggacgtggtgatgttcccctggctggcgttcggccacatgatccccttcctccagctgtccaagcgcctcgcggcgaggggccacgccgtctccttcctctccacgccgcgaaacctcgccaggctcccgccggtgccggcgagcctttccgatcgtctccgcctccagccgctgccgatgccgacacggtggaggggctgcctgagggcgccgagtcgacggccgacgtgacgccggacaaggacgggctcgtcaagaaggcctgcgacggcctcgccgccccgttcgcggcgttcctcgccggccgtgcgaagcggccggactggatcgtcgtcgacttctgccaccactggctcccgcccatcgccgacgagcactgcgtgccatgcgccatgttccatatcatcccggccgccatgaacgccatgttcgggccgcgctgggcgaacgcccggtatccccgcacggcgccggaggacttcaccgtgccgcccaagtggatccccttcccttccaccatcgccttccgccgccgcgagttcgggtggatcgccggcgccttcaagcccaacgcgtccggcctgcccgacgtcgaacgcttctggcgaaccgaggagcggtgccgcctcatcatcaacagcagctgccacgagctcgagcccccccagctgttcgacttcctcaccggcctcttccggaagcccaccgtccccgcggggatcctgccgccgacgaccaacctcgtcaccgacgacgacgacgacgacgaccgctccgaggtcttgcaatggctcgacggccagcctcccaagtccgtcatctacgtcgcgctggggagcgaggcgccactgagcgccaacgacctccacgagctcgcgctcgggctggagctcgccggcgtgcggttcctgtgggcgatccggagcccgaccgccggcggcgtgttgcccgacgggttcgagcagcggacgcgggggcgcggcgtggtgtgggggcggtgggtggcgcaagtgcgggtgctggcgcacggcgcggtgggcgcgttcctgacgcactgcgggtggggctccaccatcgagggcgtcgcgctcgggcagccgctggtgatgctgccgttggtggtggaccagggcatcatcgcgcgggccatggcggagcggggcgtcggcgtggagatcgccagggacgagagcgacggctcgttcgaccgagacgccgtcgcggcggcggtgcggcgcgtcgcggtgggcggcgagagggaggcgttcgcgagcaacgccaaccgcatcaaggatgtcgttggagaccaggaacgggaggagcgctacatcgacgagcttgttggttacctcagacgctatagttgatcagcgaacaaaaaaaattgacgagaacttttatatacgtgtacatagtgattaaaaactaattttaaaaaataaattactacttccttgattccaaaatattgctatatacaggatatgaccaatccaaagaccagtctggatagatctctctttagattcgtttttctttatccatcctatatagtaatattttaggatggcggctgtaccaaactttgaaattaaatattttttttcagtaataaaaagatacgatgtgaggtgtatgttcattgtcttttaagttactgctcaatcactgaacgttcgattgtaaacttgtaaagctttgagaataagatgacattattctggcttaattagctagcttt

SEQ ID NO: 9583 - DNA, 2328 bp, Oryza sativa
  ref <308>: DATABASE ACCESSION NUMBER: AK106931
  ref <309>: DATABASE ENTRY DATE: 2002-08-28
aggagcgcgcacgccaagtcggcggaaacttgtggccaccgcagcagcagatagcctcccttccccctcccaccttctcttccagcggccacaccagcgccccaatggcttcccccctcgccgtcttccaccccgcctccgccaccgccgccgccgccgctcgccgtcaccaccccccgcgcccgccgcacctgcacctccacctcccgctccaccaccagccttcgtcgccccgccgcaggttcgctgccgagttcgcggtcggcggtgctgacggtggcaccggcggcggcggcgggaggagggcgaggggaggcggtgacgtcgatgtcgccgcggtcggcgcggcgctgcgggacgccaggacggccgacgaagtggagaccctggtgaagggcttcctggacgacggtggcggcggcgaggagcacctgccgctccaggtgtatacctcggtgatccgggggctgggcaaggagaggcgcctcgacgccgcgttcgccgtcgtggagcacctcaagaggggaagcgggagtggcggcggcggcggcggcgtcaaccagttcgtctacaactgcctgctgggcgcggtcaagaacagtggggaatttgggaggatccacgatgtgcttgcagacatggaggcacagggggttcccccaaacattgtgacattcaacactctgatgtcaatctatgtcgaacaaggcaagattgatgaggtcttcagggtgtttgacaccatcgagggcagtggcctggtgcccaccgcggcgacatactcgacagtgatgtcggcctacaagaaggctggcgatgcattcgcggcactcaagttcatcaccaagctaagggggatgtacaacaagggtgaattggcggtgaatcatgaagattgggaccgagaatttgtcaagtttgagaagctgactgtccgtgtctgctatatggcgatgcggcggtctcttgtgggtggtgagaatccagtaggtgaggtgctgaaagttcttcttggcatggatgaagctggggtgaagccagacaggagagattacgagcggcttgtgtgggcatgtacaggtgaggagcattacaccattgccaaggagctgtaccaaaggatccgtgagcgtggtgatggcgtgatcagcttatctgtgtgcaatcatctgatttggctgatgggcaaggctaagaagtggtgggcagctcttgagatttatgaggatttgttggacaaaggccccaaaccgaataacttgtcgtatgagctcatcatgtcacatttcaatattctactcaatgctgcaaagagaaggggcatttggaggtggggtgtaaggctgcttgataagatgcaacagaagggcttgaagcctggaagcagagagtggagtgccgtccttcttgcgtgttctagagcagctgaaacatctgctgcagtggatatatttaagagaatgatagatcaagggttgacaccggatgtagtttcttacggagcgctgctgagtgcgcttgagaagggaaagctgtatgatgaggcactccgagtttgggaacacatgtgcaaggtaggcgttaagccgaacctacatgcatatacaatcttagtatcaatttacattggcaaggggaaccatgctatggtagattctgttcttcgtggtatgctgtcagcaaagatagaaccaactgttgttacgttcaatgcgataatcagcgcatgcgtgagaaacaataagggtggctctgcttttgaatggttccataggatgaaagtgcagaacattgagccaaatgaaattacatatcagatgttgattgaagctcttgtacaagatggtaaacccaggcttgcctatgagatgtacatgagggcttgcaaccaagggcttgagcttcctgcaaaatcatacgacactgtaatggaggcatgccaagattatggttccctcatagatctaaattctttgggtcctcggcctgttaagaaagtggaacccatcaggatagagaacaagttttcgagtagttattatgttggggatcttccagcagcacaaaacattttggtagcactggaacatctagtttatatagatacagaacggaaaggtggatcatgtagcattcggccccctcttttttctgaacacttcaaactcactccaagtctccaacattgagaacacactgatatttgtttgtaagttgcctaacttgtaatttgtaaacattcaatcattatacagtagtgaatttgttatttgctttatacggagtagaaagtagaaggagattgcctcatggacttagaattgtttt

SEQ ID NO: 9584 - DNA, 1823 bp, Oryza sativa
  ref <308>: DATABASE ACCESSION NUMBER: AK106932
  ref <309>: DATABASE ENTRY DATE: 2002-08-28
atatgcagctggagtagtagcagctccgatggaggcgacgacgactgacggcacgacggaccacgcggggaaaccggcggtgaggagcaagagcgggacgtggagggcgtgcccgttcatcctggggaacgagtgctgcgagcgcctggcctactacggcatgagcgccaacctcgtcaactacatggtcgatcgcctccgccagggcaacgccggcgccgccgccagcgtcaacaactggtccggcacatgctacgtcatgcccctcgtcggcgccttcctcgccgacgcctacctcggtcgctaccgcaccatcgccgcgttcatggcgctctacatcgtcggcctcgcgctcctcaccatgagcgcctccgtgccaggcatgaagccgcctaactgcgccacaatatccgcctcctcgtgcgggccctccccaggccagagcgccgccttcttcgtcgcgctctacctcatcgccctgggcaccggcgggatcaagccctgcgtctcctccttcggcgccgaccagttcgacgacgccgacccacgcgagcaccggagcaaggcctccttcttcaactggttctacatgtccatcaacgtcggcgccctggtggcgtcgtcggtgctcgtctgggtgcagatgaacgtgggctgggggtggggcttcggcatcccggccgtggccatggccgtggccgtcgccagcttcctcatggggagcagcctctacaggcaccagaagcccggggggagcccgctcaccaggatgctgcaggtggtcgtggccgccgccaggaagtcaagggtggcgctgcccgccgacgccgccgcgctactctacgagggcgacaagcaggcctgcgggacgcggcggctggctcacacggagcagttcaggtggctggaccgggctgcggtggtgacaccgacgacggacaaggacgacgacaccggcagcaggtggcggctgtgcccggtgacgcaggtggaggagctcaaggcggtggtgcggctgctgccggtgtgggcgagcgggatcgtgatgtcggcggtgtacgggcagatgagcaccatgttcgtgctgcaggggaacacgctggaccctcgcatgggcgctaccttcaagatcccctcggcgtcgctctccatcttcgacaccctcgccgtcctcgcctgggtccccgtctacgaccgcctcatcgtccccgccgcccgccgcttcaccggccacccgcgcggcttcacgcagctccagcgcatgggcatcggcctcctcatctccgtcttctccatggtggccgccggggtgctggaggtggtgcgcctccgcgtcgccgccgcccacggcatgctcgactccacctcctacctgcccatctccatcttctggcaggtgcagtacttcatcatcggcgccgctgaggtgttcgccttcatcggccagatcgacttcttctacgaccaggcgcccgacgacatgcgcagcacgtgcaccgcgctctcgctcacctcctccgcgctcggcaactacctcagcacgctgctcgtcgtcatcgtcaccgccgcatccaccaggggcggcggcctcggatggatccccgacaacctcaaccgcggccacctcgactacttcttctggctgctcgccgcgctcagtgctgtcaacttcctcgtctacctctggatcgccaactggtacaggtgcaagacagtcaccaccactgaagcagccgctcagacttgagggccgggacccgggagattattacaatctgaatcaatttctcagaaccagtattagttactgttttattacaacc

SEQ ID NO: 9585 - DNA, 1426 bp, Oryza sativa
  ref <308>: DATABASE ACCESSION NUMBER: AK106933
  ref <309>: DATABASE ENTRY DATE: 2002-08-28
cgatttcgagggtaacttttatttccgctaaaagttttcggtttttgggtatatcaaccattcaccccccctctgattggcttagttcttatgattcgatcctataagtggaacagtgatcatccaaaaccactcgtatgcaacacgccagaagagaagaggagagaatcaattgtccattggattatcgcagctgcaatcagtgaacacgatcgatcaaactgaatagagaaaaagattaccggaaagtcgaaatgcacacggttacgttacgtgccaagcttggtagctccccagatgtcgtggtcagcgtacaagagtgcaattagatcgtgccatttcagctgctagagtgccactccgagtcgggctctgcacaaaacaaaaggaagaatctgttctgatccaggtggagacagcgacgtgaggaggagaattactcgaagtcaaaagcagtaaccatgacaagcagcgacgagaaagagaggaaggagagctctcgagaggaaagggaagaaacgaagaatcaagaatcagctccacctcccgtgccaccgtatccatccacccaaagccccggccttttcatcttgtccccctctttttttttccctgccttttcgtcttcgtcttcctctagcctcactcagcatctccgttgcaccggccaagaattccacgcagagctggccggcggcgacggtggactcgccgaggaagcaaggatgtcatgagccggcggtgtgaaggcgccgccgggggatggagaaccgggagagggcgggggccggcgccgtcgggagcgccggcagcctcggcctccgcgtcgggcaggccgtcttctcgtcggcgtccctgctgttcatgtccgtcggcgtcgagttcttcagctatactgccttctgcttcctagttacaataatgggcttggtgatcccctggagctgtacactcgccatgatcgacgtgtactccatacttgtagggtgccctcttcgggtaccaggtgtcatggtcattgtcgtcatcggagactgggtcctggcaatactttcactagcagctgccagctcaagtgcggcggtcatcgatcttctgctccaattccatggatctcactgctctcccagattctgtgggaggtatcagctgtcggcgatgatggctttcttgtcctggttcctaacggccgcttcctcactcttcaacctctggttcatcgcctcccggtgaccactgctgattgctgattctggattacgccctaactccagtatgactccacaatcagtcatggatttggataccgtatgtgcatagcactatagcttggaaagtctatttattttgtaattttagtcattgtgggtctgaatgaagagtggtgaagttacactccacatgaatacatgatcatcaatttctg

SEQ ID NO: 9586 - DNA, 722 bp, Oryza sativa
  ref <308>: DATABASE ACCESSION NUMBER: AK106934
  ref <309>: DATABASE ENTRY DATE: 2002-08-28
cacggggaggtagtgacaataaataacaactcaaacacacttgtcaccttctctccccgcatcgcaacgataagcccgtgaacccgaccccgcgcgccacccgtccttcccacccccgagcgagctagagaggaagacgatgcagctcatggcggccaggaagcttctagagcagccgggcaccgccgcgccgccggtgctgggcggctccatcgccgacgacagggacatcgtcatcatcctcgcgtcgctcctctgcgcgctcatctgcgtgctcggcatcggcctcgtcgcgcgctgcgcgtgctcccgccgcggcggcggcggccccgacgcggccgccgccaacaagggcgtcaagaagtccgtgctccgcgcgatccccaccgtcgagtacgcctccgcggtctggaagccgacacactacagcgaggtcccgcccttcttgccgtagaaggcgcagccgcatcgcgcgctccggagattccggggggctagagctagaagaggaacagagaaaccgaccaaaccataagcctgagatggttaaatttctcgtttgcttgctagattttagtgccctagctagctggaaatggatagcatttgggaaaaaattccgagtcagagatcctggtttgcaacttgcaagtggatggctgcagctttttcgctttgtacattttgtaaagtgatgagaataagatctgcaatttagctcc

SEQ ID NO: 9587 - DNA, 1233 bp, Oryza sativa
  ref <308>: DATABASE ACCESSION NUMBER: AK106935
  ref <309>: DATABASE ENTRY DATE: 2002-08-28
gaaaaaaaaaagaaaaaactcccgtctcgtcgtctccgctccttgcgagttcgcccaccgccgccggcgcgccgatttccatctcccgagcaaagcggggggagggccaccgccgccgtcgctgtcgtcctgctgctcccgccacatcccgagatggagtcagtgccactaactgctgaagctattgcttttaccgagaaaaagatggacatgactttagatgatattattaagatgtcaaagaaaaagaatcctggaggcaagaaacctgctagacaacctatcaagaaacgtccattccagaatgacaacactaatcaagggaatgcaaaggttcagcgatttatggaaactagatcgtccttaagacaaggggttcttgcacaaaggaggacaaatctgggtggaaatcagttcgcagctacaaagcaggctgcaaagaaggctgctacaatgccaatacgtagcaggggtgtcagatggaacaagccaaggtaaacgatggttcttttattgcttatgagaaggtttactgcattcaagaacttgttaaatatttttgacaaatgcacctgtggatacatgacctgagattgatcagtgctggtgtttgcatgcaactactgtattagattcaccactattggtgttcggttggtataaagcacatgcaagtttaaagttcaacagacactcttggggtatatggcctattttttggttgaactgatagaaacataatggatatgagttggagtaagctgatcagatcatactgggttgaacttgatttgtatgccaaaatgtcatcactcatcacaagcattgagcattttgcctttttcttttctggctgtgctggtcaagtttatggaatttgaaaggaccttggcatacatcagttattgcctggcaatcaatatggcaaatttttgatgtatttatggcagctgggtgactgctgcttggggaggtcagccaaaactctttgtgagggttcattattctcacttgtttggtgatctctagcatctccccatagctgttcatccccgatactggttatggattgatatgctgaagttgaatgactttcaactatgcgctgcatggtgtggatcaatggtttttattttgctttgacaacggaagtgtgaatctagcttgtagtgttttcagcaaagctgtgatcatctatgttttggagtaaattctgctgctggtctcactcct

SEQ ID NO: 9588 - DNA, 1513 bp, Oryza sativa
  ref <308>: DATABASE ACCESSION NUMBER: AK106936
  ref <309>: DATABASE ENTRY DATE: 2002-08-28
atacaccttggcttggctcttggctctctgcttctcctacagctcaacgacacgacatgccattccttcttccttgagatcgaggagagaattgagataagtcgataagaagaagaagaagaagggtcttgtctcctcttgtttctatatgggaatcaggcggcggtcagagaggttgctaagggcaatggcgtgctgcaggatagttcttgtcttcttcttcttcttcttcttcttctgcgtctgcgtcttggtggcgacgacaacgacgatggatgctgtgaagggtacgagtgctgcggccgctggcggcggcggcggcgggaggtggacggagttgacggcggggtcgccggtgaggtactcggccggtgcagacgagttcagaggcagcaagaggaggatccccaaggggcctgaccctattcacaacaggcgtgccgggaagacgacggttgcgccgcggcggagagactagccggagaagaagaagaaagcccttcttccagtgagcatctggatgagactgaaggagctatatgatgtgcactagccagctctaccggcaatgcataagatggaggatcattggctttgtgcaaagaggtagctagcttctcctttactgaagaggattttggtagtgggggtatgtacaaaagttgcaatcttccctctcaagaaatctgccatttttttgaccaatctttcgcatattcttccatgatttgatttgaatctatggtgattcctcttttttctttctttctttcccttttttcttgtgtgtaattaagaagccagagatgccgaattggccatcattctcttgccaagagtcccttctgttcttattgtcagtataggttcagacttcagagcggccaacctaacaagctgttcgatgatgtatattcaactcagttcgtgtgtgtgtgtgtgtgaacaattcattgttgttttgcaatttcactgcatcaaatgttactattcatcaaaagtgaaattcctcaacaaaaaaaaaagagaaaaaaaaatctgcactgcatggtatgacgcatgaatcatctgaagcgataggggaaagcaaaagaggagcaggaaatgagagaagcagggaaactaaagctaactgggagaagtatggtcggcttgtgtttgtgtgtgtctctgcgtggtgcttttcctttttttacttcttttgttgcaggggtgctatttttttgaagtaaccgaggagcagcaagaaaaagaatacaaaagaaaagaaacatgttgctgtatgagtgaagtgtgaagaagccagcttagcattgcttattgatcagcaggcacagaagaaaagggaaaatgttgctaatttctcaacaaacataagaagtgtgaaaaattgatatttttttttcagacttgtagtaatttgctaaaattttgagggtgaacactgctagtactttattcgactacaaatatgtgattacaatattcctcaagaaaagaaacaatgtttgct

SEQ ID NO: 9589 - DNA, 1007 bp, Oryza sativa
  ref <308>: DATABASE ACCESSION NUMBER: AK106937
  ref <309>: DATABASE ENTRY DATE: 2002-08-28
accagacaccaagctgaccgatcagaccagcggatggcaatggcatcctcgttgatccgcgcattggattgcacggctacgcccggaacacgtggtgctccagctccggtcgccccgcgtcgccgcgtcgctcgtgttcgactggcgccgcggtgccagtggaggcctctcaccgcgcgtgcacaggcggcggcgacgcagccggacccggaacaccaggcgcccgcgaatggggggccgtcggcgtttcccacgaccgcgctgaaggtgggcgccggcgtggcgctggcgctggctctgggtggcgcgtcgtggagggcgcgcggcgggagcgccggcccggtcctcatgcaacccgccgcggtgtgctccctcaacgtcgtcacggacagcgcgtcacgcgccaccgcggaacggagcgccgccgccgcggccaccatgaggacgagcgtggacgcgctctccgactcgctgttccggcgcgaggacgcgcccagggaccgcgccacactgatggacctcgtctttgagcaagtcaccaaggagcaaatcggcgacaggggaaagctgacgagcttgctgcagaaggagtggtcggcgtcgcgcgattccgagaggaagcttgacctgggcttgctgctcactgacgtactgatcaaccagagagaatggcagagggcaaaagaagtttgtcagcaattgactggccgataccaacgtgactcgaggccttacctgcacttggctgtcatcaacatgatgatggcagtggagaccatgctttctcctgaaacagccaatagtgacgacattgagaagatgtcaaagaatgccatggacgcgtggaaggaattcaagaccaagtatgagcatgccaaggggtcaactgattccagcacctgactgaccagtattatgcttgctttcagacaaatctttctgttgagtgctgacaactcttgtgatgaatctgtcttacccacttagttgcttgtgaagtttgcccc

SEQ ID NO: 9590 - DNA, 1000 bp, Oryza sativa
  ref <308>: DATABASE ACCESSION NUMBER: AK106938
  ref <309>: DATABASE ENTRY DATE: 2002-08-28
ctagcgataaccacattactcctccggagcctcgtctccaggtactcgaccacgtcgccgacggccgggagcaccttcctggcggcgtcgagctcgccgaaccgctccgcccacgccgccagcagcggcgtcctggcggcgtcgagcaccctggtccccgtgagcgcctcgttcgccctcgtccgcgggatcaccgaccccagcgtgacgtcgacgagccccggggcgtcgccgccgaagaagggcttcccctccgcggcggcgagggccccctccagcgcccccaccgcggcggccatccgcgccatcccctccgccctctccccctccgtgctccccaggtacgccggcctccacgacgccacgaactcgtcgtcgacgtgggcggcccagaagcgggcggcggcgcgggcgagggggtcgtcggcgggggggaggagcggggcgccgccgccgccggggaaggggaaggcgtcgtcgatgtactcgaggatgacccgggactcgcagacggggcggccgcggtggatgaggacggggaccttggcgtggacggggttggcggcgaggaggaggtcggtcttgcggtcgaggtcgacggcgacgaggtcgtaggtgaggcctcgcagggcgagggcgagctccaccctggtgacgaacgggctagggttcgtgctgccgagcagcttcagctcgtgatccggtgatcctcctcctccggcggcggcggcggccatcgtcgtcgcgcctctgccgatcgagcgatcacgtgttgggcggattggatttttagttatagacgggtgctggatcgagatggttgttctggagtgggaagtccgcgggtggattgcgtcatccgtgatgtcaggacaggcgaatgtatcttccaatgcgtcactgtcgtcatcatcatcatcttacaggaatgctgcaatgcacgtggtgcattttggctttgtgcaatctccgtttgttatcttaaaatggttagaggttg

SEQ ID NO: 9591 - DNA, 1633 bp, Oryza sativa
  ref <308>: DATABASE ACCESSION NUMBER: AK106939
  ref <309>: DATABASE ENTRY DATE: 2002-08-28
gctgcagcggagcaatcgcccatcgccgtcgtactccccatctcgtcgctaccgccgtccccaccgcaccctcccccttcaccgctggcggtgaaaccagccgccgccgtccgaggaggtctgtcctctctctcgcgcgcggtctcatctcttcctgctctctctcgttcctctcttatcctcacgcgcaagagagggagagcggagatggcgcgcggcgactgggtggcggccgagcgcggcggcgcggccgggcggcttggcgtggcgtcgacgtcgtgtggcggcatggcgatgggagcagtggagaagtggtgcatcggtggatggggaagcagaggagggaccacaaggcggcggccgactcggtcgagacgacgcggccgctggggtgatcgcacgtcggcgctcggcccggcgccatggtggcttgggtcgggcggagacggcgatgccgcgcatatggcgtgggtgacggcgcggccactcggcggggaggccaagacgtcggcgaggcagcggccgggcgtgtcggcgcaggcgacggcgcggcggcaaccagactcggctgcgcggcggcgcggccgaggcagaccttaaaagaaaaataaaaaaaaacaacctgccgcccgcgccgtgcaacctggaggatcgaggcgggttgttctggtcgatttcggccacgacgggggctgggcagttccaggaggcgcttcgcatgacgggctcggcagggggcagcgcactccgagtccacggcgtcaccaccatgagcaggaaccccgacggctgtcctccatggctcatacgactgcaccgtccggcctccaacacaacggctgtcctcctagagtcccggtgaacgcagatcgacctcatgggtgacttacaggagcttcccggacctacggcaacagtgatcgaggaactctgctgctcgaaattaggagatgggattctagaatccattgcttacatgataatgaaggtttggtgattacctgaaatttggaagcagtattgattttctactagaagattgaaaggaggtacatgccagatccactattcattgcggtgctattgttaatttataggttcaaattattcaagctgttggtctgaatttattcccatacatcagttcaagctgttgtggatcctaagaaccaagctggatttattggacaacatcctattacgagatcgcaagagattcaggtagactctacgggtgattgctaagcaccaagtaaagaattaatacaaaggaaattgttaagtctgtcttctgtactgctagaagttacaggtgacgtacacgattgtttgtagaagaggaaactgaggaaggcttctatgcataacgtgtccataccttactcaattgtttggtgtccatcaaagaaatgtgccagcacggaagtcagtagatttctaggcttgcatatgtagtaacgacaatcatgtatttaggtgcactcgtctattattatgcactcatgaaatttggtttgctggggtgtaacctctgatctctctttacttttgagcttaatatataagttgaattagagttattgtaaaggaaactttacatgtaaattgcatatatgataaaagatatttgatt

SEQ ID NO: 9592 - DNA, 918 bp, Oryza sativa
  ref <308>: DATABASE ACCESSION NUMBER: AK106940
  ref <309>: DATABASE ENTRY DATE: 2002-08-28
gtgatcgcgaccactggttgcgacctagccggccgcgccgccctctgagccgccgccggtctcgtcgccgcctcgccggcgcactgtccccctcccccctggccgccggcggctgcgattatggcttagatttgcacctcgccgccgcttccaatagtgacctcagcaagaagaaccgaagagcagccgccgtgcaagaagacgacctgaagctccgtctagtccgagtacacgctgggatggggcaatgcaacctcgtaccatccttttcatcatttttctcactgaacttctgcgttgtgttcttgattgaaactcatagggcgatattagaaaggtgattattattatttctttgaggggaagaaaggtgattattttgtagagtgaacttggaagagctccagaaccaggggcctgtcagagcactcgtttcaggcttcgattcagagaggcattggcgacattacgttgtctctgctgacagctaagattgcaatgggcatggcaagtgtgaactgctgttgcactgggatgatcccattcagctatataccagcggtttagcagtaactgctctattatgataatgccagcaaaaatatgagcagaacatcagcatcagacccaccggtgtcgtcgacgtttaaaagtaatccagccacaatcttcctctgttccctaccttcaatttcctagctactttctaatggtgacattgatctgaccatatcatcaccacatcaggattagtataatcatcttcagaaccgtttcctcttggctgtatcacccaatttggaggacaagtgttatattttactgccttttttctgttgctgagaatatgcaagatcatcgcgtatctcactacaagaaaaggtgaagaggcgaaagatagatgccccaaatccactt

SEQ ID NO: 9593 - DNA, 1184 bp, Oryza sativa
  ref <308>: DATABASE ACCESSION NUMBER: AK106941
  ref <309>: DATABASE ENTRY DATE: 2002-08-28
gaatatgagtgggattggctgagagcgtccgaaagtattttcctcgtcttcctcgatccacgcttctcgcaagatccgatcgactcgatcgacaatctcagctgctgttcgttcgtgcgtgcgtgcaaccggatgtgagatcgatctcccgtgcgctgtgagacgcgcgtgcggagatcgatgaggaaggaggagctggactacgtgctgatcccgctggggatggcgctcatggtggggtaccacgcatggctgctcctccgcatccgccgccgcccggcgaccaccgtcatcggcgtcaacgccatcaaccgccgcatctgggtccgccacatcatggaggaggcgtcggggaagcacgcggtgctggcggtgcagacgatcaggaacaacatcatggcgtcgacgctgctggcgtccacggccatcacgctcagctccctcatcgccatcctcatgtcctccgccggcggcggcggcggcgatgggctcctcccgggcgcgccgctggtggtgggcgccgcgggcgagacggcgctgtcggtgaaattcttcgccatcctggtgtgcttcctggtggcgttcctcctgaacgtgcagtccatccggtactacagccacaccagcaccctcgtgaacgtgccggtgcgcctgatccagcgccgccgccgcccgggcctcgccgtcgactacgtcaccgcgacgctcaaccgcggcagctacttctggtcgctcggcgcgcgcgccttctacttctcctgcccggtcttcctctggctcttcgggcccatccccatgttcgccgcctgcgccgccatggtctgcgcgctctacttcctcgacgtttgcgacgactgggaggaggaacaccaagaccacgacgagcaggatggaagcgggagtgatgagagatcaggagaagcgaaggtctgagcctatgtgtgttaggatgctacgtagataatttttttttaaaaaaaagtacttcctccgtttcaggtaataagacgttaagtcaaaagtcaaactagtttaagtttgactaattttttagaaaaaaataatagtatttttaactcaagactaacatattatgaaaatttatttaattatagatttaataaaagtatgctggtgttgtaaatattactacatttttctatagagttagttaaacttaaagt

SEQ ID NO: 9594 - DNA, 1517 bp, Oryza sativa
  ref <308>: DATABASE ACCESSION NUMBER: AK106942
  ref <309>: DATABASE ENTRY DATE: 2002-08-28
ttgtgacttgtgatttatcactttccttctaaagggtcatctttgggaccaaacaacatagatatggtatgctgacttctgtttaaatgtgtttgcatattgaaataaatattgatgttagattccctgaaaaagttgtcttgtgtagtatcttgtgtgggggaattggggaaatcaagtgtgtggccttgtttggaaatatggtatgcacctaatttctttggattggtagagaattgagaactgaagtccctgccaaaccaaatggattgggttcaatccaccttcaaaacatgtcctgaagaggtaggtaaggtaggtaactatgtgtgcaattttgaatggcatgttgttttgcaggaaggcatgggcacatggcatgcagagatatcatggctaatattttctatatgtagggattttgtagagcctccttgtaggggatgaaatatctggtcaaaattttgaggagatttggatttcaagtggtattaataaaaagctattggattttgctatatatctgatgagagagataattaagggcctgttcactttgatgtcattttaaccataccattttttggcaaagttatcaaaaaaatgtctatgtttaatttgttgctaaatttagtcaatacataagaaatcctgctaaaattttagcaagaattttggcaatattaccatctcgccaaaattttggcattgccaaaacttggtaaggtttagtttgactacaatctgaacatgccctaaattgatgcgctcctactacagccagcaacaattgactaaaaggtggcatagaaaacagacagcagaataagtactgatcaagtcacatgagtcacaagctcattgaataaacttattcagaaaaagtttcctggtctgaataaactttttttctggatgtactttgaatacatacatgctcatggaactgagttgtgtttatggcttcatcccttccaggtattcatccaagctttatatgcgcccttgatatgcaaatatcctttttttttctggaacagtgagaatattctagctggtctctctctagtctctattactactgatagcaagtaggagataagcttttgcttcctgaaatggctgaattattgttgttgaagagctagaagtggatatggtacaaatctttctgtgactttgcactgtggtgagctgctgaacttttttccaagtggagggtggaaaaagcaaactggtgggccaaaaaaaacgacctccactgctgctgggttggggtcattaggatcaggattcagatggttgatatttcacaattgttgggactgatacttcgcaattattgagtacgtttaggaatttggatgtctatctgttcctactagtacctctgtagcgtgtgatcattgatgtcaggtcaacttgaacagtgtgtcagtgtggcattaattgtaccagcatcagtgaaatgggccaatcaagtactaggtggtgatgataattgataatgttgtgtt

SEQ ID NO: 9595 - DNA, 1922 bp, Oryza sativa
  ref <308>: DATABASE ACCESSION NUMBER: AK106943
  ref <309>: DATABASE ENTRY DATE: 2002-08-28
aatgcaatgttctttccaatatcgcaataagccgtgtatatatcctcgttggatgtagaggtcgggtttttatgtaaaaaatttttattgtggcaattaatttccatgtgcagcatgggggatatggtgttggtaccctggggtcggagacggtgatgcccatgacgtaggtgagcaggtcgaacatggactgcagcgagttctgcacgccgccgacgacgcaccggtcgctctccgggacgccgtcctgcatcagctgcatcacggctaggtcgaacatccacagccccagccgcgacgccgccacgccgcccatcagcatccacgccgacgccaatggcgcggcgccgccggcccagacggaggcgacgcagacgaggaggcagcaccactgcgcccagatggaccagaggcccgcgcggagcgtggacacgcgggcgtgcgccgccgggtacacccacgtcgcggcgatgccgacggcggcgctgacgccgcgggcgaggctgatcacgtatgccgggatcccctcccagtccagcgtcgccgtcatcagcgtcccgaagctcagcacggtgaagtagaggaacgcgagcgccacgccggggagcaccacctcctgccgcgcgtacaccgcccacgactcccagcacggcagcatcgtcatccacagccgctccaccttctgcggctgcgccgccgccgctgcctcgtcatcgtcggcgcgccgtcttgagatctggctggtctcgctgagcgccgggaagccggcgtagacggagacgaagagccagtactggacccacacggcggcgaggttccacgccgccagcgccgccgcggaggcctccatggacacgaagctgatgaagaacccggacagcaccggcgccagcagcttgcagctcaggtcgatccgccggatcaccgagttgatccccgtcagcaccgccgccggttgcccgccggcgatcaccaccaccctgcacgcagcaaattctcagcaattttctcgatctatcaatcgatagatgcgaacaccgaacactaccattctctctcgatcagtatggtgccagcgagggtggagagcgcggcgagcgcgccggagacgttggtgacgacgacgagcgccacgaacgccgggaaccccgcggcggcgagccgggcgccgtagacgagcagcgccgtgacggagacgccggcggcgacgaaagacgcgccctgcagcagcagccacagcctgagcacctgcaggtatgcgagcctgtcgacgacggcgccgacgatggggcccagcgccgccacggcggaggcctccacgacgccgtacaccgccgtgagcaacagcgagcccggccagattcggatcatgtagagccccaccgagaactcccacatcctcgcgccccacctcgccaggaagtgccccacgtagagccgccggagaagcgccgcgtcgtccaccccgccgccgccgtcgaggagcggcgccgcgaggtggccatcactcgccatacttactcaccttgcaatcttgaatgattcttgatcgatcacacaagaagatgtacggatcagaggccaatcgatcgaaccgcgacgagactgatcgatcactccgatattgatgtgaagaagagattgattcttagccaggagagatgagtggatcgagggattgaaaaagagaggatcatgcaggtgaagggtgagacaagaacacgtctgcatctgagcagtcagggagacgctgctcttgtgctacctccggtttactacctgacagaggcagcagctaacctactctgtctctcaaatagtagtaaatatcgagagagaattttaaactctggagggatgtcctcttttattatttgcatgtcacctaaatagttataaaaaaaataagaagatgtactaac

SEQ ID NO: 9596 - DNA, 1283 bp, Oryza sativa
  ref <308>: DATABASE ACCESSION NUMBER: AK106944
  ref <309>: DATABASE ENTRY DATE: 2002-08-28
atccccatccgcttgctccgcctcctccgccgatctcccccgcggctccgcctctttctcccttgctccgcctcctccttcgccgatctcccccgccgcaggcgctcacgcccgctccgcctcagccgtcgctcacgctcgcttccgactcccttgctccgccgttgatttcgcccgccgcaccaggtcacggcagcctcgacctctgccgatctcccccgccgcaccagtccggggtggagatggacggcgacggatacggcgatggctccggcacaagggacttcatgtcgcagtccgattcacacgccgaccacgacgagctcgacccctacaccgactccctgtactacactggatcccgcagcggcagtgcctccaggataggcatggccgccctcgacctcaactccggcggggatgggtggccggatttggggagctacgagggtcttctttgatccggctcgcaaggaggcgtcatcagcggaggagggggccacctttggggcggcgcacatggacgcggcgtcggcggatctgggagccaccatcgctccgcctcgcaaggaggcggctctgctgatctccctcccgtgcgtgctgtgagtcggacactgggcttacgctcggcccgccctgctccatgtggccgaggcgccacggcagctcgcgccaattcctcaccgtatggaggtggccgttcggcgcccgcggccggagccaggggccgtggtggtggtcgaggcacgcaggcgaccggagccaggggccgtggtggtcgtcgatccacatccacggctgccaccgtctctgaagtcaacttggacgtcgactccgacaacgtcgaagatgccgccgagctccaagaaattttccaaaatcatgggaaggttaaacctgacagggccaattggacagaggacaataccagcttgctgtgtgaaatttgggttgaccagatcaataagggaaactgcgtgaatggactcatgcagaagactgggatgagggagattatcgctgcttatcatgcagcaaccaacctgcggcatggtagatcccaaattactaataggattaggcaactgaagggattgtggcaattcattcaaaccctacgcacaaacactggattcaatagaatatgactactgtagtgttgtaatatttgtgttgtatggacttttaaaattgtgcactgggacttttaatatgtatgtggacattttaatgtttctatgctatggacttttaataattatttggacatttttttgttg

SEQ ID NO: 9597 - DNA, 1790 bp, Oryza sativa
  ref <308>: DATABASE ACCESSION NUMBER: AK106945
  ref <309>: DATABASE ENTRY DATE: 2002-08-28
acagccatcccattgcctcccttgatactgccgataccgcccacttgactgtctggagtacctctccccaatctcagggcgcagcggctcgtaggggctcggcggcaagccgtgcccataccgcccaccaccatagcgtgagcggtgataccctggcattggtggcggctcagggttctcagggagcagcgagagcgctcgtcggcccgcccgacggtgctcccgcggcggctcgacgatctggcaggtcctcgtgatctgctccctcagctcgtccagcttgcggagcaactccactgggtcctgcttcagcgcgtgccagtcgagcgccctctgctcgctgcattgcgcccgctcgtcgagcccaatcctccgcctgtacttcatctccttcagatcgctccccatggcgcgcgcctcccggagaagacacgcttcctactcccccaccacttggcggatcgagaggtgacgctgtgttctacacggattgagagaaatctgtgaggcggttgggacggtggaggaacagatcagcagtggatccagagaagatgccaaatgaggtaagatccgccggttccgcggggggatgggaggcgaagcggggattaccttccgaccagctcgctgcggcgaggctacggcacaggggcgtggcggcgccgccggctcgccatttagggtttcgtggggcggctcgaggattccgccatgggagagaggaggaggaggaggggaacggcactcgcagtggcagtgtgcgcgtggtaacggagacgacgagggagccaactgaaagagccttatatatacccacgagcccacgagggacctgtttgtaattagtatattttccgggggggtcggtcgcggtggggtttcgtggggatgtggtccgcttttggaatgatctggctgcgccgctgacgtgggggggtcaaaaggtagggcccacgtggaagcgagcggcaaaggtggggtacagctggtgaaatggaattcgccgtatctctcttcttttcttttctttacttttccatttcgtcttgggagagccattatttagcattttagcatcagtcctgcataacccacagtgataattaaattagtagttaatcaatcacttatccatcgtatgaacacttgaacaggctgaagctaagataatggtcacaatctcaactactttcttagtttggtagtaccagcatcaattctttcattcttgtgccaaacatctcactgggagaaacaataaaataaggccggtgatgcttgtacgtgggatagttggttatttgtgaaggcgacctgaagaatggcatttgcctttagctgggagcttactactactaacattttgacaacagatttcgtgtaagcaaaatagccaactgtttgtgtctctcatcaggccttccaattaagtaggcctacttgcaaagccgcaacaatggcggacatgattactggtatgattcagtagaatcttagcggattaaacggcttgaactctaaggatgctgcacatgcagggcaatgtcgttccaatggccactagacaattagtaattttagtacttgttaagctctttagtatcagagaactaacaggtttaattccctgagcacatgtctgcagctttaaatttcccgtagggcctttcataaatcacaattatgtactcctacccttgcttgcttctagaacacacagttttcttttcaagctgtcatcctcctcctctcatcagctgatataaacaaggcatttatatggacct

SEQ ID NO: 9598 - DNA, 1742 bp, Oryza sativa
  ref <308>: DATABASE ACCESSION NUMBER: AK106946
  ref <309>: DATABASE ENTRY DATE: 2002-08-28
gacaagctagcacataactgaactgagcaaagcaacgcagcaagtccatgaggaggctggcggtggctgcggcggcgctgctcctcgtcgcatggcacttctccctgataacaatggcagcggcgcagctgtcaccgccacagccaccggacgaccaatacgacgacccgcccatgcctgggctcccggtgtcaccaccgtcgccggggtattccgattcgccggagccgccgctgccggattccccgccatcacaggagcctgacacgccggagccagcaccaccaacgccgccccagcagcagcagcagccgtggcagtctccattgccaccaaggagggagccggcgccgccgcggacggtggtgccgccgcaggagccgggctggtcttcagtgccgccaccgccggcgagggtgatcaactacaccaccaccgggtgtaccaccatgctggtgttcggtgactcgacggtggatcccggcaacaacaaccggctgcagacggcgatgaaggccaacttcttgccgtacggcgccgacttcctcggcggcaggcccaccggccggttcagcaacggccggctcatcacggacatactcgcggaaaaactaggtatagcgaggagtattccaggattccgcgacccaaggttgaggtcaggacagctcaggaggggtgtgagttttgcatcagcaggttccgggtatgacgaggccactgccagaagttcgaatgcactgtcatttcccaaccaaatagaggacctttggcgttacaaaaggaacctgcagaggttagttggacgaagaagagcagaagaactagtcaggagggctacattcatcgtaagtgctggaacaacagatctgctttttcactatcttgcctcaaaccagtcagcagcagagagcggcccacagtacgaaaaccagctgatatcacgcgttgctaactacacccaggtgatggcagcacttggaggaaggagatttgtctttgttggagtgcccccaattgggtgtttacctattgctagaacattgctaggcacaggtacaaccagatgccatgaaaacatgaacttgctggcaacctcatttaatgagaggctagttgaagtggtgcgtcttctaaagaatcaaccaaatatcagggctacatttgttgatacttatacaaccatcggcatggcaacaataagccccaataactatggcctgacagaaacctcaagaggttgttgtggaacaggagttattgaagttgggcaaacatgcagaggccgaagagcatgcacacatcccagcaagtacatatactgggatgctgcccaccacacggagagaatgaaccaaattatcacagaggaagtgataatgaactcaattggagaaatttatgcctagctcacgattgtgaattcagatttgcagcccgacaaatcaatttagcatcctaatttactgtggtgcatacgagcacatagaacaatagttcagtagaagagatcgattatataatatttttcatacaaaatatgctgtgtgcgaaagagagtgttacatcatagacgcccaagacctatgatgtcaactgaagtggttaccattcattctactttcactgtgatctataattgtacacttgacaactcttacagggtgtatgttagtttgcaaagttgtctagcaggtgatatcttgattacgcaaaatgaaattgcttccagccttctgtag

SEQ ID NO: 9599 - DNA, 1658 bp, Oryza sativa
  ref <308>: DATABASE ACCESSION NUMBER: AK106947
  ref <309>: DATABASE ENTRY DATE: 2002-08-28
acactgcgctgagcgcctgagccgtgaggagagtcaacgcaagctgacaagcttttcccaattccatgagcgcatcagactgcagcctctcatcacagtcgcggagtcccatcccctgttccgaaatgagtccgaagaagctggctgtcatctacccgccgccggggatgatcagccacttggtctccacggtggagctcggaaagctgctcgcggcgcaaggcctcgacatcaccatcgtcctcggtggtcatgacgaaaaggaggccgctgctactgctaccacgtctttcctggcggaagccgcggccgccaacccggagctctccttccatcgcctccctcaacccacgctccaatgcgacgtgcccgccgatgattacgtgtctcggatcttcgagttcgcacgctcttccggccctgatctacgtgactttctccggtccacctccccggccgtcctcatcatcgacttcttctgctacagcgccctgaacatcggcgccgagctcggcattccgacctacttcttcctcaccacttgcatcgccagcgtcgctttcatgctgtaccttcccgtcgtccagggggagaataccctgagcttcagagatctcggtggtgacctcgtgcacgcgccggggatcccgccgataccagccgaccacctccccaggtctcagttcgaccgcgacagcatgagcagcaatcacttcctcgccttgtccgaacaggtgtgcaacgcgcacggtgttatggtgaacagctgccggtccctcgagcggcgcgccgctgacgccgtcgtcgccggcctctgcacattcccagggcgtcgaacgccgccgttgcactgcatagggccactgataaagccgcgggaggacgacagcgcagagcgccatgagtgcctcgcctggctggacgcgcagcccaaggacagcgtgttgttcctctgtttcggcagcatgggcgtgttcagcgtggagcagatcaagcaggtggccgtcggcctggagacgagcggccaccggttcctgtgggtggtgcgtcgcccgcctggcttcgagcacgttaccgggcccgacctcgaagccctcatcttcccggaaggcttccttcgccggaccaagggaagggggctcgtggtcatgtcgtgggcaccgcaacgcgaggtgctggagcatggtgcggtgggtgggttcgtgacacactgtggatggaactcggtgttagaggcggtcacagcgggggtgcccatgctggcatggccgttatacgcggagcagaggatgaacaaggtgttcttggtggaagagatgcgcttggccgtggcggtggaagggtatgacaaaggggtcgttacagcagaggagattcaggagaaggcgaggtggattatggattcggacggtggaagagagctccgagagcggactttggcagccatgcgggaggtgaaagaggcgttaagtgacaaaggagagttcaaaatagcgttgttacaactcacaagtcagtggaaaaactacaataactcataagtcagcagaaaagcttctgagagagaaggatggagatatgaacagtggtgttcatgggctagcctcctccaccatttgatttaagggaaaattgtaaccatgccattataattttat

SEQ ID NO: 9600 - DNA, 1774 bp, Oryza sativa
  ref <308>: DATABASE ACCESSION NUMBER: AK106948
  ref <309>: DATABASE ENTRY DATE: 2002-08-28
attgctaagtagtatatttaacagggagcttagtgagcttgctgtgaaattgcaaggctcttgttgttcttggcgagtgtggctagctactgcttgctgctgccgcggttgagcatctccttgtagttgagcagcgagttgagcctctgaagctgcagttgctgcctgaatttgttgatgaagtcgtcggctctggcgtccacgccgccgtcgtcggcgtcctccgccgccgtgtccttcctcgcctccgagctcgacttggtcatcgtcttcgcctccgacgccgcctgcttcttcgccttcttgtcctgctcccgcgccggctccgaccgggtcctaccgtagtgcgcttgtgcgggcgttgccgccgccgctgcgtcggcggggatgtcgtcggtggcgaggtcgccggagcggaagctgtagagggtgaacgagcggaggcggtccaggacggacgacgtgcgcgcgagcggcgccggcgccggcgccgggggaggaacgtattcttgctggagcggcagatctcgctgctgcttcggtgtgaaatcgtcttcggccgtcgcgtccacggcggccgcggcctcctccgggaacgcctcgaccaccctcgccggagccctcacgacctctgccctcctcacctcggagctcgagttcctcagcctcgacgccgccttcctctcctcctgcgccggcgccgccgccggctccgaccggctcctcgcgtagtgcccttgcagcttcacctcatccaccggagacgaagacaccacctcctccgtgcgctggtggtggagttggctcgtcgccgccgccgcagcagtagcgtactcgggagggaagtcaccggagcggaagcggtagagtccgaacgagcggagccggtcaagaacggacgacgtccgcgcgagcggcgccggcgccggcggcggagcatacagcgtctcctgcatcatcatctgctggtgctcaccgccgccgtagtattgctgatgcagcagcggcggcggcggttgcaactggtcgtggtggagtatctccccgtcgtggtgatactggtacacctgccgccggcggcgctggtgcgtgcgggaggtgagcgcgatggtgccgatgacgatgttcacgacgaggaacagcgtcgccggcgtgaagtacccgcggatcgccgcccacgcgcccacccccggcgacgccgcctccgccacgtccatctatcacgcggaggctagcaggggaaagcgcggaaacggacgacgcgggcgagagctcggtgagcggctgtggtgtacaggtggggattagcgtttttggggcggtgtacgggggtttgtgtgggttggctagcacgagggcgtcgcggaggcgagcggttaaaatgacgggcgaggcgaggcgggcgggggcgacacgcggcgaggcggggtgggagatggctgacttggtgggtggaaaacgtgggaatccaagctgccgcccaagcaggcaagcagcagcagcgcggggagccgacccgccgggattgcagctgctgcatctgcatggcatcttccgccaaaaaaaagacggcctacgacgcgtacgctgacactgtagtatgtggtggactggagtacaagtcactgttgctactcggctactccagccgtcctatggcacgtgcatatacagtggtatgtacagttgacatttttccatggagcacacgacagaataatgatactacgagtacatgcgtacatgagatgctacaatatactcccttcgtttc

SEQ ID NO: 9601 - DNA, 855 bp, Oryza sativa
  ref <308>: DATABASE ACCESSION NUMBER: AK106949
  ref <309>: DATABASE ENTRY DATE: 2002-08-28
acaccacgtcgccccgttctggttcttgcttcaacagtgtttggacggaacagtccggggtccccttccagcccccctcgctcctgagacttctggtctttgcagcccgccagccccctgccagccctcgggaccagccacctccgggaccagctgccccctgccagccctcgggaccagccgccccctgccagccctcgggacctccgggaccagccacctctgggaccagccaccttcgggaccagccacctccccccttcgccgtcggtgccatgagctccagctcccagatccgccaaaacttctcctccgaggccgaggccgctgtcaaccgcctggccaacttgtacctacaggcctcctactcctacctgtccctgggtttctatttcgacagggacgatgttgccttgcctagggtgtcgcgttttttccgggagctggcgaaggataaacgcgagggcgccgagcgtcttatgcggctccaaaaccaacgtgggggccgtgtcctcctccaagccgtgcagaaacctgcccaggatgagtggggccgaagcttggatgccatggaggctgccctgaacctggagaagggtctgaaccaggccctgctgaaactgcacgccctgggctcgagccaaggggatccgcacctctgtgacttcctggagagccattacctgggcgaggaggtgaagctgctgaagcgcttgggtgaccacctgagcaccctgcgccacctgcaggcagacccccaggctgggctgggcgagtacctgtttgagaggctgaatctgaagcatgactagggggagcagcccgaacacccacaataaagcttgctgctcaccc

SEQ ID NO: 9602 - DNA, 2529 bp, Oryza sativa
  ref <308>: DATABASE ACCESSION NUMBER: AK106950
  ref <309>: DATABASE ENTRY DATE: 2002-08-28
tttctaaatcttgatttcccaataaaatccatgtgaacacgtcctatgtatctttgaccgtaattatctaagtcatgctgagatttatcctttcaatatcatgagccagtcttttccgccgagattatccttcttttcttgcatttctgacataagagggatgtatttattgatgtaaaatttccggaattgttctctatatgttggagcctgaaggccctgtaatattttatttttctgtactttatatcttatccctgatataaattaatccgtacataaatcaacccacaatgtcaagaacctactaatatatgacatcttagaagagagagaaatcgttcaagaagcaaacttggagaagtaatgtggacatgtggtagactgaccattcataacgcgttctcaaaaaacaaaagaacaccattcataacgcgcttgtccttaacgcgtttgccgatgtgtatgtgtgttttgtgttctctttctttatttgtttttacttggggtaggtagcctatttcaaagattccaaagaatgagtaatttttctagaggttatgaatacgatagcagttttaaaaacgggtttatccgcgtgtgactttgtaatcatggcagagcttatccgatgattgatcaaagtttttatttacatttacagttccttatttattaatatattaggcaactagttttcctactttagaaaaaagttcactttcatttgagttaccagatcgtttgaccgctgattcgctatacactgtactgaatagtagcaattttttgctatttatgtccgaacatccagaacacccaaacaaggattatacacaacagtaatgacttgcacacttgaaaatgattggcatgttagacatttagaaatgccctgttgctgctcatgtgtgaacatttttagacaaaagataagcgatccagctttcgatagaaagccacaacggcttcatgcctgaacatttccaaaacaagggtaataaaatcacaagagtaaatttggggcataagattttattgatggtataatagtaatgacttacacactgtttaatgactttacgtactgtagttctatgcttctattgctgtatgagcatatactatctgtaaatccttagtacacagcaggcagcaggatgccaggataaactcttgtctgcatgtctgagcttggacaccgatggactcactctagcaatgaaagtacagtagtagtacacttgaactgactcaggaaccttgttctatggcttgccagtagactctgcagcactacacgcaactctctccataccaatataagtgcaacctagcacgaatatgatatattttagaactacgaatctagatagctacctatctagattcgtagtggtagaatatgttacagccgtactaagttacactgggatggatggaatagcaagcaacggcagccagccgacccgttcttgtagatgcagtgctaattcacccagactcaacataggttgagcgagaattattgtgttcttgcatagttgcaaatggtgcagccataagataagaattttcaccgaaccgcagagcgtgttgacgaaggagtggttggtgttgatctctctctccttgctttgcctcctccatgtcacgcgcctcgatcggcagcttcaaccgaggagcagaacgacgagtggcggcataccaagaaagagtgtgatccacgccatccccggcgcaagaacggcgaggagccgccgaagcggcggcgccaccggcgtgacgcgggcgtagagctccatgacgccgacgtagaacgtcgccgggacggcgacggtcagggtggagacagccatgcgcaggacggggtggtcggccgcgccgtcgtactcgtaccccgcggcggcgtcgcccaccgcgaaactgttggacaggatcgcgaggatctgggcgaaggcgacagagaccaggatggccaacatggcgagctccgcagaattatctgcgaggaaagaggagaaaattagaaaagataacacgcgatcatacagagaattagaggtcgatctcatggcgatggcctctcacctctcccctcacgtccaccgggtggagaagagggggtggaggatcgagcgagtaaagggggataatataggctaagcactattaaaccgcggcaaacgacggcatcgaggtttaatcggtcacatgacagtcagtacgtttactagctagccgttcgcggtaaacagtaccattccgttttgatttctaatcttttcgcccatcaaaagatgagatagtgttgctacacgaacaatttttcttcagactcacaagtcaatggtgtggagggtttctgggcaagatgaaagaaacttcgcggctacatgcacgcattttgttttctgaatatgtaaaatgtcattaactcaacatcagctagtaccgtagtttgtaaaattgtttggcaagaatgtaccaggtattttctctctttacagtgggtgcaaattttaaact

SEQ ID NO: 9603 - DNA, 574 bp, Oryza sativa
  ref <308>: DATABASE ACCESSION NUMBER: AK106951
  ref <309>: DATABASE ENTRY DATE: 2002-08-28
atcaacctccaaaacacataagagaaattcaataattacacacaaaaaaaataaggcataagaaggcagctgcagctgctagctgctgttgttgttggtagtagttttttgggcaccaattttccatggagacgaaggtgaggatgagctgcaggttgggcactatggtggccctggtgctggtgggcgtcgtgctggcggcgatcctgcaggaggccaccgtcgacgcggcatcgtccagcagcgactcgccggcggcgaaatcgggcaccggctacctcgactacggcaacctcaaggcgaagctgcctccaccgggcgtcgccgttaccaagaggccatgcatagcaaaagagaaatgccgcggctgatcgatcgatcgatcgatcatcaccgacgtacccagacggatgaaacggatcgacgtacgtactgcttatggtgtcagcgtgttcttgttttttttttcttttcttttctttctttccgatggaattgaaacgtgtgtgttcttgtttttcttcttctcatggcatcgccttggctttctatatataatgaggtttttaatgtc

SEQ ID NO: 9604 - DNA, 1840 bp, Oryza sativa
  ref <308>: DATABASE ACCESSION NUMBER: AK106952
  ref <309>: DATABASE ENTRY DATE: 2002-08-28
ttttttttggctattgttgcaatggcagtcgtcgccgtcgccgtcgtcatcgcgctcctcgccgccttcctgacgccgctggccgtgtacctggcgaggagggcgtcgccgccgccgccgccgcggcgcaacctgccgccgggctccctcggcctgccgctcatcgggcagagcctttccctgctgcgcgccatgcggcgcaacaccgccgaccggtggctgcaggacaggatcgacaggtacggcccggtgtccaagctgtcgctgttcggcgcgccgacggtgctcgtcgccggcccggcggcgaacaaggtggtgttccaccacgaggcgctggcgcccaagcagccccggagcctggcggcgatcatcgggaggaggaacatactggagctcgtcggcgacgaccaccggcgcgtccgcggcgccatcctgcagttcctcaggccggacatggtgcggcggtacgtcggcaagatcgacagcgaggtgaggcgccacctcgccgccaggtgggccggccgccgcaccgtcgccgtgttcccgctgatgaagacgctggcgttcgacgtcatcgccaccctgctgttcggcctcgaccgcggcgccatccgggagcagctcgccgacgcgttcgacggcatgcacgagggcttgtggacggtgccggtggacctgccgttcaccccgttccgcagaggcctcatggcgagcgcgagggctcgccggctggtcgaggcgaccgtgagagagaaggcggcgaagctggagcacggcgagtcttccccatccgacgatctcatcagctgcctcctcagcctccgagacggcggccggcagctgctcaccgaggaggagatcgtcgacaactccgtgctcgccctcgttgccggccacgacacctccgccgtcctcctcaccttcatgctccgccacctcgccaacgacccggccaccctcgccgccatggcccaaggcaagtagtagtagcactaactttcctctcctctcgcccaagaaacccaactctcccctcccctgacgaacactcagagcatgaggagatcgccaggggcaagcgagacggcgaggcgctgacatgcgaggacgttgccaagatgaagctgtcgtggcgcgtcgcgcaggagacgctgcgcatggtgcctccggtgttgggcagcttcaggagagcgcccgtcgacgtcgagttcgagggctacacgatcccgagagggtggcagatcttctggtcgccgagcgtgacgcacatggatccggccatcttccacgagccgaccaagttcgagccgtcgcggttcgacggcgcggcggcggcggcggcgtactcgttcgtgccgttcggcggcgggccgcggatctgccccgggatggagctcgcgagggtggagacgctggtgacggcgcactacctggtgaggcatttcaggtggaagctctgcctcggggaggagaagaacacgtttctcagggacccgatgccgacgccgcacgacggcctccccgtcgagctcgaccacatcgctcctctctgctaagccgcaccatccgttatcacgcttcctcttcctccgtatctgttatggtgcttcccccaagttttttttcttttttttcagatttagttatagtataattacgacgcttcccgcaagttttcttaatataactataatataattgagatgtaaatgtattatagttgtactgtaactgcattgtaacttatagcaaaactgtacaaatttgtttctagaaatttttctttctttcatgtacacttaaacgatgcgatggccacaaatccgaaaatttggacggc

SEQ ID NO: 9605 - DNA, 1318 bp, Oryza sativa
  ref <308>: DATABASE ACCESSION NUMBER: AK106953
  ref <309>: DATABASE ENTRY DATE: 2002-08-28
acagccaggacaggagagcgaccggccgaccgccgatgcgccgctgtcaactcgccatcgacggtcgaccgtcgtcggcggcagcgcatcgccctcgcccatcgcaccgtcggctgttgcccgtcgcgcggtagccgagttgcgccgcaccgcctcggcgcctccccgggccgcgacgccgcccggagctccagacgaaggaactttttgtttgacccaatgacgttataagccccaggtagcagccgccgccacagctgcacgggcggatgaacgctcgccatggcggccagtcgagcgagacagctccacatagggatgtaagtggttaacccgcgaaacccacttataggtcaaaataagcaggtttaagtgggttcgcggctgacccacttacacccttagctccacggcctttacctgacgagaggatgttgtgaccctgacaagtgggccaacctcagcaaggactacgcctccaactccttcctctgggaagccgccatcatctactcaaagcaactgccccatcgtacgcgctgcctgcctctcctcatcgtcctcctcaaggccaccgcctcccgcgtggatcccatcctcggtcggcagggcgctccacgcggaggctgtgaaatccgccaacgcccatgaccgcctcgtgggcaccacgctggtgtccggtgtactgcaagtgcggcctcctggccaacgcacgcggggtattggacagaatgccggaccggaacaccgtgacgtgtaatgccatgctcaccgggtatacggcggcgggcgacatggccaacgctgaggcggtgtttgccggcatgggctcacggacgcccgtcacgtgggcgacgctgatccgggggttcgcggaggagcgcgacatggtggatgcgcggcggtggttcgaggccgcgccgccgggcatgcggaacgtcgtcacgtggaccgtggctgtgcagggttacatggccacgggggacatggagaccgcgagggagctgttcgacaagatgcctacgtggaacgcgttcgtgtggtcatcgatggtcactgggtacttcaaggctggcaatgccaacgaagcgcacgcggtgttcaacagaatacccgtgcgaaacttggtgaattggaacacgctgatagcggaaatgcttaccatcggcagtccggccagaaataaaaaatcggacgtcttaatctaaaagaacaacagtgtaggtgcatggtgcaacggttggtcaggtgtactgacaagcaacggagcatgtatacaaacatgtttcaaaatttaaatgatttttactcttaaact

SEQ ID NO: 9606 - DNA, 860 bp, Oryza sativa
  ref <308>: DATABASE ACCESSION NUMBER: AK106954
  ref <309>: DATABASE ENTRY DATE: 2002-08-28
gatcatccgatcgggcagaggcggagaagagagtcacgtgagcggagaagattccggcggcggcgaagtgaagtgaagaggcgatgggaatggactggtacgcgtggctgtcggcggcgaggctggaccaggcggtggcgtacgagtacgcgctggtgttctcgcgcaacgagctggaggccgacgacctcgcctacttcgaccacgagttcctccacagcatgggcgtctccgtcgcaaagcaccgcctcgagatcctcaagctggcgcgccggagccgccgccgcgcggcgctgtcgtcgcgcctcgtcgccgccgtcgaccgcgtcgccaggtacgtgcgcgcgctcgtcgtcgtcgtcgtccagggccgggaggacgagtcgtcctcggcgctcgtgctcgtgccgagccagcagctgcagcccgacgtcgacaagacgccgaggaggagcaggtccaagcccaagtcgaccaaggaggtcgccgccgacgccgccgctcccaccacaccgaaagccatgcggtcgccggtgctggccatcggcggcagggccgcctcgacggtgcacgccgtgaaggacggcgagaaaggcggtgaggacatggtcaggtgggaccgcctgttccaggacctcaagcccaactgagcgcgcaacgacgacgatgccgcgcgtgatcgcggcgccggcggcggatgcagcggtgtgttactgttagggtttaatgcttgttcatctccatgctttggtaatggtcgagcactgtgctctttcttcctcctgcatgcacagttgtgcactgctccggcgccattgctgcatgtacaataaatgcacatggagtggttaattgcgatt

SEQ ID NO: 9607 - DNA, 1848 bp, Oryza sativa
  ref <308>: DATABASE ACCESSION NUMBER: AK106955
  ref <309>: DATABASE ENTRY DATE: 2002-08-28
ggggaactctgtcctctcttcttcttcttctttacaagctctggtactcgctgtctccgtctctgcatttcggtctctggctctctgctgcttcgtgttcgtgggcgattggtttttcttggcttcttgttcatcttggatttgatcgattcgatggctgagttgcggacgtcgtggaagtcgatgctctgctgcgtcggcggcggcggggtggccggcgttgaggacgacgtgccgccggagaggaggagggtcagagggggtggtcaccaccagcggctgctgtcgtcgtcgtcgtcggcgtcgtcggcgtcgagggtgtcgctgtcgagcctgagctcgacggggaccctcacgccggaggacctgtcgctgacgctgtcgggctcgaacctgtacgccttcacctacgccgagatgagggccgtcaccggcggcttctcccgcgccaactacctcggctccggcgggttcggccccgtgtacaagggccgcgccgacgacggcctccgccccggcctcgccgcgcaggccgtcgccgtcaagtacctcgacctcgactgcggcacgcagggccacagggagtggctggctgaggtgttcttccttggtcagttgaggcacaagaatctcgtcaagctgatcggctactgctacgaggacgaacaccggatgctggtgtacgagtacatgagcaacgggagcttggagaagcatctcttcaaaagtctcgatggcgccatgccatggatgaggaggatgcagaccgccgtcggcgcggcgaaggggctcgccttcctccacgacgccgacacgccggtcatctaccgtgacttcaaggcatccaacatcctcctcgactcggacttcaacaccaagctttccgactttgggcttgccaaggatgggccgcagggcgacgcgacccatgtcacgacgcgtgtcatggggacaaacgggtatgcagcgcccgagtacatcatgacagggcacctgaccgacaagagcgatgtgtatagttttggtgtggtactactggagctattatcgggtcggcactcggtggaccgctctcgtcgccatagggagcaaagtctggtggattggacaagaaagtacctcaagaagcccgaccagttgcaccgggtcgtcatggacccagccatggagggccaatactcctacaaaggggcccaagaggctgctttggtagcctacaagtgcttgagcccatcaccaaagtccaggcccagcatgagggaggtggtcaaggccctagagcccatattggacatgaatgactacctccaaattggtacatttgtgttcaccgtcgttgtggaagataacaagaaggacgatgtgaccaaaaccaagcaagtagatggtgagaacaaggttgacatgaggatcgaggcgacagtggaagagaagcaccagagtcaccatgatcgataccggcagaagaacccaaactctgcaatccatgctgacatcgtgctgcaacgcgacggctccatcggatcgtacaccacctcgctcaggcggcacagaaggacaccgagctatctcaaggagaggggtgcctagaatttcatggtcagacctaagaggggaagatataggagtaatattaattaggggaaacaaaaggatctgtacataactaagctagatcttagaggtgttgtgatacaagacacacaacaccacattggttttttgtgtgggatttattcattttattgatagtgttctgttattggccgtaatgtgccaataatgtgatgagaatcctgattgtggatttttcatcgtggttaatcaagagcgaagatagaattggcc

SEQ ID NO: 9608 - DNA, 2381 bp, Oryza sativa
  ref <308>: DATABASE ACCESSION NUMBER: AK106956
  ref <309>: DATABASE ENTRY DATE: 2002-08-28
ttgcgccctcgtcgccgcgccacccgcaccaccactcgcagccccaacagccgcagtcgcatcaccaccatcaccatcactccggcagccggaagcgccactcgatgcctccggcgtacacggccgcggagcccgtgtcccaccaccaccatctcgtcgtcgtcgacccgtcgacggtttactcccctccgctgcccgccctgccgccgccaccaccgcaacaaccgcagtcggcgctcgtgctctccggcggcaaggaggatctcggcgcgttggccatgctggaggacagcgtgaagcggctcaagtcgcccaaggcgtcgccgggggcgatgctgccgaagccgcaggccgacgcggcgctcgccctgctcgccgaatggtttctcgagtcgtcgggcggcgtgtcgctgtcggccgtggcgaacccgaaactccggtccttcctccgccacgtcggcctgccggagctgcagcggacagacctggcgggggctcggctggatgcgcggttcgccgaggcccgcgccgacgccaccgcgcgcgtccgcgacgcgctctttttccagctcgcggcggacgggtggcgggagcaggtggtaactctgtgtgtcaacctcccaaatggaacatccgtgttccaccgcggcgtgccggtccccgccccggcgccctcggactacgccgaggaggtgttgctggacgcggtggcgtccgtgtccgcgtctggctcctccaacgacctgcaccattgcgcgggcatcgtggctgaccgcttcaagtcaaaggcccttcgtgatctggagaacaagcaccattggatggtgaacctgtcctgccaaatccatggcttcacccggctggttcgggacttcgcgcgggagctccctctgttccgctccgctgcggctaaatccgccaagctggccgcctacttcaatgccaagccgacggtgcggtccctgctgcacaagcaccaaatccaggagctcgggcatgcgtcgcttctccgtgtggcgcatgtgccattcaatagcagcggcagcgactaccgtgcggccttcgagatgctggaggacgtgttgacctctgctcgcccgctccagctcgccgtcttggaagagtcctataagctggtctgcatcgacgattcggccgccagggagatggcggacatgttgcaggatgggtcattctggagtgaggttgaggccgtgcatctgctcgtgaagctgatcatggacatggtgaaagagatggagactgacaggcctctggttggccaatgcctgcctctctgggaggacctacgtggcaaggttagggattggtgcgataaattcaacactgatgagggcgctgccctgaatgtggtggagaaaaggttcaggaagaactaccatccagcctggtcagcggctttcatattggatcctctctacctaatcaaggatgccagtgggcgctacctcccgcccttcaagttcttgactcctgatcaagagaaggatgtggacatgctcatcaccaggatggtgtcgcgggaggaggcgcacattgcggtcatggagctcatgaaatggcggacggaagggctggacccgttgtatgcgcaggcggtgcaggtccggcagcctgacccgtccaccgggaagatgaaggtcgcaaacaagcagagcagccgccttgtctgggagacgtgcctgagcgagctcaagtccctcgggaaggtggctgtacggctcatcttcctccatgccactgctagggggttcaggtgctcaccctccatgctgcgttggctctctgctcctggcagtttagccggtggcattgatcgtgcgcaccggctagtgttcgttgctgcaaattccaagctagagaggagggatttctcaagtgatgaagacaaggatgctgagttactcactgaaggggacgatgatgtgctaaacgagcctggcagtttggagcgctcctcagtgtaacacccttatttaattgttcgtttctttttctctattagccttttttagaagttaatccctaggaatttgctagaatttccaccccctacctatttttttgcctcctagaaatttcttcctcgtgcccatgctgttaattcttacttcctcactctagattttggtggggtggggagtggggcatgagatggagatatgcatcctttgttcatcaagtttggttaagaatgactgtctcttgccatatatgattccatggggccattgaacttgcagagattaatggaagtctttctgtcaatatgttcatagtcggtggtacaccgaaagcgggaagaatgtgtaaccatttttttttgtgaaaattaataatattgatatgcaattgaatgc

SEQ ID NO: 9609 - DNA, 2049 bp, Oryza sativa
  ref <308>: DATABASE ACCESSION NUMBER: AK106957
  ref <309>: DATABASE ENTRY DATE: 2002-08-28
aagcaaataattaccaatctaatctcctctctctcaactaagcctgcggcacggggcaacctcgccggagaagacgacggaccgaggctacgagctacgtagccgagggccggctacccgagggcctgacgcccttgacaacctggtatcacgttccagacgatcctcgccgcgccgcgccgtctccccaccacccgccacatcctcgccaccaccagccgccgcgccaccatcctcggactcgtcctccggcgcgtcctgcccacccggcatgggtgaccccaatgacctcaagacctccgtggaggctctcaccaccgccatgaaggagatgcaggcctcgatcgccgccaacgccaaggccattgccgccctctcctccggccgcacctcatcctcgggcgccacgacagactccggcgaaccccgcaccgtccggccgccgcgatttcagaaaatggatttcccgcgctatgatgggaagtccgatccgctcaccttcctcaattggtgtgagtcgtacttccaccaacaacggatcatggacgaagagaaggtttggatggcgtcctacaaccttgaagatggtgcacagctatggtacatgcaagtccaggcggatgagggtaaaccgtcgtggcgtcgcttccgggaactcctcgtcctacggtacgggccgccactccgttcggctcccctcttcgagttagccgactgccgccgcactaccaccgtggaggactaccaggaccacttccaagcgctcctgccccgcgccggccgcctgacgaaggcacaacgggttcagctcttcaccggcggtctgcttcctccgctcagcctcaaggtccagatgcagaatccgcagtccctcgtcaccgccatgagtttggctcggcagttcgagctgatggagcagtgcactgccaccctggccaaagcccctggccacgggatactgccgacgctgggtccgcgccaggccccgccccagccgccggcgcctagggccgcatcgccccctgtcctcatcgacggtcgcccggtgaagcggctctctcaggcggagcaggacgagcgtcgccgcctcgggctatgctttaactgttggaattaatgaatggaccttagcccactcgaagattaattctttggaaaatcacaaaagcccacctcatgggatggcatgcatgtggagtttagtaccaccttgcttattctaggagaggaggacctccttaaaagggaggatgccctcctagccacttgaagcatgtgtggtggagagaagaggggaaacgcgcgctcgctcgcctggcctggcctggcagggcaggcggcgcgcgtgcacgaagtacgcgtcgaatggtccgaaaaattggctcctcacccttgcgcagatgcagcctccttttgcagttttgttttgctgcaaattcggattcgttttgttttggaaacgttccgaaaaatccggtgcgtgcaaacggcgtggagtccggataagttacgcgcgacttatccggttcggttacacgcagcagagatcgtgcgggcgccctgatcaagcgacccttctctatataaaccgacccgccgtcttcacgcaatatatgcgaaaatcaatctagggtttgcctcctactctgtactgcgccgtcgctcgtagactactccatcccgctcgccggcgtgcaccagcgatcaggagagcaggtctccggaacctctgcctttgacgtcctgcaccgggagaaggcggcaataaggtttttgggaagcgcttcgcgcgactgctccctgttcgttcgcgacggctcgccttcctcttcgctcgcgtgtttcgtgccttcgtagacacctgcgaaaagtttcgaccaaacagccggtcttttcgtcacctcggtacgtgttcaatatgttgcgcatatttgatctgttcatgttattctgcgtagtttacatgtgtagatctaatgaggcgttcatgctagttttcatctgtaatgtcatgatttatttatggaataaatttaatcattatatgcc

SEQ ID NO: 9610 - DNA, 1663 bp, Oryza sativa
  ref <308>: DATABASE ACCESSION NUMBER: AK106958
  ref <309>: DATABASE ENTRY DATE: 2002-08-28
aggaagttttacgaagcgccaactctcgtgtgtctctgctcattttcagattatctacagtgtcgcgtgcgttgtattcgtccggtgttcgttctcgcccgctcgctgattcgttgggatttcctgacaattggtatcagagcaaggtttagggcttggacgcatgatcgtgctcttgaagttgcactcatgcctcgccgtcgctcgtcgtccctgacgaagcgcactctaggaggttccggcagccacgcctcgggcagcggcgggaacgaccgcgggttggtgattcaccgcgtggtcaaggaggcgggaggcgcggcgaactaccccgtgctcacgaagacaaactacaacgagtggtctttactgatgaagatcaagctgcaagctcgatgcttgactgcttgtggggcaccattgatccgggaggggtcgcagtggagctccatgaagatcgaatggcgttggacgccatttgcagcgccgtccccgtcgagatgatctcgacgctagcgaccaaggagacgacgaaggcagcgtggaactgcatcaagaccatgcgcgtaggcaagccgagtgcacagaagctgcgctccgagtacgaggctctcgcgttccgcgacggggtgtcggtcgaggacatcgccatgcggctcaacaccatcgtgacgcagctgtccacgttgggcgaccctgagccggacgacaaggttgtcgagaagtacctttgtgtcgctcggcctaggttctcacaactcgctctttccatgaaacattgctcgacatctccactttgtccctggaggaggtcactggacgcctcaaggcggctgaggactctggccagtcgtcgtcctcgtccttaccaggtggcagcggcaagctctatctcaccgaagaagagtggcttgaacgtcacaagaaaaaggaacaggaggcgaagaagggcaatggcggaggcaacacccgtggcaagcgccgcggcgggcaagggtgcaatggtagtggtggtggcgacaacgctagcccggtgcgcaagaaggacaagtgccgtaattgtggcaaacttggccactgggccaaatattgcaggagcaaaccaaagcaggagcaagcgcacgtggcccaggaggaggatgagcccacgctcatgctcatgacgggcggctgcattgatgtggtggaggagacgggcgcgccgtgcgcgacaccgtcgccgcccccattgcggcctcgcccagacgtcatcgagtttgtggagcagaaggtgatcgccgcgctggacgacgccaccgaccacgacaacaagcgctagatcctcgacaccgacgcgtcgaaccacatgaccggctcaacaccaacgtcaccggcaatgtccgactcggggatggctcgctcgtccacatcggagggcgcggcaccatcctattcgcctgcaagaatggatgcaattggaaagcaaatatgcaattggaaagggaaatatgcaatgtgatacaagttacctcagtggggggagcgtcgctccccccaagcttggctttcgctcagggtccttgataaggattgaacccctgaaagcgaaagtatgcctggaggtcatcatgctgttgctgcattatgttgtcgatgttggtaaactgagcattagcagattgttgcc

SEQ ID NO: 9611 - DNA, 759 bp, Oryza sativa
  ref <308>: DATABASE ACCESSION NUMBER: AK106959
  ref <309>: DATABASE ENTRY DATE: 2002-08-28
acgttcgctcacttcctctccccctactctctccctctcccatctccccaatctctgctccacgagccaccaccgcctccgccacaacccctcatctccccctacgtcgtgcctcctccctctcgatggtgccttggcatgctcccaatcaataattccttgagctcgtcggcatactgctgttaacgaccagcatcaacaactgcatggattcggaggtggcagcaacaggcggatcgagcgctagtggtgtttggtgctctcacgagcaaatccggcaacagcaagggctctagcaggcggatccagcggtgggtgctcttgcgagcacatccggcagtagcaagggctctagcaggcggatccagcggtgggtgctctcgcaggccgatccagtggcggcaagggctctcacggcggtggcggcgggtgccatcgtgggctgatctggtggcagcaagggctctagcaggcggatccagcggcggcaagggctctcgcggcggcgggtgctcttgcgggcagatccagcagtgacaatgacttgtgggcggatccagcgatgtcgctctctcgcatggacctagggatggtaagcggcatcgaagccctccccagcgagctatggcaacgggcggagttctccactatgatggcggctaggtgttgcgattagtgtattgtgtgttgattctatgatgatgtgcttgtgtacttcggttctcggatgttgagcgatgaatgttcgattgtgacgtg

SEQ ID NO: 9612 - DNA, 2098 bp, Oryza sativa
  ref <308>: DATABASE ACCESSION NUMBER: AK106960
  ref <309>: DATABASE ENTRY DATE: 2002-08-28
gtgtacacggggcatggggatcgatcgctcgatcgcccattagccacacccgttggatcagattcaatcagacgttcagtttttcttctttcttttttttttttctcgagaaaatatccacagtcatcgttgtctcctccggtctcccctttcccccagccgccgtcttaggcgctgcgccacccggaatcccggagccaccgccgcgcgcaccctgatctcgggtggcaccgaaccttcagccgccgccaccgacgaggaacggctgcccagagcctccagggattcgacgttcaatctttgcaatctcctcctccagccacaccgccgaagtctccgtgtcggttttcttcccttccctgacatgaggtaggtgttataagtggagccaggagcctttgaatctttgcaagtattcaagcagaagcagacattggatctcaatctgcaccaatggaggcctgtagcatagccaggattatcaacttaggggatctagctatgcgcccgaaaaaattgtgccgtctactcatcaaactcttatcagatctcctgctgaaagaatccggaaaatatgaatatgtgcatccacctcctatggagactcaagcggcagatttaccggagctttcacaggatatgctgatggagatctttgccctcctggagatccctgaccttgttcgtgcgggatctgtctgccaatcctggcgttctgcctacaccagcctacgcgacatggggcagtacaagcagcagactccctgcctgctctacaccactgaatcctcaggcgagaaggtttcatgcctctacagtcttgtggagaagagggccttcaggttaactctcccagggacgccgctgcacaaaagactgccgattggatcctcacatggttgggtggttactgctgatgagttatccgagcttcatcttgtcaatccaatcaccggacaacagattgccctcccaccggtgatcaccattgagcaggtgaagcccatcttcaatgacattggtgttgtccaaggctacaagatcggatggtactgtgcagagaaagattatggagatccgtatggagagccgtcgccaatccttactcccagtgagctgcgtgaccacctatactacaaggcatttgtgtttcctgatcccttgactagaagcttcattgtggtggtcatccactatccattttgtcaactttcctttgcaagagtaggagatgataaatggacctggttaccccacaacactcgctacagagattgtgtataccatgatggtctgttgtatgcattgacatcacatggacagatcgatgcctttgatatcacagcctccgttgtcactaggaaggaaattattaaacacatgaaaggtatttctgagagcatgtacattattcgagctccatggggtgatcttctgcaagtttggaggacagtggatgctgcagagcagcaggatggggatgacgatactttatgttatgagactgaggatggtatagtgcctgtaatgcgtactaaagaaatcaaggtttttaaagttgacatggcagcaaataagcttgtgcaaataaacagcttgccataccatgtgttgtttcttggtcacaaccagtcgatttgtcttagagctgaagaatacccacaattaagagcaaatcatgtctacttcactgacgaccatgtggacttgctgatgctaattaaaaatggcccccgtgatattggagtttttgacttggagaatcgcagaaggaagaaaactatatcaccgatctggtctagctggcctagtcccgtatggataacaccaagtattgctaaagctgatgggtggtgtgtgccgtgtggcgtggggacgccggtgatgggaggtagggagctagcgaggagagaaggagggctgatggcatgtagtctcacctaataacttttagtgatgaatgatttatttttgtgaaagaagaaaaaatgatatgacaagtgagaccactgctatgtaagcaccacctaagcccagaagaccatgtaaaccgccaaagaatgtatatatcaatgtggttttaaaagttcgaggtttt

SEQ ID NO: 9613 - DNA, 1712 bp, Oryza sativa
  ref <308>: DATABASE ACCESSION NUMBER: AK106961
  ref <309>: DATABASE ENTRY DATE: 2002-08-28
agcgagcgtcctcgattttcctcttgctagggtttgtgggagagatcgccggcggtggcggcggtggcggcggcggaggcggaggcggaggcggtgttgaggagaaatggaggtcgatggaggcggagacgagtcggcggcggcggcgatggctgaccccggccgcgggaagaagagaccgccttccccctcaactcctccgactccgagcgacgacggggaggactccgacgacagctgcgcggtcagcgacgaggaggaggaggaagacgaagacgaaggcgaggaggatcaagaagccacagagattctggttgaaagtaatttcaggaatttgattgtctcatgctatgaatctgctattgctgaataactgaaatgctgctcacttgttggcatgtgccctcactccatattgtactgtacaacagtaaagtttcagaaacagaagatgtgcattagggatgcaccgcccatttacggttgatgattttccaaggcttagtagtgatcattctgcgcagactgaagcgcggtatagatttccagatctttgccttcaaggccctttgccactcattcttttccgtgccttcaacgatcctctcactgacaaacgcaggcattggtttggttctgattaccgactcgatgacgaatctgaaatcaatgtcaacagcgctcggaccgttgattgcttaaatgggtgtaggtgccattcgatgaatctgctccagttgattgatctgtaaatctctggatatcgccatacccagcctggacgtgccaaaatcttcgggttttttgcggtgcgggatgacttggaacctctgcgcaactatgtctttaggcatgcgattgacaattatgaagctgtctctgtgaaaccaaagacgggtatggcatgtttaccattgactagcccagctcgaggtatttgcattacaagccgtgcactgtttgaattccaactctgtattcggactgaagactcacctgaggctgaggatgagcccaaaggtggcacattgattgaaggatgcactgaattcaccaacattttgagatcaacatcattcaccgaaactgtccgtctgtatggtgagaagtgtgggttgggtgtgaagtttcttctgcttgtaaatgcagttcaagcaacagttgatgttgagattatacattcacgtgcttgtggccttaatctgaagttatatgccaaaaccagtggcttcagcgatgtgctccgtctcttccgaggtgttgcacaatctagtcgcaaaattagttctgttgtggcggtggtgagacgtagtcaccttgatctctgtattgaagggtctccagcggatatcgatcttggtgagaagctgccttgtacaaggtgggagcacagatttggtgctggttttcatggaactgtagaggaagtggtgaagcttggtgatttcactaccatttctgtgaaagtcacctggaaagctgtcagcaagcttccgccttgaatggatagaggggcttctatctatgcattgtaaaaactggagtgttatctgagtggcatcttttgtaagctatttccatgtattagtatagcatttactcctaactctttagacttcgatctgccctagtgttatgggcaatcctgccagattaatgataaactcttggaaacatttgcgtgatggtaattgaatccttattttggtgct

SEQ ID NO: 9614 - DNA, 1384 bp, Oryza sativa
  ref <308>: DATABASE ACCESSION NUMBER: AK106962
  ref <309>: DATABASE ENTRY DATE: 2002-08-28
aaaatggctcttgccaagcatgaactcgccatcaatcgatcgacaaatcgatctctttccaaaacattcagtagtagtttactgatcaactctgcatggcttcctctgcagcttactttgctttctctgtgcttgtggctttacacttgtgttgctgtcatggacaagctcctgatgctgctggtaatagcagtgatgtaactgcgatctatagccttggtgactccatcactgacaccgggaatctgatcaaggaggcgcctcctggcatgtttgagaccatcaagcatctcccgtatggcatcacgtttgggtacccgactggacgctgctctgatggcctcctcatgatcgatttcctcgctcaggacctgggtcttccatttctgaacccttacctgggcaagaacaagagcttcgaccatggagtaaacttcgccgtcgctggagccactgcaatggaccctaccgatcagttcaacgggagattcttcgcgcctttctcttctaactcccttaatgtgcagcttaggtggttcaaggacttcatgaagtccaccttcagcactgaagaagatatacgcaaaaggctccagtcttctctggttttgattggggagattggagggaacgattacaactacgccttgtttggaaaaagtgtcagcgaagtggagaagctaatcccaagtgtcgttcggaccatcatagatgcagccaaggaagttcttgaaatgggcgcgaacagagtcatcatcccgggcaacttccccatcggctgcatgccgacctacctgaccagcaagcgctcatccgagccgtcggactacgacgccacgggctgcctgcgcgagctcaaccgcttcgccgccaagcacaacgcgaggcttcggcgcgccatcgccgacgagctccggccgtcgtacccggccgcggccgtcgcctacgccgactacttcaactccttcctcgccctcctcgacgccgccggcgagctcggcttcgacgcgggcagcgcgcgcagggcgtgctgcggcgccggcggcggcgagtacaactacgacccgaggaggatgtgcggcgccgagggggcggcggcgtgcgcggagccggagaagtacgtgagctgggacggggtacacatgacgcaggcggcgtacagggcgatgtcgaggctcgtctaccatgggatgtacctggagccgcagatactgagtctcgcggatgcgccatagatctcctgaggctggagagtgtgtcgtcatgcagaagctgagacgaagatgatggagctaattttgaggcttcttctctctgagttcatctgctcagagaattttatttgaaaaaattataaaaaaagacaagtaacgcataaagtatt

SEQ ID NO: 9615 - DNA, 1067 bp, Oryza sativa
  ref <308>: DATABASE ACCESSION NUMBER: AK106963
  ref <309>: DATABASE ENTRY DATE: 2002-08-28
ttacgacccgtcgctgaagaaggcgcggcgcgccctcctgggctcgcacggcgtgttcgtcgtcgacggcgacatcaacgacggccgcctcctcgccaagctgttcgacgtcgtccccttcacccacgtcctccacctcgccgcgcaggccggcgtccgctacgccatggagaacccctcgtcgtacgtccgctccaacgtcgccggcctcgtctccctcctcgagtcctgcaaggacgccgacccgcagccggccgtcgtctgggcctcctcctcctccgtctacggtctcaacgacgccgtccccttctccgaggcgcaccgcaccgacaagccggcgtcgctctacgccgccaccaagaaagccggcgaggccatcacccacacctacaaccacatctacggcctctccatcaccggcctccgcttcttcacggtgtacggtccctggggccgccccgacatggcctacttcttcttcacccgcaacatcctgcaggggaagccggtcaccgtctaccggggccgtgatcacgtcgacatcgccagggacttcacctacatcgacgacatcgtgcgggggtgcctggcggcgctggacacggctgggcggagcacgggcgggggcgggaggaagcgcggggcggcgccgtacaggatcttcaacctcgggaacacgtcgccggtgacggtgccggcgctggtggcgatgctggagaggtgcctgatggtgaaggcgaggaggcacgtcgtcgagatgcccggcaatggcgacgtgcccttcacccacgccaacatcagcctggcgagggagcagctcgggtacaggccgacgaccagcctcgagatggggctcaagaagttcgtccggtggtacctctcctactacggctacaacagaggaactcacgcattcaggagccgcttgtgatgacgattatataaattgttagtatagttagcattagtgaatatataaatatgtgttgaacatttttgttttttttgttgttggggggtttgtggggatggaaggaggaattgattcttttgttaattttttttcc

SEQ ID NO: 9616 - DNA, 1077 bp, Oryza sativa
  ref <308>: DATABASE ACCESSION NUMBER: AK106964
  ref <309>: DATABASE ENTRY DATE: 2002-08-28
actctcctccattccttcactgccttcacttccctgctcagctcagcagctcagggacttcgaggatgatggaatccaaagcagccatgatggtgaccatcctgctctgctgctcctccatctcaccggcgttcgcgcagaagcacaagggtccgcccgccgcggcggccgtaagcctcccgccgtcgccggcgccgtccccggcggcgccgcgccacgtggacctcgccgacctcctgagcgtggcgggtccgttccacacgttcctcgacctcctggagaagacggacgtgctcaggacgttccagagccaggcgaacggcagcaaggacgggatcacggtgttcgtccccaaggacgcggcgttcgcgtcgctggcgaggtcggcgacggcgaacctcacctccgaccagctcaagtcgctggcgctgtaccacgcgctgccgaggtactactccctcgccgagttcaacaggctgggcggcgcggccagcccggtgcccacgctcgccggcggcgagtacacggtcaacgtcaccgacgacatgggcaccgtccatgtcgggtcgatgtggtccaaccccaagatcagcagcagcgtctactccacccgccccgtcgccgtctacgaggtggacagggtgctcctcccgatgcagatcttcaggaccgacccgcccatggcgccgtcgccggcgccggcgccggacgccaagccggcctccgacgccgccagcccgctccccgggaagtcgtcgagcgccaaggcgaaggcggacgagaagaagagctcgtcgtcgccgccgtcgtcgcgccgcggcgccggcattgccggctacttcttggctcttgctgcatctgcctcagctggattgctgctcctgtgttgatgctaagaaacttttctaattctttttttttttgcatggattgttggttgctggataattttattctttggacatagtaggggcattgtgttaggattaagttttatgggagtatttccgtcatatgcttgtatgattagtcgatgactacttgtttatccgatgcatgttgcgaattgcacaaggt

SEQ ID NO: 9617 - DNA, 1960 bp, Oryza sativa
  ref <308>: DATABASE ACCESSION NUMBER: AK106965
  ref <309>: DATABASE ENTRY DATE: 2002-08-28
atcatcccgtctccgtcctcgcccgccgccgccgccgccgccgatctccatcctgcgaggtggcgccggcttccgccgcatcatcgctcaccgttgagcatcctaatccatcccatccgccctcctcgcccgccgcttccgccgatccccatcctagccatcaccatcacgcacgccacgccatccgcctccatccctcgccgccgccgtgcaccaccgccgtcatccgcctcttcctcttcttcttgctccacaagttctatcacagagatgatggctgtgacaaatggagtaatccatgcatcttctagggaacccttattttccttcggtgtcattgctgatgtccagtacgctgatattccagatggtcgctcattccttggtgtcccacgctactaccgtcatagcatcagcgtcctccaaagggctgtcagcacatggaacaaacaacacaacatcaagttttcaatcaactttggtgacatcattgatggatattgcccaaaggacaaatcgttgtgggcagtgcagaaggtccttgatgagtttgagaaatttgatggcccaacttaccacatgtttgggaaccattgcctctataaccttcctcgtggcaagctagtatcgttgctgaagatgccaaccgattctgatcgtgcatactatgacttctctccatgtcccgagtacagatttgttgtcctggacgcttatgacttcagtgcacttggctggccccgtgaccatccagtgactgccgaagcaatgaagttcctggaagaaaagaacccaaactctgacaagaacagccctgacggtctggttggcgttgaccggcggtttgtgatgtttaatggtggagttggtaaagagcagttgtcatggctcaatgatgtcctccaggatgcatcagcacgccggcaaaatgtcatcctatgcagtcatctcccaatggatcctggctcagcttcttttgcagctctcatgtggaactacgatgaggtgatggctattgttcgccagtacaaatgtgttaaggcatgctttgccgggcacgaccacaagggaggtcactctgtggactcgcatggcgtacatcaccggactcttgaggctgcattggagtgtcctcctggtactagtgcattcgggcacatcgaagtgtatccagacaagttgttgcttgtgggttctgataaaatggctgatactgagatgtgttttgagccctagagtgaactgtgtagcggagggaaattcatccaacttcattgttttgattaatattcagaaacatgtgacttcattatactcattttctggcagcataattacatgtatgtaatagcatggaaactggaggtggcagcagctgctatgcttgccgcttaatctcccctcctctctcccaagaggaaagaggcagcaagatgaaaagcaaccgaaagccaatttgacgatcaagtgaaaagcttatcatgtctaatatgcatatttacacattgatgactacatcgccaaccaactgaactactatcaagtatcatctggcacttaagatacaatattgttcacatccttcgatgccatttgatcaagtgatcattatctacaaaagaattaattgatcatctgtccaattctgaattactgattttcttctccaggggtgagaagaccttctgcagtcacgaatgctgctaccaagagatgttcctttttgtaacttgtcaattcaattagccaggataatttccaaatgtccgatcaacatgatctgcctcaagccctcttgcttttcttgttcttgtagagtgattgttgaccaattaggagctagtgttcagagttgagattaaaatcctcattgtgagatgcacatcaattctggttgtctgaaatgttgcagtttttatatgactgttatatcaatataagtaaagctgccaggatgttc

SEQ ID NO: 9618 - DNA, 1381 bp, Oryza sativa
  ref <308>: DATABASE ACCESSION NUMBER: AK106966
  ref <309>: DATABASE ENTRY DATE: 2002-08-28
agagcgggcgggagggcggcggcggtgctggcagcggcggcagcagccccagtggcggcgcgcgaggagccgggctccggggaacgggatccagggaggagcgcgctcgggagcgggcggcgagggcagccccagtgcccggcgctggggcggggagcggccgagggaggcggcggctgcggcggcggcgacgcagagctccgagcgcgatggctagtcctgctctgtgggcctgcttcgtggttcttgctgcaggggtcgtggcctatgcccagagacacagccaacaagatactcatgtgctgtacgaacgcctgggctcagatgtgacccttccctgtgggacagcagcctggggcacagcggtgacctggagggtcaacgggacagacctggaggctgctcactataatggctcccagttggtccttgagggcctggacctgagccacagtggtcactatgcctgctaccagggttcctcctggcaccttcgataccaggccctgctgcatgtgggcatgccaccccgggagcctgtcctcacctgccgttccaacagctaccccaagggattctactgcagctggcacttgccctcacccacattcatacccaacaccttcaatgtgacagttctacatggctccaaactgttaggatgtgaaaaggacccagcccccaagaatcggtgtcacatccgatatacacacctcttctctacggtcaaatacaaggtcacgttgacagtcaccaatgccctgggccacaattccacagccatcaccttcgatgagttcactattgtgaagcccgatcctccagagaacgttgtggcccggcctgtacctagcagccctcgacgcctggaggtgacctggcagactccatcctcctggcccgatcccgagtcattccctctcaagttcttccttcgatataggccactgatccttgaccagtggcaacacgttgagctgtccgatggcactacacacaccatcactgatgcatatgccgggaaggaatacatcattcaggtggctgcaaaggacaacgagattgggacgtggagtgactggagtgtggctgcccatgccactccttggactgaggagcccagataccttacaacagaggctcaggctccagagaccaccaccaccaccaccacatccttcgtcccccctcccaccacgaagatctgtgatcccggagaggttggggatggtgtgggctcctcaaccggcctcctgctgactgtgaccgtgactgtgacagtgaccaccatagcagccactggcctctttatttaagtccctctttgcattcctgtggaagaaaatgttgaaaacagaaatgaacagcagcaaaggctcac

SEQ ID NO: 9619 - DNA, 2196 bp, Oryza sativa
  ref <308>: DATABASE ACCESSION NUMBER: AK106967
  ref <309>: DATABASE ENTRY DATE: 2002-08-28
ccttcctcttctgtctctcacttttctctcgtagatcggccgacgggtggggaggagaccgatggggacatggggcgtggcgggagaggattttcggcgaccagcgacgccgcagcggcgggggcggcgatggcggtgacgcggagctgagcaggggagtagctctgtctcttctttattttattctctctgccgcaggggagtagcaacgggtagcagcgagcgggggccggcggaggcatcgtgtgagggcgcggcgggcaagtgcgtggcggagggcggaggcggcctgcgagcgcgcggtggctggcagagcagagcggagaggaggagggaggcaccacgaccgtacctccgggaaccccgccatgtcctcctgcagcgccacgctcatcttcttcctcgttccctcgcttccccgtcaagggaatggcgtaggagtgggcagcggcggtggcggcggggttaggcgacagcgatggcggcgtcgagagatctccggctcaccaccgacgccttccaccgacgacgatgagcagcggggacgaggcggctcaccgccgacgccttccactgcatcgcttgatgtcgcgcccaactcccttgccgccgtcggcctgctcccgcccgtcgccgtccactcctcaaccgcgtctccgctgtttccttagccaccgctgctgcgggctcgccttcgccgccctcgtttgcccgccgccacgcgtcgctgtacctcacgcggctgtcgccgtgctccgggagccccgccatggcctcctgcagcgtcacgctcctcatcttcttcgtcgagccctcctcgccgcgccacccttcctttgcctcgccgccgtcgtcgggagatgacggcctggccctaatcctctctgctcctctaatcggtcccaaaccggcacacgcggcgcgtcgtacgccgccgccgccacccggagtcccgcgccttggcgtcctcgccgccaccgcccgagcctctctgacggctcgaccccgaggtcgcacgcgcggtgagccggtgacgctctcccttctcccgcatcgtcgacgacaccgccgccgcatcaccggcccgccggatgtcctctcccaccttgccccgacgagctccccacccggcgggcatcctgtaaaggggaagagagagagagagatgaggaagggggagaaggggggaagagaggtgctgactgtacaccctgacatgtggggcccacgtgggtcccatgctgactcaaccaccacatcggacgaaaccggggtcaaaaccaccgaaggacctaaagtgaacggttttgtaagttgaaggatgtcctatatctggttttgcggttggaggatgattttgtaattcgatgacaagttgagggaccttcggtgtactttttccatcatcccccacacggaattaatccaggcccacagaaaaaatggtgttcggttcagcctggtcgggattctaaccaggcccatcccggcgtcttcccactcaagacgtgtgggaagaattcaagaaacccccgcgacggggtgcgagcgctcagggcgacgcagtggtggctgtagcggccgcgcgactcggacacgaaggcgacggcgccgcgatgcccccccctccggcggcagtcccctttggtgaccacgttctcgccggtaaatctctactcccctcatctctccttcgtcctatggttagggttccttgatgccattaaatccccacctcacgcgtggcggcggcggtcggtggcgagcaccaaacaggaggaggagtgagcggaaaggataaggaggtatagcttgcaatgaattggaggagtgggaggcctgagttgcagttcttggtgctgttttttttcttcttcttcttgtgttcttggtcagaaatttgaactctgaaattccagtatctagcatagtagtgtcataattgtgtgtcatattcggatgattcctggactttatgagcccatcgtagcattcctaaaaactaaagtggtatagttgtgtgtcagatgagctatggatcatcagcaatccatgaattgaactactgaagtaaccatggaaggagcaaaaatgttgtaaaacgtagcaaaaagatttactgctacaattttattggcctcagagcataaacagtttgtaaccgcaacacaagaacataaaagattgctttcattc

SEQ ID NO: 9620 - DNA, 507 bp, Oryza sativa
  ref <308>: DATABASE ACCESSION NUMBER: AK106968
  ref <309>: DATABASE ENTRY DATE: 2002-08-28
ctccccaaaccagcgacgctgctctccctcctcctccccccacggcgacgctgccacccctacccctcagccagggtgccctcacccgcccggagggtcttttccccggcgggtggcgtcctgcccttggaaaccgacgctttagctgtggcgccctcccaaggcgggcggcgcctcagccgcggtgcctcgtaccaccctcctcctggccggcgatgccctttccccagcgggcggcgttctctcctcggcggcatcaccttcttctccggcacaatggcggcaccttcttcatgggagcccctcggcggcggcaccctcctcatggcgcacggcggcagcacacgcgccatccaccacgacctcgggggcagcggcatcctcggctccaatgagtagtggtgccagtgatttagttttttgtgatttaattttcttgcatgattttgattcattgttgttggatttgtgattttgtgattaagtgaagttgtgattttgtgattt

SEQ ID NO: 9621 - DNA, 1181 bp, Oryza sativa
  ref <308>: DATABASE ACCESSION NUMBER: AK106969
  ref <309>: DATABASE ENTRY DATE: 2002-08-28
gatttggggactggagttgtgttgatggataggaacacgaacaacaacagcaacagcagcagcagcagcgagatgccggggaagaaggccaggaagccgtacaccatcacgaagccacgggagagatggagcgaggaggagcacgagaggttcctcgacgcgctcatcatgtacggccgcgactggaagaagatcgaggagcacgtcggcaccaagaccaccatacagatccgcagccacgcgcagaagtacttcctcaaggtgcagaagatggggctcgccgccgggctgccgccgcagtacccgaggcggaggctcgtcatgcagcagcagcagcagcagagctcgccggcggtgagcagctcggtggcggcgacggcgatcctccacgggcagccgcagtgcttgccgccgcatcacaacgtcgctgttcagagctccatcggttgggagtgtcccggagttcttcctcctgcaaccaatgacatgcagaacttggaatgggcaagtacttcaggcactgcagcctgggggaaccatcacggcctgattgaaccaccagcagcatttgtttcatttcctggtgaaagttcattcatgggggcagcaagtttcagtaatacgagcatggactggactggcaccacaagtgaaatggcaacagccagcattgtgcaggatgaaacgatcgagcttccactatcacctgatgatctgcaatttgcacaagtatacaggttcatcggcgacattttcgatccagactcgccgtgtccagtggaaacacaccttcagaaactgaagagcatggatgatatcatcgtgaagacgatactgttggtgctaagaaatctcgaagacaacctgttatcccctcagtttgagcctattagaaggttgctgtcgacgtatgatccgaaccgaggactgtctggccatttgtagagtttatagcctggaaactgcaactaacacacggataggaagttcaagtgtacctgtatctgtatgtctgaagaattgattagaagctggaaacaaaatatgtccgaccagagttttgcctggttgacatatatagccttatgattctttgaagagctagacatagatcgatgattgtttgtaaagggcctacttggaacatgttcagagtctcaaatactatagttttttttttc

SEQ ID NO: 9622 - DNA, 2308 bp, Oryza sativa
  ref <308>: DATABASE ACCESSION NUMBER: AK106970
  ref <309>: DATABASE ENTRY DATE: 2002-08-28
ttcgcctcccgtcgcgctccgtcgccttcaacctctgccaacgtcaggcgatccggctcatctggatctctctggcttgccggctaaggaacaccgggtgctatttatcagggagcccttcacaccgcaggggaaagttgcagctattttgtcactgccccttgttgcatcttgctccggcgatttgatttagaattttaggaactgcaattaacccgtgattttactcaccaagatcgcttcttgcccggtgcaaagttcaccgatttcaccatgaggagacacgcagggacgattatcctgttgttgatcttggcctgcctatggctgtgccctgggaggagcagcggcttctcgtggaacattttctcctcgtcgtcgtcgtcttcgccgccgacggccggcgagagccgcgccgccccgacgctggagctggacggcgcggtggccgacttcttgatggacggggccgacgacccgagggcggtgaagctgctggagaacgcgaggagcaagctcgccgggccgagcaactgctggcaggaggcgtaccggaggctgttcgccagctgcggcgacatcatggccgacaaggagatgcagtcgcggctggcgtggcacctcagcagctgcttccaggaggactccggccgccccccgttccctcgctgcggcgaggtctccgacatggtgcactgccgcaagaggctcggcgtctccgaggaccaggtgttcctcgagttcttcctcgagaccaacaccctgtgccaccaattgcaagctgaagcgttcaagcataacacggagaggcttgtcaacgacctgacaaggacatccaagtcagccgaggagaagctggaggtgatcgaggagaggtcagaccagatcatacaagaatctcgcaaagttcaggagacgatctcgtcgatcgaaatgcaggcagatcatctcgcagaggcgtcgaagaatgtcggagaccagatcgacgacgtgctggctcactccaaggccatctttgagcagtccaaggagattgcagactctcaggcaaagctcagagaagggcagaccgagatgagggagacgatcgatgccggcatgacgcatattcaggagtcgtatgagagccttggcaatgggatggataagctgaaggaagaggctgttgatattcagagggagatcaaaactgttggtgattccatgtccaccaagatgcaggatttgcagagcactgcaaatgatattgggagtgtggctggcaaatcattggagaatcagatgcaacttttggatggacagagcaaggccatggacggtctgaataatctgtacagctttcaggcacaagctcttgaggaaagcagggagactgtgcaaaaacttgcacagtttggccagcgtcagcaggaagagttattgtccaggcaggaagaaatccggcaagctcatgaacacctgattcataattcacactcaatactggaagctcaggaagagttcagagcaaagcaggccaacatttttgctgctctggacaaactttacatcctccacaacgccatcttagccgagtcacgtttcatcaaggcgttcttcttctactgctgcatcgtgtttctcatctacatgctcacaagcgcgaagcaaactttcagcatcaggggacatctttactttggcttgtgcatcacgcttctgctcgaaattggcctgatcaagctcggagctgacgacatcgacaagcaattctgggtcatatccaaggtgttccttgtcagatcagtgttccttgcacttgccaccgttcagatgttgcatgccatattcacattcagggattacgaactactcaaccatcacctgctccagacgctggtcgagaaggtccgggcgctggaggaaaccgccgccgccggcgagaagatgctgccctacggcggcggcggcgcggagagcgagaggagcctgatggactactcgtgggtgctcgacgagttggccgacgaggtggacagcaatgcggatccgagctacgccttgccgggggatgagcagcggcaggtggcggtggtcgctcctcgccggaggcactgcgcctcgccggaggaggtcgtcggcgagaactccatcacgacgtcggctggccggaggtacaacctgcggccacggagtagttacaggcagacgtgagtttggttggagaattaactggagatcgctttgtgcgcgtaatactgtgaacgttgttgtttctgggtttccagtgtgagtttggtttgggagaggtaaagtcgtcgtgtaccgt

SEQ ID NO: 9623 - DNA, 2276 bp, Oryza sativa
  ref <308>: DATABASE ACCESSION NUMBER: AK106971
  ref <309>: DATABASE ENTRY DATE: 2002-08-28
attgccttctccgtccgtcgcgttgctccggtgctcgatcggtctccccgcccggccgccagacgacgcgccacatatgaagccccgctcctcgcgcgacggccataatgccgccgccgccgccgcgctcctcctcgcggcgctggtcctctccggcgacgtcctgccggcggtcgtggccggtggcgccccctcgttcaactacaaggacgcgctcaccaagtccatcatgttcctcgaggcgcagcgctccggcaagctgccgcccaccaaccgcatcaagtggcgcggcgactccggcatggaagacggcaagctcgccaacgtggacctgactggcgggtactacgacgccggcgacaacgtgaagtacgggctgccgctggcgttcacggtgacgacgctggcgtggacggcgatggcgttcgagaaggagctgaaggcggcgagggagctggagaacgtgcacgcggccatcaggtggggcaccgactacttcctcaaggcggcgaccaagaaggaccacctgtgggtgcaggtcggcgaccccaacgccgaccaccagtgctgggtccgcccggagaacatgcccacgccccgcaccctctaccagatcaacgacaagacccccggctccgagattgccgccgagaccgccgccgccatgaccgcctcctccatggtcttccgcaaggataagccctactcccgccgcctcctcaacaaggccaagctgctgttccagttcgccaagacgcaccagggaacctacgacggcgagtgccccttctactgctcctactccggctacaacgatgagttgctgtgggcggcgacgtggctgtacctggcgacgaagaggcaggtgtacgcggacttcatcgggcacgaggcgatctcgtcgagcgtggccgagttcagctgggacctcaagttcccgggcgcgcaggtgctcctcgcggagctcaacatgacatccagcggcggcctccagagcttcaagtcccaggccgacaacttcgtgtgcgccgtgctcccggacaccccgttccaccaggtgtccatcaccccgggcggcatgatccacctccgcgacggcgccaactcccagtacgtcaccagcacggccttcctcttcgtcgcctacagcgacatcctccgccggatcaaccagccggtgatgtgcggcgcccaggccgtgcagcccgcccgcctcctccagttcgccaagcagcagatcgactacctcctcggcgccaacccgcgcggccgctcctacgtcgtcggcttcggcgtcaacccgcccacgcagccgcaccaccgcggcgcctccaccccggtgctccccccgggctaccaggtcaactgcgggatgagcttcagcgagtggttcacccccgaccggcccaaccccaacgagctcaccggcgcgatcatgggcggccccgacggcggcgacaacttctccgacaagcgtggcaactcgtcctgcaccgagccttgcacgtacatcaactccctctccattggccccctcgccgccctcgccatccgtggcccaaacctcatcgccacccagtaattaatcaccattattatacactgattaattactgctaaattaactaaagatattgagtatattactatattactcctcctcccctgtattaaatctcgacgatatatacaaattaatttgttgattaatcggaatcgaaattagagctgatgcatgcatggacacgtgaggtgatcgatcgggcacacgatcgatcgatgacacgaacgaacaattaataacgcgagaaagggctcgcgcgagttgttggggtaggtctcggctggtcgttaggttggccagcttatttctcgttgcacgcacgcacgcacgtacgtacgcaggcgcgcgcaaccgtgtgtaagtgcgtgtgtgatggatcgatcaaccgagcggcgcgcacgggcgaatacgaacttttccaagtgatgaagtgatcacgtatacacgtagtacagcagccgagcttttcggtgagcgtgtacgacgtgtttttttcattggaccgaacataaaacatgtcaagtacgtacgtggtacgtttggttaatgcataaatgtatttgtggttcttcaaatcccgtgctcaggtatgaattaattaatctagctagctatatggtgtactatcttgtacgaagaagaacatctctgatgctgtatatctttgtgatgtatactacacgcacaataaattatctagtttggtgctatc

SEQ ID NO: 9624 - DNA, 867 bp, Oryza sativa
  ref <308>: DATABASE ACCESSION NUMBER: AK106972
  ref <309>: DATABASE ENTRY DATE: 2002-08-28
gtaaagacggtacatatataaatctttataatgttgggcactacatatgcaataattaatatatatgttttttactccatataactgtatggataaaatctcgtatattgtaggatggagttagcaatatgatcatcgatccagattagttacgttattattttttataagaatacaaagtctagcgaaactttgtaggaaattcaaaaattctgaatttgaatccataaatacatacctgcatcatgagagggatgtcgagcggctggacgtcgggcgccggctccggcaggagctcctccttggggatcaccatcgggtggtccagcagcttcacctcctccaggctgcacgccgccgtcgcctccacgaaccacgccccctcgccggtgcacgccaccgccacctcgccgccgccgtcgccctccacgaacctcccggcgaacgggtggtactccaccagcgccttccccagcgcctccctgatcaccaccctcgccggctcgccgccgccgttgcggccgccggcctcgaagacgtgcagcgaccgcaccaggtggcgcagccccgccacgcggtcgatcaccgacagcggcagcgtctccgccggcgtcggcgacgacggcgccaccagcgacctgctcgtcctcgtcaccgtgaatcccatgctaattaattcagctagctagctagctactgtgataatctcgcttagcttagcttagctagcttagtttttgtatgtgaattgaatgtgtgtgtgtgtgtggagatgcaagagccagtgccatgtgtatatataggctagctagctcgagctatactatatcttatatctttagttaattaattaagtggatattatgg

SEQ ID NO: 9625 - DNA, 1850 bp, Oryza sativa
  ref <308>: DATABASE ACCESSION NUMBER: AK106973
  ref <309>: DATABASE ENTRY DATE: 2002-08-28
acgccccctcgattctctctgctttccgcgctgctgctgaccgacgacggccgcgcccctgtcccggtctcctcctcgtccctcctccccgcctctccactcttccagaacatcgccaccgccaccgccgccgccgccgccgctcgccggccacgaccgcccccggcccatctacacctccgccggatctcgcagccgcgctccccccattggagggagatccgttccagcgcgtgggatttaatttcaacacatgactggtgaaatgtttgcttgatgatgtccggacatgatttcagtattgttcataatgcagttggcatctcatgccactcaagcagatgaagcaacagagcttgcttccagctgtgattgtgcagaagtgccagcttcacagcagatagtttctgaatcaagtacagcaggaagctccacagagcatctagtttcatgtgaaatcaagccactgggtgttgatgaagacattgaaactattgatgctaacgaagaaacccaccttgtcattcaagactgtccacaatgccggatttgccttgataatgaaggtgatgacttgattgcaccttgtcattgcaagggcacacagaaatacgtgcatcgatcctgtcttgataactggagatcaacaaaggaaggttttgccttttcacattgcactgagtgtcgggctgccttcttacttcgtgcaaatgttcctccagatcgatggtggttgagattgaagtttcaacttctggttgttagagatcacacgttgattttttttattgtacaactggttgttgctttattgggtatgctagtatacagattttatggagatgaactacgagaaatgtttggttatgaagagcatccatatgctttttatgcaatggcaatattggctattgttttggttggtttgctgtatggattcttcatagctataatatgtgggcagaggatcacagaacggcattaccatgttcttgcaaagcaagagttaaccaaggagtatattgtagaggatcttgaaggaactgatggagttcctgaccttgatcctaatcatgttacagagctgaggattctggggctatattgagtactggagatatcatcaattcatcagctaaatgtcgatgctaaaatggtcatatgggaaaagctctgtttagatacaaatccataaggctgatgctgcacggacatcatccagaacttcagcacaaggcatgacaaacgggcttatctgcgttttggaagacatgtttgtctgaaggcatccaatagagtttagagctatttcccttttttccccatgtaggataaattgctctcacacaaaaaggagaataagagatgatgttttctctaacatgaacacgtgcacagcaattaaaaatatcgccttctcgttttgcacaccaccttaagcaactttctcagctttgatcctgagtaattaagctaattaatgcaagtatgcaactatacaagattcaagcttttgttggaagttgaagacccactcactaatggtgggagtctaaagttaaactgcagcagcaagagcccagaagcaagcaaccatatgtacttaatctggcaagaatcactgcaatttgttctccatggcaatgcattgatgaccaactagttgctgaatgctactctgatggtgatgtatcatgattatgctgggtgacagttacagatggagacttcagcttctctatgccaaagtgtcccattggaactgtatctccttgattaattaggtggaggaactgagacttgatttgggtattagttaataaatgctcatcatccggggtttctgttgc

SEQ ID NO: 9626 - DNA, 1666 bp, Oryza sativa
  ref <308>: DATABASE ACCESSION NUMBER: AK106974
  ref <309>: DATABASE ENTRY DATE: 2002-08-28
ttttgtgtcctgtttctctgtgtgggtggaaggcctcgcctttcaatccttccatcatcttgctgtccccccctcgattctttgcttcttcttcttcttcgaaagaaagaaattaaatattattacttgtttgatcttttccttttagcaatttctgccaatccccaggttcagtatttagtttccatccgagcagatttcttgttcttcgcttcaaaaatctgcgtatcgaattccatccatttttttgctttgtccaattcgtggataaagaaagagagggggagctacgaatccggcgagatggggaaggtaggggagaaggtgagggcgttcgcgacgaacaggtggctggtgttcgtggcggcaatgtggctgcagtccatggccggcatcgggtacctcttcggggccatctcgccggttgtcaaggccgcgctggggtacaaccagcgccaggtggcggcgctcggcgtcgccaaggacctcggcgactgcgtcggcttcctcgccgggacgctctccgccacgctgcccgcctgggcgatgctgctcgtcggcgccgcccagaacttcctcggctacggctggctctggctcatcgtcaccaggcagctccctgcgctgcccctctccatggtactactttgcaatggccaatggattggttgttcttggatttgattttcggttcttggattgctttgctcgtggtggaatcccttgatttgattgattgatcaattgaaactcaagattgcaatgttagcttagttagcttgtactgttggtgatgagctctgaagattgcttattaaattactgtacaagttgtctatttgttgcttgtcaaattcatcaggaaccaaatgtttttgtgattgttctcctcttgatcggataaggagtagtaggaattgtgaagaaggtggggcctaatatgagatggtgacagcaaagcgtatgatttatataatccgtagctgaatgggatgggttggggaaaatggcgtggaggatagatcttagattagatcgaaggtgtatggatgatttttttaagcaccggattacttgtgaaactaaccaatcgaatttctggaccagcgaagcagtgatggtatattcttgatgtattcttatttgggtgtctttgtcactttatgttggccatatgcatcccttttgtttcttcagctgttaaccagatacatttcataatgacatcaatgtagtggaggttcatatcaattccgaagtaacctgttgagtgttggcatgttgcttttgtagccaaactctcttgatctgcttatatacaatttttttttcatcttcttttcggatggtaaagtggtcaggtttgacttcctaaacttagcatgatgtgtccatccaaattccatgaaagaggaagtgattgtgccacgtacagtgcatgagtgcgttatattgtcatgagtatgcacacagctttgccacattgtgaatttttattggaaaatctgaatttgaaaccatgaatcttcacctttatcctcgtgtgtgtccacacaacattgccaggttttggtgtttgagtggatggtgcttataacttgtaagttaacaactagtttataaaaataatttgcatgtttttctaagggatgaggggttgagtgag

SEQ ID NO: 9627 - DNA, 709 bp, Oryza sativa
  ref <308>: DATABASE ACCESSION NUMBER: AK106975
  ref <309>: DATABASE ENTRY DATE: 2002-08-28
aagattactgctaacactcgccggcatccgcgcgtggggaggagctcgccggcgtccgcgcgcgggagaggagctcgcctgccttccgcgctccggggaggagctcgccggcgtccacgcgcgggtgtggagctagcctgccgtccgcgcgccgggggagaagctcgccggcgtccacgcgcgggggtagagcttgccggccggccgtgcgcctggggaggaactcgacggccgtccgtgtgccggggaggagctcgccggcgtccgcgcatgggggtggagctcaccggccgtccgcctgccgggggaagtgctagccgtgctttggctttaaccacgcggtcgtcgtggccacgggagctagccgtgctcgatcgatgcatatgcatgctgagcatgcttgcatatgctttcactgttcccgatatggttttagataagctaagtagcccgtcggccgtccacgcgccgccgccttcttcctcctccctcccctgactgcggcttcggggaggagctcgtgcttcgtgcttccgccggccatcgtcacctctcccttcgtgcttcgtgtttcggccggctgatggaatgtaagagagacaaaaatgagagagagggggagaggtgaggatgaaatgtgggccccatgtcggtgggttccactattttttttgtgtgtgaatgatatgttggtcccacaatttttttt

SEQ ID NO: 9628 - DNA, 2604 bp, Oryza sativa
  ref <308>: DATABASE ACCESSION NUMBER: AK106976
  ref <309>: DATABASE ENTRY DATE: 2002-08-28
gaccaccaagtcgtcatcctcctccctcctcttccttccagtgccaatcaacccaacccccgcttccctccccccctcccctccctttccttcccctccaaggaagctatccccgtctcgcctaaaccctagcgcgccgcgatgtccggctccggcgtccccgccggccgcggctcccgcagcttcgacttcggcgccgacgacgtgctctgctcctacgacgacttcgccgccccctccgagcccaagcgccccgatccggccgacaagcaggactttcacgacagtagattggggagaccatttggaaaagcttatgaacaagagagttacggcaaggaggatgtactttttgctgttgagaagtgcatgaagaaatatgctgataatttgctgcgatcgcttgagggaattactaatcgtctttcacaactggagatctattgctataagcttgagagatccatgggtgaacttcgaagtgatgtgctccgtgatgagactgatcaaagattgaagtctcttgagaaacatcttcatgaagtgcacagatctattcaaatccttagggacaagcaagagttagctgaaactcagaaggaattagccaaatttcaacttacacataacacatctaaaaagaaggaagatatgccaacaccatctttccctgagcaaaagacgcttgaagaaaaggcagatgcacctggtcagcagctggcgattgttttgcctcatcaggtgaactcatcccttgcacctagagcttctcaaccagtccaacagtacaaagatcagacagtgcagcagccacctagctcttctgtaccacagcaggaccgttatgttcttagccaagccattgtttactacccacagcgtcaagctccaggcattcaggatacacaggggcagcaagtacaaccagaggtgcagtacttgccagtaaggccttcagcaacgcaagatgttcctgtccatgcttcatctcaacagtctcaggcagcaaatcaaacccagcctcagtctttccctccctaccagcagcagtggccccagcaatcttcccagccggctcctgcaccagtggcccagccacagccgactttctcgcagccatttcctccacctgtgcagcagccccaattatctaacactcagcagtttcctccacaaccaatgcagcagccccaactatctaacactcagcagtttgctcctcaaccagtgcagcagcctaatgctcaacagtttcctccgccaccagtgcaaccgcagcaatctaacgctcagcttcctcctcaggcaatgcaaccacaacagcatcctcctgtacaaaatcagatgaggcctcaaactccaccaaactaccctcattatcaaccccaccagtccttgaaccctccccctgaaactctacctggcagcatggctatgcaaggaccatacaacacggttgctccggcagcggggagccgttcggaagtgccatattcatacggaggacctggcatgccaccaccgcagcacaacatgcaaaggcagcagctacctcctccaagccagggctctttcggacctccaagtaaggggggctatgccggcccgccacaatatgcgccgcagggcagctcacatggctacaacactgcatatggctaccccccaagtggtccttcagcagcccaggcacctcagttgcctccagctccaggtaatgttggtatgagtcacccaggttcgcatcagatgatgcgcggccatccttatggggaaatgattgagaaggcaatcaccatgggatatcccagggagcaggtgatgaatgttattcagaggatgaccgagagtggccagccgatggatttcaacacattgctggaccggttgaacgaagcagggtccggagcaccccctcgtgcgtggtgatttcgtcctgggttgggtttggacctctctccatcccggcacggcgctcatacgtgtgcaaagagtggtactatcgtgtagtagttgaataaataagatttgaagtgatgccatctgttgactgttgcgtatttgtacgatgtacatattatacattgatcttaatcttcatgtacttcctgcacgtgtaccaccaacctctttgcaattggaccatttcagcagatctgtgctaatccaaattattgccaggtaaaaaaaaaaaaaaaaaaaaaaaaaaaaaaacagaggaacaaagagagcgagtaataacaaatgtactggaagaagctggatacacaagggattgcacgctttctttggaagattttaccaggattatagatcatcctggcctaaagatggaggtggaagtgcctattgactagtggcccgtgcatacctctggttttggttgctgaacataactgtgcataatcaataggacatgcaatgcaacagaagaacgggcgttcatccttctgctttcttctgtactgtagttccacatgcctcaaccccagtagtttgttacgatgcatgactgaatcttttgctcatctcgccgtgagcctgtcaatgtaatttagtggatcttgtcccctattgtagagacaaaaactccaaattttggcg

SEQ ID NO: 9629 - DNA, 617 bp, Oryza sativa
  ref <308>: DATABASE ACCESSION NUMBER: AK106977
  ref <309>: DATABASE ENTRY DATE: 2002-08-28
tggcctggaactcatcacagattcacacaaaccaggagaaagagaaggagatcgagcgatcgaggtgcccgtcgatcatctgtgaagctagctatattagctcggatcgccatggcgaaagctagggtgaacctgaccgtcgtcgtcggcctgtccctggtggctctcctcgtcctcaccgccgtcgaggatgtcggcgtctccgccgacaatgaaatcggctacacgaccatgaaccacgacgacatccctggaacaccaaagctcctccaccccggcggtcccgcaaacacgtacacgcgtggatgtgagaaagaacaggattgcagggattagcaggatgtcgcgagatgtcatgcatgatcgatcgatcccactgaagcttgcaatcacgttcgattggattaaacttcgtttggtgctctaggggagcttttcaacaatataattcatatagcagtatatttttatttgagttagtaatgacttctatatatctctactatcacaaaaatttaagttgtttttaccgatattttggtacgtcatccgtgtatgagtcggtttttaagtttgtttgcttttggaaatatatatctgtatttgagtcggttttt

SEQ ID NO: 9630 - DNA, 2684 bp, Oryza sativa
  ref <308>: DATABASE ACCESSION NUMBER: AK106978
  ref <309>: DATABASE ENTRY DATE: 2002-08-28
aacacaaaaacgcgccaccaccacacacgccgcctgcctcgcttcttcctccctcgtctccctcgcctcctccgcggaccgcagtttcagacgagccccagagctcccggtctcccaccccaagaggccggagacagagctgagagagagagagagagagagagagaggggaggggagggcgtgtgctcgcgcgccaccgcccggatctcgagctcccggatctaccgcaaagatctaaaccgagcaagaggcggcggctgctgctgctgcggccgcggttgttggtggtttgttggtgaggaggaggaggaggaggaggaggaggcgcgggcgacggcgagatgtcgtcgagcacgatccggaaggcgctgggggcggtgaaggaccagaccagcatcggtctggccaaggtcaccagcaacatcgcgccggagctcgacgtgctcatcgtcaaggctaccagccacgacgacgagccggccgaggagcgacacatccgcgagatcctccacctcacctccggctcccgcgcccacgtcgccgccgccgtcgcgggatgctcccggaggctgtcccgcacccgcgactacgtcgtcgcgctcaagtcgctcatgctcgtgcaccgccttctcgccgacggcgacccttccttccaccgcgagctcctgcacgccacgcgcaggggcactcgcctcctcaacctctccgacttccgcgacgaggctcactccggttcatgggaccactctgccttcgtccgtacctatgcgctgtacctcgaccagcgccttgagttcttcctccatgagcgcaagcaaggctccggctccaacgccagttccagtgcagatggcccgtcaccgcgtgaccgctggggatcacctgacccatatggtcgccggtcaccctcatactcctcaccccctggaaacggaaatgggtatggatatggtggttatgatgattaccgtgagaggaacggcaacaacaacactgatgacaagaagccgccgaccccagtgagagacatgaagccagaacgggtccttgcccgtatgcaccacctgcaacagctgctcgacaggttccttgcttgccgccccacaggtggtgccaagcacagcaggatggtgctggtcgcgctgtatcagattgtgagagagagcttccagctctatgctgatatatgtgaggtgctcgcagtgctgctggataggttcttcgacatggagtatgccgagtgcgtgaaggcatttgaggcatatgccagcgccgcaaagcagattgacgagctttgtgcattctatggctggtgtaaggaaactggggtagctaggtcatcagagtacccagaggtgcagcgtgttaccgataagttgctggagacattggaggaatttatgagggaccgagcaaagcggcccaagagcccacctcgggagcctgagcctgaacctgtaaaggaggaagagcctgagccagatatgaatgaaatcaaggcactgccagcaccagaagactacaaggagcctgaacctgagaaggtggaggaggaagtaaagccagagcccccaccgcaaccccagggtgatttagtggatcttagagaagaaactgtgactgcagatgagcaaggtaaccggcttgctctggccctcttccaagggccacctgcagctggtggaagcaatggctcatgggaggccttcccctcaaatggtggcaatgaggtgacttctgcatggcagaatcctgcagctgagcctgggaaggctgactgggaacttgcccttgtggagacagcgagcaatctgtccaagcagaaggccacaatgacaggtggtatggatccattgctactgaatggtatgtatgatcagggtgccgtgcgccagcatgtcaatgcacaagtgacaactgggagtgccagcagcgttgctctacctccggctggacagaaaacacaagtgctggctctgccagcaccagatggttcaatgcagaatgttggtggagacccgtttgcggcgtcccttagcttcccaccaccgtcctatgttcagatggcagagatggagaagaagcagctgttcgactgaaggtgaaaaacaaaagaagcccagaaatgcatagcagtacaaaaaacaatggtgttggttttgtttgcgtttggttggttcgtatcttgagttgttcatgtcagtttttgtggcatgcatgcaaaattggttgtaataatggttggtgagctggtagattaaattaggtggtagaggaaccgaaaaccccactgttaattgtctgtaatcatcgtcgtcatacctctcccgactcgatcgattcatggatggatcagtccaataaaaggaaagcagcagcactgttctttctttctgtatcctgtcttgtcgagtgagagccctggtggtgatgatcgattgttcagagaacagctgattcagaaggagaagattgtgcaggtttgtgtctgaagcaacagtttatggctcacagacatggagccctctctttcaagaagaaacgaaaaagagctccctgaatttgatggtggcgaagcgagattgtagtttggcaaactgttctaagttgatactttattcatccaaaaaactcaattatgaagatgtgacataatctaattacaacggatctggataggacc

SEQ ID NO: 9631 - DNA, 1684 bp, Oryza sativa
  ref <308>: DATABASE ACCESSION NUMBER: AK106979
  ref <309>: DATABASE ENTRY DATE: 2002-08-28
caaaagaggaaaggcttgcggtggatacctaggtacccagagacgaggaagggcgtagcaagcgacgaaatgcttcggggagttgaaaataagcatagatccggagattcccaaataggtcaaccttttgaactgcctgctgaatccatgagcaggcaagagacaacctggcgaactgaaacatcttagtagccagaggaaaagaaagcaaaagcgattcccgtagtagcggcgagcgaaatgggagcagcctaaaccgtgaaaacggggttgtgggagagcaatacaagcgttgtgctgctaggcgaagcggttgagtgccgcaccctagatggctaaagtccagtagccgaaagcatcactagcttacgctctgacccgagtagcatggggcacgtggaatcccgtgtgaatcagcaaggaccaccttgcaaggctaaatactcctgggtgaccgatagcgaagtagtaccgtgagggaaaggtgaaaagaacccccagtgggtagtgaaatagaacgtgaaaccgtgctgagctcccaagcagtgggaggggaaagtgatctctgaccgcgtgcctgttgaagaatgagccggcgactcataggcagtggcttggttaagggaacggaacccaccggagccgtagcgaaagcgagtcttcatagggcgattgtcactgcttatggacccgaacctgggtgatctatccatgaccaggatgaagcttggatgaaactaagcagaggtccgaaccgactgatgttgaagaatcagcggatgagttgtggttaggggtgaaatgccactcgaacccagagctagctggttctccccgaaatgcgttgaggcgcagcagttgactggacatctaggggtaaagcactgtttcggtgcgggctgcgcgagcggtaccaaatcgaggcaaactctgaatactagatatgacccaaaaataacaggggtcaaggtcggccagtgagacgatgggggataagcttcatcgtcgagagggaaacagcccggatcaccagctaaggcccgggaataaatcaactcctccagcggcgtggaatttttcctcgagaggaggcggcggcacaacgaagacgcgacggcgggggcggcgcgcggcgcgcggcgcgatccggaggcgacggcgacggcacggcgctcacctccggccgccatcttctctccggtgagcagcctttccccctctcccctcctcttccaaagctagggttagggttttcttctcttctccggcgatcacacgctgccttttcttgccccgccccgccgcccttcccgtgcggcgccatccgtcgtcccatctcctctccggcgagggcgtgctgttcggctcttctcctccggctcctccgccgcgccggcgttccaggcgatgcgcgtcgtccccggccaccaccaccacttcccttgtgctcgacgcgctcgccatgctcaccaagaccagagccatcgccgccgccacttcacagttcaccggagaaagccgctactagctacctagttctctgcatagatttgtttcttggctcatacaggggatatgtgcatgctgaagtccggtcaaatgaccaaatgcttcttcccttttcttgcattgatccaagtgtgactgcacttttgttcacaagaaatccaagcgtgcctgatct

SEQ ID NO: 9632 - DNA, 1042 bp, Oryza sativa
  ref <308>: DATABASE ACCESSION NUMBER: AK106980
  ref <309>: DATABASE ENTRY DATE: 2002-08-28
accgcccaatcgctgccgcgtgcgggggaaaaaatcgtcgactcccccaccaccatggccgcgcgccttcacctccgcctcggcccccgcctccgcgggttcgcgtcctccttcgcccccctcctcgccgcgcaccccagagcgctgcccctctcccgcatgggctcggtggcgcctctcgcggcggcacgcgcccgccgcggcttcggttccgccgtcgccaccgcgccgccggccgaggacgaggacttcgccacagctgctgacctccagttcgagccgccgctcaaggtcgtgaagtaccccgacccaatcctacgggctcgcaacaagcgcatcaacaccttcgatgacaacctccgcagcctcactgatgagatgttcgacgttatgtacaagactgatggaattggtctctctgcaccacaagttggggtgaatgtacagcttatggtatttaatccagctggtgtgaagggagaaggagaggagattgtccttgtcaacccggttgtatacaaaatgtcgaagagattgttagtgtatgaggaaggctgcttatcattccctgggatatatgccaatgtggtgagaccagacaatgtcaaaattgatgctcaggatgttacaggggcaaagattaaagttaaattgtcaggtctgtctgcaagagttttccaacatgaatttgatcatttacaggggattcttttctttgacaggatgtctcttgatgttcttgagagcgtgcgtgagggactgaaggacctagagaagaaatatgaggaaagtacagggctagtaagccctgaaagtattgagaactacaaaggaagaaaggatctcattagtttctcaagatgaatagctttcggttctggcagtttttcaaaacatcctgctgagcttcacattgaagattgtgtattagaacagttgccagtatcacatattcttctgtcattctactttttgccagtcttgctgtatctagttttgtgcaacaccagtgatattacaaccagaaattatgctagtgatg

SEQ ID NO: 9633 - DNA, 996 bp, Oryza sativa
  ref <308>: DATABASE ACCESSION NUMBER: AK106981
  ref <309>: DATABASE ENTRY DATE: 2002-08-28
agccagtggaggagcgttggcggcgacgtctctgacggcatggactcgtcagtgcggtggtgccgatggtcttctccctcgggagtgagattttgtttttctgtttcttttttattttctttttgtattttttacagtaccaaggaggctaccacgatttacgctgatctggcgacagtgcggcggtggcagccatgcgggcgaggccatcccaagcggtggccggtgactgcgcgacctggtggggtggagcagtggtggcgtggtggtcgttggcagggacgccatcggatctgtggccaccgatggctgtcacgaccaggagcagccgcagcatcatcctttctcccatcgtcttccattgcagtggcaggccaggcctgatggcgtcgcatccatggccgcttcctcaccaccgccatcactatggaagatgacgacgggagggacagcagcaacaagaggaggcggtggcactgccgacacaagcaagtgtcatcgacgggctacgacggcaaaaaacatccaccatgcgccgctgccgcccgctgggccttctaccctccttccaagcaactcccttggtggtcgcagcgccactgggatgacctccgatccgttggtggaggctgcatacaagatgacggcgcttggatctacagctgcatgtgttcatcgtcggctgtcgagctccagccaggcctcttcctgtcagtgctgcctagacgctctgtgtggtgggggtttttctctgaggcgtcgatgcctcgttcatcttcaccggcggaaggagcagaaaggaggacgacgattaaacagtcgacgcccgctatttccgttttttctatctagacatcatcgagagcaacccatgtttatttcctcaccccgtgtccatgttcttcttttttttgttctttttttcccaccgtgtgtataagtgtatcaagatcatcactacatgcacgcgattcatcccggtggagttaaaaaatt

SEQ ID NO: 9634 - DNA, 1666 bp, Oryza sativa
  ref <308>: DATABASE ACCESSION NUMBER: AK106982
  ref <309>: DATABASE ENTRY DATE: 2002-08-28
ctggaagaaagaagttaaacctatctctagtctcccctcttctctgttcgacctcacccaaactctggggcggcaaggctgcaggcctcgccttcccgttgagcaccccaattcattcctccacataacatccaccccaccacgccattcaccatgcctgccatccatgacctccacatgctgcgccaatcctccagggccatgcagacctccatcacggagatcacagctgggctcgacaaggtgacagaattggtgttggcactccgtgcgggttttgaggccaagggggtggcgttggaaactacgacgacgacgccctctccgccactcgcgacggcaccgccttctctgccatcgtccctgttcgcggctgcggtggaggaaccggtgatgacgatgccctcttcaccgccatcggtccaatcggcggaggtgctgcagcccctggctgtagtgccattttctcagttgtcgttcgcatccgaggctgcggcagtgctgtcacacctcacaacagtccggtcggcgctcgctggggcaccatcaactcagccatcgccatggaagaccatcgtgtcgcgtcgtcaccgttcccttctgcgaccacagcagcagcgagggatcttccagcagcttcctcgagcggcggctgcgattacgctgagcgttgctcgacgacggggagcatcacgtgcggcgccaacggcgtgggatccaggcgggccacgcgcgccgggaaagggggcgcagctgctgcagcacagcgtgagcaacacgcgtgtcaacctcctgggggtggcgccgtctacatgagcagcaggtgtgccacgagagtcggcgcaggaggcagctggttcctcgcgaccccacggcgtcagcccttctcacatgcggctggtgcgcatagccggtacggcgcgtcctcatgcagtgattgcggcatgcacggcgcaagagatgtgacttctggtggcggcgtgagatatgggaacggttcctcgttcgtccctgctgttcggtgggtcaactggaccgtgtctttttggctggtcacgtgatcctctgttgagagacaagatccatacaacatgtcttgggccaggggctattggagtgggctgcagttgtctaggcaccacacagctttggtctcctttggcaaacatgacagcaagcaggacatttgtggtttttggaacacacagtcacattggtatggcgtccttcctctatgttcttctggatggggcccacctgagcttggcagcagaagaatggcatggaacaccaaaataattttagatttattctttccaaataatgttaggagccgagatgtaaaaggcttaataataggacatcatgtgaagacaagcttgcagctcgcgggcgagctgcttccgaaggaggagggaaaggggactaggatgacatgggtgatcggcacccctcaacctttaggcatggcttccaccgcagctcgaggacgagctgtctcgaaggagggatggagatgttatgggcagaactcagcccctctcattattagataaggttgtaggaggtttgttaggccttttgttaggatgtttgttaggagctggctctatgtaaggagaggcaccacagtcatgtggaattaattaagaaagaagttaaacct

SEQ ID NO: 9635 - DNA, 766 bp, Oryza sativa
  ref <308>: DATABASE ACCESSION NUMBER: AK106983
  ref <309>: DATABASE ENTRY DATE: 2002-08-28
tggcctaaaaagatcgtcgtcacattttacgaggatcaaatttaccgtttgtgcgtaagaactgcatgagcagcggtaaatttagcaatttccaagtgctttcgagctccgatcgcttttccccttcattttaatcgcgcgagatcaagatcgatcgaaaccctagctgaccaagcggatcgccggatcgaacccgcaaaacgcgcgcgcgccaccactacgacgccatggaaggcggcggcgaccactacgacggcgggcacctgccggagctcggcggcggcgcgccgttcttgttccgcagccgcaccatcggggtgggcgccatcttcctcatgtggggggcctccgccatcgtcctcggggccgtccccgagcccgccatccccatcgcccacatgctgctctccttcgccttcctcatggcgggcgtcgcgctgctcaccctctccgtcgctgccccccgctgcgccatggcggcgagggcggcggcgaccctggagaactggctcacggcgttgatctagggttggctcgatccgattagatcagatcgcgttgatgagtagctagcccaactaattaagccatatatgcatctctcgctcctcgatcgattcgagtagcttattatggagtgtagcagttaattaattaagtataaactgtttgtgttgttatgcaactagctatagcttgatgtgtgatgatctaattgtaaatttgtaattaaagagatgaatgttttttttaattttctgttgtt

SEQ ID NO: 9636 - DNA, 1721 bp, Oryza sativa
  ref <308>: DATABASE ACCESSION NUMBER: AK106984
  ref <309>: DATABASE ENTRY DATE: 2002-08-28
gggcctcgcggggacagagaccgcctcgtgcggtgcggggttagcgatggcgtcgccggagcggggcgagcggcggcgcgcgaaatggccgcgccggcggcgagcggatcagcagaggaagctcggtgtggagagctccaacccgcctcccttccaggtcttacctgtcgtaaggaaccagatagttctgtcaagtctgagctgctgaacttggattgagcatgcaagcatagattttgaagaagacttgcagacacatatttgtatttgtcatcttggatcatgacagtgagctctctaatgaatgcattccctgcttcttttaacattgttgagcagttattgacactttccatcgccagcatggctaatgcttgaccagctgttatttttagagatcgatcagaatatgtgtttgatggtggatgttgggcaagaaatgcttggatcaaactgctaatgatcgcttggattgaacctatctcctgtcttgtgttttcgttaatggcaaggtttctgaggatctctgctgccagcttcttatgttcttgccagccttcaatgtcgtcgtccaatacttcttctaggtttctcaacaggaatggatggcctgacatcttctgccgcagtattataccgatttccccaccagtgtttgagagccttccgagcaattttagtgatgaacctttcagtatttttggctgtgtcccatcagtgtaccctataatcttcgggatgaggtctcttgctctgccaatttccacacagttgttaggatcacaatttgcaagcctagcaaggattgacattcccagtaaaggaaggcgatcttgttctatgaatgtctcctccttcggaatcgaccagcactttgaaatcaattcccagcacccaagaatccaagaattttcttggttgttgtgaagaagatgatcttggtcaagatgctcttggccattgcctgtatccgcaattgtacgttgtctttcctcctggctatcatacgtgtaaagtagtggacttcgctgtctcaattggttatcagtgtccagaagtgaagatatgttctgcattgacccagggatcgcgataacctggaggctccttgcaagctcaactacgactttcgcagccaacaatctgatttccgcatcctctggagcagtccagcccaacatgctgatcgatctttccaatgtttttgtggaggtgctgagtctgaagagcagaagcgccttagtgttcttccttttcagaaagctgtgtaacatccggaccccatcgagctggttgctgggtgagtctgagtctgttaaatccatggcaaagctggtcagttccatgttcattttagaaagcacaccgcccgaaatgcattgtccaaatatgtatgagtagtactggttgatgcatttcattccccacggccgcctgaacctgctttgatggaccaggattattctgaggatgaaggagaagatctcgaggacgcatgccacaatgtagagtgccccttggataagtactattacatagaagatgtttagagagaacatgatatttttctttgtatcttctgttgtcccgtcagaatagttacgctctccggcccagctgcaactcgtaggaatgtctaggggctcatattcacctgcctgagtgtagaacaagatttttaccactgctttggcaaaagtttgtacattgtcgacacagat

SEQ ID NO: 9637 - DNA, 1541 bp, Oryza sativa
  ref <308>: DATABASE ACCESSION NUMBER: AK106985
  ref <309>: DATABASE ENTRY DATE: 2002-08-28
ttgaaggccgaagaggagaaaggttccatgtgaacggcacttgcacatgggtaagccgatcctaagggacggggtaaccccggcagagagcgcgaccacgcgcgtgccccgaaagggaatcgggttaagatttcccgagccgggacgtggcggttgacggcgacgttaggaagtccggagacgccggcgggggcctcgggaagagttatcttttctgcttaacggcccgccaaccctggaaacggttcagccggaggtagggtccagcggccggaagagcaccgcacgtcgcgcggtgtccggtgcgcccccggcggcccttgaaaatccggaggaccgagtaccgtccacgcccggtcgtactcataaccgcatcaggtctccaaggtgaacagcctctggccaatggaacaatgtaggcaagggaagtcggcaaaacggatccgtaacttcgggaaaaggattggctctgagggctgggctcgggggtcccggccccgaacccgtcggctgccggcggactgctcgagctgctcgcgcggcgagagcgggccgccgcgtgccggccgggggacggaccgggaacggccccctcgggggccttccccgggcgtcgaacagccgactcagaactggtacggacaaggggaatccgactgtttaattaaaacaaagcattgcgatggtcctcgcggatgctgacgcaatgtgatttctgcccagtgctctgaatgtcaaagtgaagaaattcaaccaagcgcgggtaaacggcgggagtaactatgactctcttaaggtagccaaatgcctcgtcatctaattagtgacgcgcatgaatggattaacgagattcccactgtccctgtctacatctcgatctccatctccaaattaaacagaaccatttttataaattttagttgctgctcgttcctccgttgaagagatcgatatcaatatccgcgccatggccgccggtcaccggacgctgctgctcctcgtcgccgtcctcttcgcggcggccgccgtggcgctcgccgacgacgccaagccgacgatcctcacccccgtggcgaacaccccgctcggctccttcgacggcgactcgccggccgacgacgccatggacgacgaggacgccgcgccggtcggggcgcccatcggcaccaccatgaccgagcccaagcccgagctcaccaccacgccgggcgccgccggcgaggcggcaggcggcgccagcgccggttactcccttggtgttgcctctcacgtcggcgccgccgccgcgttcgtcgccggcgtgttcgccttctgagggcgaggatgctgggaacgagagaaacctccagccttgtgttgtgtcaatatatactgacaatacatacatacatatatacatacagcagtgctaatttgatgatgtacaattttcgttcttttcttcatccttgtacgataatgagcaaacattgcaaaagtttgcctcaaattctttcatgtaacagggcaccgtgcatttcaagattactggtagtttgcgt

SEQ ID NO: 9638 - DNA, 1935 bp, Oryza sativa
  ref <308>: DATABASE ACCESSION NUMBER: AK106986
  ref <309>: DATABASE ENTRY DATE: 2002-08-28
caatgggaacagttggaacaaagaagagatggccatttcaggtttttctcagagatgataaagtttcgtcacagcaacccaatattaagacgagacaggtttcttaataaaaacgatgtcacctggcacgaggattgttgggagaaccaggaaagcaaatttttggcattcacagtacatgatcacaactctggtggagatatctatttggcattcaatgcacatgactattttgtggacgctgtaattcccccaccaccacaccataaatgttggaaccgtgtggtggataccaacctggaatcaccaaatgatattgtaccagaaggggtgccatttacaggaccaaaatacagaattgctccatactcttccattctgctcaaggcaaagccttagaaaagttagtagttgagagcataaaaataatgccaccaatgctggcttggttggttaataacaggttgatcacattagcagtctgcacttcaaaaaggcaacaggtatagagaatgtctaataacaactgccgaatcatagttggctttggcagatgaggccacttttggcattcaggaatttcttccagttattactgtaggaatgaatgggctagggcttagggccctctgggggcagcaaagctcgaggtgtcgtctcggtttcatgtgagcgtgacctggctatggtcaccctatcatttatcaaggtcctgtttcgtaataatgtgtcatcaaacactcaactcccatgagaatgtatgccagcatctattttgctggaaattcatgaaaaaaaggaacaatgctattagtcccatgaagtatgaacatatgtcagtgtgtatttcttgcatgatgcagaggctgcgatattctgcgcctgcacctcccggtacgggctgcggcggcaggctcccgactgacggcgaccccggttggtacggagggaaagcttccacatgtgcaacggcggcaagctacagtgttcccaggcaggcaccaacctgttctccaatgcagccaagagaagagccagcttcgacttgacaagataacatggccatttgacagagctgggccagccggtgctgctcttaaccaaggcgtgtgaaaggttaactcgcctctcctgccaatctcacctgaatatcaagcgcctacagtgcagcctgagccagcatcatcgtaccagcagatcagatctttgagcccccgttttcgtttgggttatgtacacgtactgcagccgatcgatccgttgctgtaccgatggatctgagctgatgatgcactcactgtgctccagatctggtcgatctcctttaatactcccatctaaaaataagaggaattattggtacatacgctggcgcagtatttcacagcatttccggtgggattttcgctcagctgcgtcgatcccgtgaggtgaaaaggcctgtagctagccagctggggagcagcgaaaggctgcgatagattacgggcaccgggtcggtcggtgggggcgccgcacgatggcgagatgtcgagacgaggcgaggcccgcgcggcacgtgccggtggtggtgcccgatcctcgcggcagcgacagcccgcagacggcagaggcggaggcgcaacgcgagcggaggcggacgcgacgcgacgcgcgcgtgggtttcccggtgtttttgctgtgttttttctcccgtccttttcgtgcgggcggcggtttgcgcgcggtgccggcttgcggctttacttagctgtaggcaagcaaaggggggggcagcgtcacggacggctgcgtgcggcgcggcaagcagcagcacagcagatgcaacgcggggtcgtcagctgtttaggtagttcgttctctctccttttctaacttttactcactcacgtccaaaaaaaacaatcgatgtgaatgcgatttcagtttggttgt

SEQ ID NO: 9639 - DNA, 749 bp, Oryza sativa
  ref <308>: DATABASE ACCESSION NUMBER: AK106987
  ref <309>: DATABASE ENTRY DATE: 2002-08-28
ctcgcgccatccaagcgcccgcctctatatatgcgcgccgccaccatgtccagctccggcaactagctactgcgaagtgcgaactgatcagatcgtcgagaggaaacccaagatccaacgacgacatgtgtggcggcgcgattctggctaacatcatgccggccaccccacgcccccgcaagtgccgccccaccaccgccaccgccacccccaaggcgacgacaccgaacgtcgtcgtcgtcgtcaacctcgtcgacaaagaggccgaggtcagcgagagctccggtgccagcagcagcgcgctgccggacttctcgtggcagggcatgtcggcgtcgtccgacgacgacgccgcggcgcagcaggcactcctcgacgccgccggcggcgccaagaagcgtccccggagcgagccccacgtcacctccgacgacgaagtgctcccggcgtcattcgacagtgacaacaacaccgccgccgccggcctgctcccgctcgacgatcctttcttgttcggcgaccagttcggcgacctcaacggcggcgcgttcgcctcgctcatggacgggctgttcgccgccggtgaagcgaacgtcgccggcgagagcgtggggctctggagctccggcgacgactttctcaacgcgtcgtactattagctagggcttccatagttcttgtactttacttgtactgtactgtattgtactgattgttaacgttgccataaagcaatcttgctagtttgt

SEQ ID NO: 9640 - DNA, 2067 bp, Oryza sativa
  ref <308>: DATABASE ACCESSION NUMBER: AK106988
  ref <309>: DATABASE ENTRY DATE: 2002-08-28
aggtgacatccaaacgaaaagcttcagcccccttctttatagccttttgttacaagtataaaaacaagggtgcaaacagaagtcagttttgccattaatgtctgattttgtatcttttgctagcaagaggggatgtgcatagtgtgaggagagagaggtacaacaagaagagagaaattaagagagcagtagtagaggtgtgctgcaggaggatggtcagggccttcataagggcttcatggggggctccagagaggaagatcgtcagcaccacaatcacctcccttctgagctccccctcggcttccggagctcctcaccgacgacgatgatcgcctcttcctccatgagcaaggaatcgagcaactacgacatggccgatttcgatcaagcttcgctttttctctacctagacagtcatgatcaacaatccatccaagaacaacgacaaactctgaacatcttcccttcccagccgatgcatgtagccgacccagctcatgaagcaaagagtgctggggtagccatggccatgcttcccaatggcaaccagctgcaggttcttgcttctcatcccagcaagaagcctgatcagcaaggtggtcaaaagattaattccagtgtccctactaatccacctggccctaatcttcccttgcctaactctgccaaggataacaagaatagtagcctcattaagaaggaaggaagcagcagtgggaagggtgcaacaacatccaatgatccagaaagagaaggaaggaggacactagaccctaagacactgaggaggcttgcacagaatagagaggcagcaaggaaaagtaggcttaggaagaaggcttacattcagcagttggagtcaagtaggattaggctaagccagcttgaacaacaagttcacgtggcaagagtacagggtgctatgctgggtgctggagatcagcaccagggccttccttctggcccttcagctgcatcgttgtttgacctggagtatgggagatgggtggaggagcacagcaagctgatattccagctgagggcagccctgaacgagcagatggcggacagccagctgcaggtgttcgtcaacggcgcgatggcgcagcacgacgagctgctgagcctcaagggcgccattgccagggctgacatcttccatctcctctgtggcgtctgggctacccccgccgaacgctgcttcctttggctcggtggatttagaccctctgaggccatcaaggtgatgcttaagcaggtggagccgttgtcggaggggcagctgatgagcatctacgagctccagcaagcggcgaaggggacggaggacgccctcagccacgccatggacggcctccagcagtcgctctccgacaccgtcgccgcccctgacgtcgccgccgccggcggcttcatggggcacatgtccctcgccatgaacaagatctccgctatggaggacatcgtcaggcaggcagatggcctgaggcagcagaccctgcacaagctgcagcatatgctgaccatccggcaagccgcccggtgcttcgtggcaatctccgactacttccaccgcctacgcgcactcagcacactatgggttgcgaggccaaggccggaggaggggccggcaatgtagaataagtgtctcagagaagatcagaacatcaacaacaatgcttgcaaaatttaacctggttaagaattaggtagttagctgcatgcagtgaattgaactagggagcacatttgaagagaggtgtatgtgagagtaatgctctctcagatgtgtaacttgcaactttgtaaggtgtatatagcttcttaggtgttagagaagaaaagaagtagggaatagtggaaacttaatttgaactttcttttgtttctttttatccctgactttttctacttctttgccagctatatgtaagttcacctggaactacatcattgatttggatagtgtttctaatacttgctggtaacaaaatcatgagataaatgctctaaggggaaaaaaaaacttccagagtctcatatcccctctgaaatttgttcgct

SEQ ID NO: 9641 - DNA, 1144 bp, Oryza sativa
  ref <308>: DATABASE ACCESSION NUMBER: AK106989
  ref <309>: DATABASE ENTRY DATE: 2002-08-28
ctccacctcagatctccggcgagccgatcgaatcggcggctgcggcggcggcggcggcgcgatgtcggggcagacgcagcgcctgaacgtggtgccgacggtgacgatgctcggggtcatgaaggcccggctcgtcggcgccacccgcggccacgcgctcctcaagaagaagtcggacgcgctcaccgtgcagttccgcgccatcctcaagaagatcgtcgccgccaaggagtccatgggggaggccatgagggcgtcctccttctccctcgccgaggccaagtacgtcgccggcgacggcgtccgccacgttgtcctccagtccgtccgctccgcctccctccgcgtccgctcccaccaggagaacgtcgccggtgtcaagctccccaagttcacccacttcgtcgaccccgccgccggctccgctgggccatccaacgcgtcccccagcctcaccggcctcgcccgcggcgggcagcaggtcgccgcctgccgcgccgcgcacgtcaaggccatcgaggtgctcgtcgagctcgcctcgctgcagacgtccttcctgaccctcgatgaggccatcaagaccaccaaccgccgtgtcaacgcgctggagaacgtcgtgaagccgaggctggagaacaccatcagctacatcaagggggagctggacgagctcgagcgtgaggacttcttcaggctcaagaagatccagggttacaagaagagggagatcgagaggcagatggctgcagccaagcaattcgcagaggaacagcttgcggaggaggttgccctcaagaggggtatctctgtgggtgctgccaccaacatgttggttgccggtggagagagggacgaagacatcatcttctgatcatcttcggtcatacagtgattcaatcggtgcgtagtattgatgctttatgctatttttgtgatctgatattggaaacctctcatagatgtgttcacagtggcacattcttttcataagaactacaattttaatatatcagacttcagtattagttaagttgcatcaattagagataactgtttttaggaacagtggttcttagatggatgcaatttactttgttagatatgtcaagatatcaaactaatgatcctattcaagctttgtatc

SEQ ID NO: 9642 - DNA, 2150 bp, Oryza sativa
  ref <308>: DATABASE ACCESSION NUMBER: AK106990
  ref <309>: DATABASE ENTRY DATE: 2002-08-28
atggattttttgtactactacttatgaagaagctatgcataatgcagagggaaaagcagcaagaattaaggtgtagcaacctgcaaaaatgcgcgccaaagtggagctagccgtcctcctcttggtcctcgtcggcgtcgccgccgggacccggccgccgtcggcgccgccgccggtgacggaggacacacttcagaaggtggccggctcgctggaaatgtacgtcgacgagctccctcagatgcccaagatctacggcttctccatgagacacggtcacccctctcccattcgtctcaccatcggcatgtaccagaagaaatggaaattccaccgcgacctgccggcgagcaccgtgttcgtgttcgggacgtcggcggcgacggccacgttcccggggcccaccatcgaggcagcgcagggggtcccactgtcagtgacgtggcagaactacctccccgcgcgccacatcctcccgtgggaccccaccgtgcccaccgccatcccgcgccgcggcggcgtccccaccgtcgtccaccttcacggcggcgcccacccgccgcagtccgatggcagcgccttcgcctggttcaccgccggcttcggcgagaccggcccggcgtggtcgacgccgacgtacacctaccccaacgcgcagtcccccggcgtgctctggtaccacgaccacgccctcggcctcacccgcgccaacctcctcgccggactcctcggcgcctacgtcatccgcaacccggcggtggaggcgccgctcggcctcccctgcggcgatgagttcgaccgcgtcctcatgctcgccgaccggagcttctacgccgacggctccatctatatgaactacaccggcatcatccccaacatccacccgcagtggcagccggagtacttcggcgaggccatcaccgtcaacggcaaggcatggccgttcctcgccgtcgcccgccgccgctaccgcttccgcatcatcaacaccagcaacgcgcgctacttcaacctctccctcaccaacggcctccccttcaccgtcgtcggctccgacaccaactacctctccaagccggtcaccgcggcgagcctcctcgtctccgtcgccgagacgttcgacgtcgtcgtcgacttctcccagtccaccagctccgaggcggagctggtcaacacggcgccgtacccgtaccccgacggccaagcgcccaacgacctcaacggcaaggtgatgaagttcgtgatctcgccggcgaaggcgaaggacacctccagggtgccggcgaagctgctcgactacgtcgctgtcgccgaggaagaggcagtgcagaggcggtacatcgtgatgtacgagtacgaggacgccgccaccggcaacccgacacacctgtacatcaacgggaagaggctggaggacccggcgacggagacgccgcggccggggacgacggaggtgtgggaggtgatcaacctgacgccggacaaccacccgctccacctccacctcgcgacgttccaggcgacgcgcgtccgcgggctcgtcgacgaggacgcgttcaagggctgcatggcgaagctcaacgacgcggtgaggtgcaacgtgagccggcacgccgtcggcgaggaggtggcggtgccggagcacgagaaggggtggaagaacgtggtcaagatcgcgccggggtacatgacgacgatcgtcgtcaagttcttcatggtcgacagcggcaagccgtacccgttcgacgccacggccgagcccggctacgtctatcactgccacattctgggtcatgaggacaacgccatgattcgcccgctaaagctgatcaaatgaagacatttttaaggaaatgatgatcagagtacaagaagcaatccagtaccaagtgtaaatgggatccctgaacagagaaaagcaatgagattataatttattttagaaattgtttaagatgttgtatcacaataacttaataagctgtaggccatgtgtttgtactttgtaggtaaagtaagcatttgttttaggagacagaaagcaaaaaactatgtctcctaaatttgtcatagttgtccttcctttttcactctgttcttcatgtattcttgactctgctaaatgccaaataatgaaagttattctctcc

SEQ ID NO: 9643 - DNA, 1074 bp, Oryza sativa
  ref <308>: DATABASE ACCESSION NUMBER: AK106991
  ref <309>: DATABASE ENTRY DATE: 2002-08-28
ttgaccaaaataaacccggcgccgacgacgacgccacaatgatggccggccggcgaagcgcccacgtcgacgccgccgtcatcgccgccgccgccctcctcctcctcgccgcgacggcggcggagggcgccgtgtccagctgggagtccaactccgacgaggactaccacatcttcgtggacaaccgcatgtcggacaacatgcacctgagctgctacgccgtgcagggcggcggccggagcgagttctaccacagcttccgcgccgaccccgggagggaggtgcagctgccgtacctgcagccggcgcccaacgcccgcctcgtctgcaagtgggcgtgcgcggggaactacctgaagggcgtcaccctcttcagctcgtcgtggcgggaggccacctccggcgagtgccgccgccgcggcggcggctgcaacatggtgttcgactggcacgagatgttcgtcgacggccgctcgggcggcggcgggaggaggctgctcggcgacctgccgcagcacgagtgccagaagatgctgctggtgttcaaccgccgctgctggttcaagtcgcaccgccacccctacgtcggccgcgccatgaacggcctcaccgactacctcatggcgtagcacccatgcatgcacacacaattactccctccgtttcatatcaaactagccatcttaattttgatcaaatttatgaaaaaacatagcaacatttttcatatcaaaatatatttacggttagatttaacaaaactaatttgatgttttagatgttgctattgttttctataaactcaataaaaaattttaaaaaattaattaggaaaaagatcaagcatcttatataatatgaaacggagggagtaactaatacgtatacgtgtattcttacacatgtacgtacgtatatatggcagcggacggtttcgatgatgtgtatgtatgttgattgattcctgtcaaattaatttctagaggattaagccttagaaggtgatcacggtcgatgtactttgaattttgacgaattaattaatttaaattgtaaaggtggtgaaattttttg

SEQ ID NO: 9644 - DNA, 2019 bp, Oryza sativa
  ref <308>: DATABASE ACCESSION NUMBER: AK106992
  ref <309>: DATABASE ENTRY DATE: 2002-08-28
agcgccgcctcgacacctccgccggctcgacgcctctcaccctctctctcccgtgagactcggtggcggcgctggcggtggcgggcgcggcggcggcggcgggcgacggcgagggcagcatatggggcccggaacctggcgcaaggcctacggcgcgctcaaggactccaccaaggtcggcctcgccaacttcaacagcgagtacaaggatttggatatcgccattgtgaaggcaaccaaccacgtagagtgcccgcccaaggagcgatacctcaggaagatactctttgcgacctcggcgaatcgaccgcgatccgatgttggttactcaatatgtacattggctaggagattatccaagaccaagaactggattgtcgcattaaaaacattgatagtgatacatagattgctcagagaaggtgatgggacatttaaagaagacttcttgaactattcttatagaggaactattttgcagattccacaattcaaggatgattcgagccctttagcttgggattgctctgtttgggtgcgcacatatgcgtcctatctagatgaacgggtcgagtgctttagaattctaaaatatgatgttgaagcggatcgcctggtgaaattaccccaagcttctggcaaggcacacagcagaacaagaactctaccatgtggagatcttttagatcacttgcctgcattgcagagactactactcaggctcatttcttgtcagcctgaaggtgcagcctgcacaaattatcttgtacaatatgcattggcccttgttttgaaggagagcttcaaaatatactgttcgatcaatgatggcatcatcaatcttgttgatgtatttcgatatgcaaaaatatgatgctatcaaggcacttgaaatttataaacgagctggctatcaggcagaaaagctttctgctttttatgagcactgcaaacgtcttgaattggcaaggactttccagtttcctactttgaggcagcctcccccttcattccttataacaatggaagagtacatcagagaagcaccccgtgtcagcatagcaagtaaaagtttggaaagcgaggagcagaattcacctagtgataacgaagatgaagctccacaggaaacagagaaaccagtggatgaggaggaacaagaaccttcagagcctgaagaagagccacagcctacagctgagtccgtggaaggaacagagccggtaccactagcaactactggggatctgttaaatttcgacgaagaagtaaaccccctgattgcaaatattgaagaaagtaatgcactggctcttgcaattgtggcaccagggaatgaaaacaaggcctcagcttcacaagatttgtttgcgctggacaagtctgggtgggaattggcactggttaccgcaccaagtacccacacaagtcgaccagttgacaatcagttggctggaggatttgacaagctactgctagacagcctgtatgaagatgaagcaaggaggcagcaaatagccagtgcaacctacaacggcagcgttgcaggaaacccatttgatcccaacgatccatttgcaatgtctaataacttcgcgccaccgtcgaatgttcagttagccatgatgcaacagcagcatcaggattatcaggagcagcagcagcagtattatcagattcagcaacagcagcaaatggtgacgttgccgccgcaaacataccatcagcagcagcagacacagtattctgctcttccttctcatgatggattatccaatccatttggtgatccattcggtggccttgttgcgatggctaatcctccaaagcaaaacaattcaaatttagtctgaattcgcacattcttttctgtatcaccctccgatttttgatcgtatctccttttccaattttgaggagcaacttgtatagtccgacgattttcaatactgcatcctgacgatgcaatgtaatactcacatttggaaactgatatgatcattcaaatgtcgatgtacc

SEQ ID NO: 9645 - DNA, 2518 bp, Oryza sativa
  ref <308>: DATABASE ACCESSION NUMBER: AK106993
  ref <309>: DATABASE ENTRY DATE: 2002-08-28
gtctagtggagccaagccaacaccaaaaaaatgtgaaaaaaatggcagcagcctaacaaatccaccagtggccgtccgtcctccggcctgcaagctcccccaactggcgagggctcgccggactccgacgatggccgcgcgggcgccacctcgcctccgcgcgtatcccctcgccctcttcttcctccctgtggcgctgctcggcgtgctcgccggcgccgcccccatccgtggcgacctgcgtcgtgtggtggaggtcgagggcgagccgaggtcggtggtgtgggcggtgcagctgtccgacctccacctcagcgccttccacccggaacgcgcggccgacttccgccgccatgtgggcggcgccctcgccatggtcaacccctccctcgtcctcatcaccggggatctcaccgatgcaaaaagtaaagatttgttatcatcaagacaagagaagtctgaatggttggagtatgaagagttgattgacgaagttgttggcttaagtgggctgaacaaggaaatattttatgatttaagaggtaatcatgattcatatggtgttcctgaggttggtgggatgtttgatttctacgaaaagcacagtattaatgcaagattaggacggacaggtaatgtccaaagcataacattacagaatagtggttggaagcatctatttgttggattcgacagtgcagcaagtattggtctacgaagccctgcaaatgtattcgggcaaccaacagatcagttacttgttgaattagatgcagccctttcacagtgggataattactcttcaacttctgcagtaacaaaggttacctttggacattttcctatgtccttttcatcatcaacaacttcaggtggaagcctcagagatgtatttctaaagcatgcattgtcagcttacttatgtgggcatcttcatactaactttggaagaaacttgaagcgtcatcatagatctgacagaaatcatctttctgcaaaacaatattaccaaactaatatgcatgaaggcacatcaacatccataggcagtaacaactgttccacgacaacagaatctgttgcagaattctgggagtgggaaatgggtgattggagaagtgcccggagcatgaggatcctagcaattgattctggccatgtctcatatactgacatagatttcagatttagctctatggatgtgatcatagtacccacctttccattggattctcgatttatgcaaagactttctacacctcatgatttgaactgccaagcaaatagcaccagtcattttgggatggtaagaacactagtcttctcaaaatataagattatagctgtctcagtagaaatatacgattcattttctggtagccatcatctagtattggaaaaagacatggaaatgactagtggtgagggagcaagaggtgctatgtatacagtcccatggaactggaaagcatatgtagatgaatcgccagatcggtactggctccagatagaagcaaaggatttgaccgggaagatatattatagccaactgaggccattttctgtgaatggtttaactgcaaaagttaggtggacttggaaggagttccgtgtgatgggttgtcagtggggtcagctatatcaaccaattatgtggtctacgcttgcatttctttgtttgctgattcttattcctcgcacattgctcatgttatatgagaaccacatgttgaaatgccgtagttcgaagacggctgcaggtagttcaggacgccatctgctgatcagttttgaatattttgctgctgagctgtcaaagatgtattctgtatggtctgggatgttgatatatttgttatatctggtcttcttcccatggtttgctggcaacgctgttacagaaaatcacaataaaatgtatctttattacaaaggttggagcactagtaatctagccaatctgagtacagcagcgccatatattggtctgcctgatgtgatggttattgttcttcctcatcttctatttgtggttttgcctgcgtttctcattatagcagccatagcagcaaatagggcagcatatttggtccacatctcccacaaggcaaagaaggatgatgatcactatgaggaaagaaaatgcatacatcatgtttggatattccgttgctttagaaggtttcttatacttctttgtctgccaattgcatggagacattggaagcattgtagggctatcgttagggcatacgaggctaatccattcatggatgcacctatctactgcttcggtgttccactacttgtatgcttagctatctacggggcctcagctatatgagtatctttttgggtaagctttaagcaacaatttcttatcaaatgagtgattgtactgtggaagattgaatattaggttaggcatttgtagcattaaggtcttggttatatagaatgtgcaagtctgaagttgtaatggaacatatctgaacatgtagaatcagtgttgttttat

SEQ ID NO: 9646 - DNA, 1285 bp, Oryza sativa
  ref <308>: DATABASE ACCESSION NUMBER: AK106994
  ref <309>: DATABASE ENTRY DATE: 2002-08-28
caaaaagatgcagcaggtcattgcgaagctaatggtggtaatcttgctagctacggtggtcgtaattgacgacggcgttggtgcgagcgaaggtggttctcggcatgctaaggcatgtcgagctccggctcgtttctatgcgaatgggtgcatgcatgtgtgtctactgggttcttgggtactcattgaagctagacccgcagcttggattggtctgaacatcggtgacagtggagaagacgacctggcagcaacggaaatcggcatggcgacggcgtcgacgttccttcggtcttcgagctgccaaggacagggggggaacggcttagagggaacctatagatgctctacgagtgaggaatcgcgccgaagctcacccgagagcgaggaatggacgacgatggccggcggctggacttaaggtaggcgacgccgatctccctctacgttgcggcattggctgggattcttgagggatttcgaagaggaggtcgtggtgatgatgatggcgcgacggctcggccggatttggtccacggaggccggcgcgacgatggtgatgcagcggtggcactcggtgcgcgctccagagcgtcggagtgcgcggtcgcgttcctgtttaaccgctgcatggaatgggacgaaattagatggaacggagacggcatcaagagtagattgaggaacgcaaaagaagaggaaacgaccgcggctccatggcgttggcgacctttgtcttctcggtggccggcgatggagatgagggcgacggagccctcagtttggtcggctctggagtgaggagtggagatggacgacgcggctggaagagtggagtggagaaggcgagctccgcgttggacacgtcgaggccacgcgtcgagcacgaccagagctcggtcggctctgattcccttcgctctctctctctgtctctgttttcttgtcggctgagggaggttaacaagtgtaaggacaagccagtgagattgtcatgagggatgggtaggttcttgactgaaaatcgattttcagttatttacaggattatttcttttcccatcttcgttagttcttatattaatttatggtgtagataaatccatgtggattttactggaggtaggtgaatatacctagtttttattttttttgggttgcactaaaaaattatgtgtagtttgctctcagaaaattagagaaaataggcttggtgtaaactagtttataaatttttaggaggtctaaacagatgaaataaattctggaaaaattatatttattc

SEQ ID NO: 9647 - DNA, 2251 bp, Oryza sativa
  ref <308>: DATABASE ACCESSION NUMBER: AK106995
  ref <309>: DATABASE ENTRY DATE: 2002-08-28
atttatatgccttgaaaggctagcacagttgcagaccactagttccagatgatccagctgagagctccaaggctattctggcagacaactctatcgaggagaaaagatgggaggcaagttgctaccaatcattttctcatcctagcaaaagatgccaagcagtgcacagttggtagatgcaaccatttcttcctactgaaaagtccatccagaactatatggagaacagaagaaaagacaagatatcaatctgatgcaaaggggtacctgagatgctgccatggtgcccttgattgcaacgagcatgactgaagagcaggaaacagaagaggaagaagaggggcaaggagcttgtggtagatgtggggcaagcattggccataacccttcttcaaacaaatggatagagaatgggaggatggtggtgtgcctggattagagaagcaacacaaggggagcaaatgctggagactatataaatcggaggctggtgcaatggctcttgtgtgtgtgcctgcccacccctgtggctctgctcatgccaggcatatgcatatccctgtgccataccatgcagacagtgttgtatagcgagaaggggagcagtggggactgcggagaccaccagatggctcatctccctggtatgcacgcgcacacaggataaaatcacagcagagaactagggcatgtagaaagaggggacaattatttgtagcaatcatggaacatccgagcagcggatacagtcagcgaatctaagcagcggtggaacttattcagtaaaagaagatgcagaagcattcaggcacggcgtgtcatctggttatataaaagttgtatgcagtgcactattggggtggcagaggatgggcgagaaagcaatgagacggagatgcttggttcttgcatttctggctttctgcggccggttacctcttgtttgttcatcactggcacttaccgcctgttacacgacggcatgggctgcacctggatcttgggacaacattcagagaatcagactatcagagccgtactatgaacagtttggatatcttgcagaaagcaattgatggaagctctgatctgcggtgcatcagtctatttctttttctaaagatgttggtcgtggtggatatgggcaatgtttagctcttgttgctttcagttccgaagcagtcaccactaggagatgctggtgatggtcaccgagtcacgagacagcaactggatctaaacttggtcaaactaacaacaatattgttttttcaagcggactgcaagcttctgattttccaggtcagggcatgtttgcacgcaatgaagcattcggtgcgtaaaaattcttactgcctgtgagaagttactgaattttatggtcgagttcacgcgttgaagccttttttccctgagctgattcacggttgctgggatgagtcagagatgattggctgtggttcccccaactggggttcttcacggccctgcagctggaggaggccccggggacgccgcacttggacgggatctgcgtggcgcggtcggcgtcgatgttctccaggttgcggagcatgtccctgcggtcgcagaggcactggaagtcggcgttcgccaccgccttgcagcactccttcgtcggcgccttctccgcgctccccaccgtgcagtacgaccggcacagcgccacggccgaccggtcgacgccgcacatcgacagcccggccgcgccgcccgccgccgccgccaccaccaccaacgccaccagcaccaccgcgcttactttaccggccatcgtcgtcgtcgtcgtcggagatcggatcgatcagagactatacgctagcttagctaagtgcgtcgtgggggttcgtcgtgtgtacgttgtgtggtacgtagctaagatggctatatacggtcggcttatatagcgtgggggtaagttagcgcggcccgtgacgtgcatgtgctcgcgcgctagctttgtctccattagctagctatgtcacggactcatgggcaaagctcagatcaaatcgcgtcggcacgttcacgagacgccgtggattcccgggccatgcatatgcatgcacacggtcgtatatacgcatgcaggtagcgcaactgcgctagtacatctgtacatgtgcatgtctgctactgcaggcacgtacggtgaaatgcatgtctgtattacggtacagtactctatcggcatatttagagagcttaatattctgagaagcagctgatt

SEQ ID NO: 9648 - DNA, 2289 bp, Oryza sativa
  ref <308>: DATABASE ACCESSION NUMBER: AK106996
  ref <309>: DATABASE ENTRY DATE: 2002-08-28
atcctgtagtaacgaaacaagcagagagagagagagagagagagagggagagagataaataatatacagaaatgagcaggtcgagctcgagcatggccaccgtcctcgtggtgttgatggtcgtcagcgccggcggcttatccccaccatgtgcggccgctgcgaaggaggagaagccagtggtggtgctgccacctgcggcggcgccaggggaggcgccctccgcggacgcggcagcgttcgtccgcccctgctgcgacaccgccctgcaggccgaccgcgacggctccagcttctgctatgaccatctcctcccctacgctgccttcttcgagggcaaccaggtgaaggtcgccgaggtggccgccaccatcctaagcaccaacctctgggtctacgcatgctctctagctacctactaagtggaagtacattattttatttattatacttgttgttaattcccatgatcgattagtggtgttgtccacgatttttggtaacattgtttttctcaattttctatttcatatattcccaactctcaattctacattatatatcattttttcattcaacttcatacatacaattcctcagttctttcttatatataggccttacgctaaatttcttttggatacacaccaccgtcgattatatcgtgcatacttttgtatttcaattaattaattgtgatacttgcttcccacacattgatcgcatgcacgccacatttgtaacattgttatcaaatttcggaaataaatttatctatcgtgtgaattatttcagcttgcatgaatctttctttttattttaagcaacctttttctggtcaaaacaaactacacaaaaagatgacaaccaaaatatgttgatatattattaggagtatcctgattcacaccaatgctaaaacaaaaacataaaattacaatagaaaaatgtaagtaaacatcaaggctagagctaggcatttaatgctaaaaataaatgtcaatgtgtagctgtgtgaaccaaaatagaaaagagaaaacagatagttagttattgatcgtccttgttcctgtagagaaacttgtggagagtatgcgtaccgggtaccgacacggcctccatattcgactagagataggagtgggccggatccatctattatgtactagagtgggctgtctggcttgttttctactttgtaaccctgccccccaacctatataaggcgggcaatgagcccctacaagggcatcagcacggataaccacaatcagatcatcagatcaatatccacctggcggatacaaatccccaaacaggtgtagggttttacctctcatcgagagggcctgaacctgtctaaattcttgtcttcacatccatccacttttatgtctcgtgcgatactctttttcatattgccgaattccagtttaaacagttggcgcgacaggtaggggaagcgtcgaattatccatcaagaagtgcaatggaaacaacttcaggaatcaaaggcattgtttttgctcgagggcaatctcaatgagatcgatgattctaatctctgacgtcgattggtttgtcgtttcaatctatatgaaatcttttttgacctgaaatactgccagggctttgccgagcagtgtaattttatataactcaaaaaatatttacaaagttacagtcgaaggagttaaataaaactataaagcttgcaaccaatcaaaaacaatttgctttaagggatccttcattctgcacatatacagaagaacttctttcacaatctatataatattattagcttgatttataatcatggattgatctgtcgtacgatgtcttctttgcatgcatgtacgggtggctgatgaggtccatgggccgccgaaccagcacgtctgcccgggagggaaagcgaagtcggtgatgcccgaaatgaatcccatcgcactagtcggcgaaaaacatggcgcaacccctacctgacgcgccaactgtcaaaacaagattccggcaatactaaaaggggtagcaatcaagctggaaaagtggataggttaggacgtaggaggcaaaggtttatacagccggggaattattccaccgagtgtattattgatctgatgatctgggagaaaagttatgcccctaggtacacttggacccgaccttatatagggggaggagccaagattacaatgtacagcccatatggcttacgtactaggctaacgaatatgtattacaactgtaactaactggcactattggatattttcttgacat

SEQ ID NO: 9649 - DNA, 1991 bp, Oryza sativa
  ref <308>: DATABASE ACCESSION NUMBER: AK106997
  ref <309>: DATABASE ENTRY DATE: 2002-08-28
atcctccgcgacgcacatcgtccgtcccaccacgatgtggcctctcctcctccgcgccgccgtcgtctacgcggcgctgctcgccgccggcgaggcggacggctcccacgatgtcctcgacatcttcggcacgcgctccgagagcgactactaccgtaacgcgttccaggggaagcaggggcaggcggtgccgctgccgcgtggaggcggcctccgccgcgagcagcaggagctcggcgccgcgggcccgggcggtagcgggctctcgaaggcgccgcctcggtccgcgcccagcaaggtggctctggacagcctgaagctccccgtggacacctccgcgggcttcgctggcgggtggaacctggtgagcgagaactccggcgtgtccgccatgcacctggtggtcatgcagcacggcaaggccataatgttcgacacgtgcacgacgggacgttcgctgatgcggctgcccccgggcagatgccgccctgacccccggagcaagcagcccggcgccatggactgctgggcgcacgccgtggagttcgactacaacaccggcgcgctccgctctctcaagatcgtgacggacacgtggtgctcgtcgggggcgttcgacgccgacggcaacatggtgcagaccggcggcttcttcgagggggacaagtctgtcaggtacctgagcgcatgcggcacctgcgactggaaggagtttcccaagagccttgccgacggaagatggtacgggacgcagctggtgctcccggacggcagtttcatcgtgatcggcggccgacgcgcgttcagctacgagttcgtcccggcggctggccgggcaaacgccagggccacgcctttgcgtctgctccgggacaccaccgacgacgtggagaacaacctgtaccccttcgtcaacctcctcccggacgggaccctcttcatcttcgccaacgaccgctccatcgtgttcaactacaggaccgggcaggtcgtacgcgagcttccgatcctccccggcggctcccggaactaccctgcctccgccatgtcgacgcttctgcccctggacctccgcaaaggggccggccttagcgcggaggtcatcatctgcggcggcgccaccaagaatgccttcaagctcggggagaccagcacgttccctcccgcgctccgggactgcgcgcgcatcaacccgtcgaaacccggggcgcggtgggcgctcgaccagatgccctcgggccgcgtcatgggcgacgtgctgatcctgcccaccggcgacctgctcatgctgaacggcgccgccaagggctgctccggctgggggttcggccggcaggcgttgctgagccctgtgctgtactcgccgtatctgcggcggggcaagcggttccgcgttctgaacccgtcgaacatcccacggatgtaccactccaccagcgcgcttctccccgacgccaccgtgctcgtggccggcagcaacaccaactcggcctacaacttcagcggcgtggacttcccgaccgaggtgcgcgtcgagcggttcaccccgccgtacctcagcccgcagctgtcccccaaccggccggcgatcgacgcggcgtccgtccccggcgacggcatgcggtacggcgccaggttcacgttccggttcacgacgcccgcgcagggcgtggggcagggcgacttcaaggtgaccatgtacgcgccgccgttcacgacgcatgggtactccatgaaccagcggctgctgatactgcccgtcacggcgttcgccgcgcaggggcagcggcacacggtcaccgtcgacgcgccgcccaagccggagctcgcgccgccgggttactacatggtgtacgtggtggcgaagggggtgccgagcaaggctgcgtgggtgaagatgcacaagtaaaaaagagcatacgtgaaccccgcgcgcgtggtgctttgcatgtcaacgggaaactattaactcctgaggatgttccctcatt

SEQ ID NO: 9650 - DNA, 1690 bp, Oryza sativa
  ref <308>: DATABASE ACCESSION NUMBER: AK106998
  ref <309>: DATABASE ENTRY DATE: 2002-08-28
caccgaatgtgtggttggatgcttgacatgtagtagtagtagtatctcgtgttcttgtcaacatcgcagccagtgcctttctctttgtcgcttcaatctgcctcctctcgctatatatctcgcaccaggctgttcatatttgctccttaccttctcactaaattcagacgaaaattcagagctgtaaaagaagaagaaaaattcagagttcaaaagttcagtgagaattatcttgcaggtgctgcattatgggggacgagaagcatcctagctcgaagctttcagagattctccggccaggaaagctgctgcaccggcggcggcggctcgtctccgagttcgccgacgtagggcgggaggacgcgttgcacgagagcgacacggtcaagtacagggtgttcgccggcacgtggaacgtcgccggcgtggcgccgccggacgacctggacctcggtgactggctggacgccaaggccgactcctacgacatctacgttcttgggttgcaggagatcgtgccgctgaacacgaggaacgtgcttggcccgacgaggagctcggccgccatgaaatggaactcgctcatcggcgacgcgctgaacaggttcactaccggaagaagaagacgagacgacgacgacgacgagggggcgcagcggcatggtcagcagcagcagccgttcaggtgcgtggtgagcgagcagatggtgggcatcttcgtctccgtgtgggcgaggagtgggctccgccgccacgtccgccacgccgccgcctcctgcgtcggcgccggcgtcctcggccgcctcggcaacaagggtgcggtgtcggtccggttcttgctgcacggcacaagcttctgcttcgtctgctgccacctcgcctccggcggcaaggacggcgacgcgcagctccgcaacgccgacgcggcggacatcctctccaggaccaccttccgccgccgcaccaccgccgccgcgtcgccggcgccggaggagttgccgttgccgaggaagatcctcgaccacgaccgggtggtgttgctcggcgacctcaactaccggatcgccatggacgacgcggaggcgcggctgctggtgcgggcggggaagtggagcatgctgctggagaacgacgagctcctcctcgagctcgccgagggcgggagcttcgacggctggcgcgagggcctcgtcaccttctccccgacctacaagtaccacctcaactccgacatgttctactggtccatcgacgccgccgccggcggcggcgacaaacagcagcagcgcgcgccggcatggtgtgacaggatactgtggcgagggaaggggatgaggcaggcgagctacgagcgctgcggcggctaccggatctccgaccaccggccggtgagggcgttgttcgacgccgtctgcgagctcgccggaggcggcgtcggcgtcgagcactccgccgccggcatagctagctttggacatgtcccgcttctgtgatatctcaaagtgtgaaagagtgccgtacattttttttttgttactcctacttggttgggagacgctctgactttttactctaagcttaactagctttatagaactattttttgtaaatattatgctgatgttatgaaaacaaatatattatgaaaatgtaatcaattataaatttaataaaactatgctgatgttgt

SEQ ID NO: 9651 - DNA, 1920 bp, Oryza sativa
  ref <308>: DATABASE ACCESSION NUMBER: AK106999
  ref <309>: DATABASE ENTRY DATE: 2002-08-28
gaaccatcgccatcctcgccgtccggccaccgcccaccggcaaacggcggcctcgctcccgctccggcgggctgcgggggcagaggcaggccgcgggagaccgagaggcctaccgtccggtgactcctagctcgaggccacccgcgggctatgctcctgattcctgagtgtcgtttggttgcggattagcggcccgcgcgtggtggattggagatacagcactcgaaatatagtcacaacttgatactgcaggaaagagatatgaaggtgatggacttcaaattttctattttctttgtcaactctccatgaagcttgtttgtggatagccgcaaccaagtcaaattactgcatgagtagatgctttctggaattgtgccaatgaagtaatttgaagataaatctaaaattttcagattgggcaaggtggagaagttaaccttggcaagctctcccttcaacttatttttcttgaggttgatagtaactagatttgtgcaatcacccaaggttggtggcagctctccagatatgttgttttcttccatgtgaagttcttctagtctcttcagttgacctatagaatctgggattttgccactgaatctgttcccaccgagatcaagaaaacctagattactgagctttatcattagtgcatcgtcaattattccttgcaagtggttattaggaaaggagaggtactccaatgaggtggctctgaagagatcatctggcagggtcccaatgatgttgttttggccaaccctgagcattctaagggaggagcatttacctattccaggggggatgctgccactgaattggttgtaagaaaggtcaagcacagcaaaggatggtgagctgatgcagaaagaggaaggttgcttgagatattcagtacctggagaggccggtcaggtgatgacgaattcagctcctgcaattctccatccaggcggttgaagctgacatcaaggacgacaatgctgctgaatatcagctctgatggaagctcactggagagtaagttgtatgacaggttgagtcgcgacaagctggtgagctcgctcagggatgatgagatgcacccttgtaggcctcttgaggccagtaatagctcagttactgcaccatcttctccacagatgatcccttcccaggtgcaacaatctgtactattctgccatgacgcagcgaggccaccatcctgcgatagcctggtgaggaactggaggagggagcgcctctccctctcggtgcatgaaccgacaggtgagatgaaggtgaacagcagcaacacaagaacagggccaaagaaatttatgcaaaacctgctggttttgttgctgcacgaaaaatgtggtattggcttcatggtttgtatcagttggaagctgtgacagaatagcgagcttgattcaccaagataggctggtattgtgggcaaaaccatagtttatgagcgatatattgtcgaagcatcgaagatttacaagttggagtgttgacctatgggtttactcgctgctacctcactggcttgctgctatgcttaggtttggaaattctgtccaactatggccgttttcttttaccagtcttatgttttgtctcatgatgcttcacaggagggcttccacttaaattggatctttccttgtacaaatggccacttgactgctatttgttaaattctccattcgtttactccttagtcgtaaagcagagtcatagtccaggtctatgtcatctactgatctactttttatcccttttgttttcatggagggaggtatagcgtacattgtgcttctaatcttgatacttccagcagctgtattttgactccgtcatcagcaaccgatttgcgactgatgactgttcttggcttgtgataatatacaacaaatctgttgt

SEQ ID NO: 9652 - DNA, 2620 bp, Oryza sativa
  ref <308>: DATABASE ACCESSION NUMBER: AK107000
  ref <309>: DATABASE ENTRY DATE: 2002-08-28
aaaaatcacgaaaaagaggatcactcggacggattcttttctctctctctctcttttcttcttcttgttctacttctttgatcttcttcttctctgctgctctgccgtccatggtggtatggtggtgatgtggtggcgtgcaaggtgaggtaaagggggtgtggtggtggtcggctcggctgtttatccatccatccatggatgccggtgagggtggcggcgcgcccgccgccgccgccgccgtgtcgaatgggtttgttcacgccgtcgtgcggtggtgcttctctccgctcttcttctggctgttcaccgtcgctctcgtcgccgccatccacctcgcctccacctacatctctccctccagagacgaagaggacaaggagaagaaggcgcggcgcggcggcgatttcgccggagccggggaggagagggaggaggaggaggtgggaaggaacgacgacaagattctggagatgatgcggagcttcagcttcatgcatgcgagcgaggaggatttcatggaggggatggctacgtacgaccacgtcgtcgccaggatggcgccggagccgctgccgctgacgccgccggccgcgccgccgccgtcgacgttcagcttcaggttccagcaccagttgcccgagattctccgggagacggccgtggtctcgggtgaaatacctgtgcaagtattggaagaacacgagccggagaagaagccggcgattgcgatggaatcgaagcaagaacgcgagcgcgatgcagaggagagagaggtggtcatggaggaggaggaagaagaggagcagagtagagaggccgtgagcgggaggacgagcttcgcgtcggagttctccggcttcggcagcgactccgactcggagtcaaccgccagcgacgggtactcggtgaaggacctcgtcgtcgactccgacagcgactggttcctctcggagaaggacttcccggcggcggcggtggccgggcacgacgccggcagcctcaggggctattacaaggccaaggtgctcaaggccctggaagccctcgacgcgtcggcctccaacctggaacgttcgttccaggactcggcgacgacggtgtcgccgggctcggtcgacggccaggcctcgccggacatcatcggcgccgccaacgaccccgccaagtaccccgaggacatgtggtcccggagcccctcgccggacgtcgagtacaacgaagacgagcacaagggaaacgaggcgacgaacatggcggaggaggtgagcttcgacatgagcgacgacgagcggccgcccgcctccggcggcaagaagacgacggcgatggcagcatcatcatcatcatcatcaccggtgcacgacgccgaatctgaagatgagaacagcttggatcattcggagaaggaaaccatcacgatacatgatcattcgtacgaatctgtctccgatgtcaagaggaggagcccagaagcaatctctgacgcagaattggatgatgcctcgtctcgccatgctgctgttcttgatgccaaggtaagaagcccggacgttcattcatctgaacccatctttgacaattacgaagaacatgaggtctcaaatgatcaatcacaagcggcagtttctgatgagaagagaagcacaccgcattcggagggagaatttgctggtacagacgatcgctcacacgaactcatttctgatgtttggaaagatattgtcggtgcaaatgatcagtcattagcatcagctcacgatgaagaaagaagtcctgatcaatcggttgcgattatttctgatgatcacaaagcaattgtcagtgctacgaatgattcctcaaatggagaagtttctgatcataagagcaccccagagactgcagagcaggaattcagtggaaatgatgatccatatgaactagttgccgatgcaaggatcatttcagagcgtgcagaagaagatgatatcccaaatgagcgtccagggaacgccactcggcatgtcaccttctccgtcgccgagaaggggaaggtgttggacgtggtggaggaggatcaagaggacaagtggaaggatttgacggaagaggaggaggacgagctggagtcactgtgggagcaccaggatctgatcgagcagctgaagctggagctgaagaaggtgcggtcgatcgggctaccgacgatcttggaggagtcggagacgccgaaggcaccgatggaggatctcaagccatggaggatcgacgccaagttccttcgcgaggacccaatggacgagctgaataagttcttcaagagttatagggagagaatgaggaagtttgacatattgtgctatcagaagatgtatgcaataggtatgcacatttttaccattaccagtttacccttatttatctcagattctagtactaatatttagcactagagtacagttgctacttttgtaactatcaagcatagcatccactagctttttaaagctagttaaggacaagatgcagctttatgatgctttccctagcaaattttttgttcaactcaatgtcctaaaagatatatttttttggttgcttgaaattctgttgtgctaataaaaaaaaaaaaaaaaag

SEQ ID NO: 9653 - DNA, 2270 bp, Oryza sativa
  ref <308>: DATABASE ACCESSION NUMBER: AK107001
  ref <309>: DATABASE ENTRY DATE: 2002-08-28
aacaatggcgctgcgttcttctgctgcatactactacatgaactaatttgcttctcccttacgttccgtttgcatcatctgccttgcacacacgcacgcactacaaaatggcgttgcgcgtgctcttcttgatgctgtcggcgttccccgcgagctgcctcgccgtcgctgctccgatcagtcccgacgccgtgccattgctcgccttcaagtcggcgtgcgccgaccctgccgccgcgctcgtctcctggacggaggcctccgacccctgctccgacaggtggcgtggcatcacttgccggaagccttcgccttcgccgccgccgtcgtcacctcctcgcgtccgtcgcgttgttctcgaaggcctccgcctcggcggggatgctggagccgtcgccgcgctcgctggcctccctatgctctcgttccttagcctcaagaacaactcgtttacgggctctctcggtgacgtcgacttctccaccttggcgccgcacctcaagctcctctatctctccggcaatggcttctccgggcggcttccggagtccgtgctacggcttcgccatctgcgccgtctcgacctctctggcaatcggcttacctgcacgattccgccggagataggacaccggctcccttctctcctgacgctgcatcttgcgcgcaactcgctcgtcgggcccttgccggcctcgctgggagcaatggccaggcttgccaagctcaacgtctccggtaaccacctccagggccggatccccaagcgcctcgccgccgtcttccccgcgtcttcgttcaccggcaaccccgaactttgcggtgcccctctgcgccgccggtgcaatgagcagctccacatggtgtacggcggcggcggcagcggcgctgacacgtcgcaccaaccgaagagagggaggaggaggagcaatgaccggtggatggtggcgatgatcatggcggcggtgggcgcagcagtggcatcgctggtcgccgcggcactctgcggcgtactgtggctgaagaacaagaagccggagaggccgcgcgccagctcacgcaccagctcgatggcgcgggaggagactgtgcgcttcgacggctgctgcgtggagttcgacgtgtgcacgctcatgcggggcgccgcggagatgctgggcaagggcgcgacggcgacgacgtaccgcgtggccatgggaggcgacaacgtcatcgtggacgacgccagcgtcgtcgaggagggcaaggctggcgaggtggtggtggtgaagaggatgcggcggagggaaggcgcgacccgggaggacgagcggcggaagcggaagctcgcgcgggagatgggcacgtggcggcacgccaacgtcgtcagccttcgcgccttctacgcgtcggcagacgagctcctcctcgtcttcgactacgtccccaatggcagcctccacagcctcctccatgagaaccgaggaccggcgcgtgttccactggagtggcagacgaggctgaagctggcgcaggacgcggcgcaggggctcgcgtacctccacggcgtgtccggcggcaagctcgcccaccggcacctcacctcctccaacatcctcgtcgacgccggcggcaacgcgcgcgtctccgacttcgccctgctgcagctgctcgtcccggccccggcggcggacgaggccgcgcagaagcaggacgtgcacgcgttcggggtcgtcctgcttgagatcctgacggggcggtcgccggaggacggcaacgtggacctggcgctgtgggcgcgcacggtggtgcgcgaggagtggacctcggaggtgttcgacgtggagctgctgccgagcaggggcggcgcggaggacgagatggtggcgctcctccatgtggcgctgctgtgcgtcgccgacgaccccggcgagcggccgaggatggcggtggtggccaagatgatcgaggacatcagggacagggggagcaagaggagcaggtactcggcgtcgccgtcgcaggttggccactcctacgagtcatccccttccatctcggaggacaccactaggtccaccaatgcctcaagctcttgaagctgtggtgacagtttccagctttccttcccaaaaaatccaatggatgttgttaacaagaggtgctgccgtttagatgttagttttctgccatcatgattctgtggcatgtgacatgtcaggtacctgtgatcaatggaaattatcaactccttttgttttctgtccaaaaaaaaaaaaaaaaaaaaaaag

SEQ ID NO: 9654 - DNA, 2167 bp, Oryza sativa
  ref <308>: DATABASE ACCESSION NUMBER: AK107002
  ref <309>: DATABASE ENTRY DATE: 2002-08-28
cttcgattcattcctcacgcacacacactctactactagtatgagtagtgaggagtagtgagtagtatcatctctctctgtctgtatcttcacctgtatctactcaaaaggagtgaaagggaataaaatagattggggggcacggtgagccggcctaaagactcccagtgaaaaaaaacccagacccttttataaaccctgtgcctgcctcctcgccaattcgccgttgcaacaaaccaaaccttagctcctctcgctttggcttctcaccccgcacagccaactcttcccgtccatctcaatctccactgataatcgagacacaggccatgccgtgggtgcgcttcctcgtccggttggtcgtcttcttccgcgtcatcgtgtgagagcaagctaaagctactcgatccgtcgatcggccggcggtgactgactgagaatgtgcattggtttccaagggagcaggaggagtagcagcgagacgagcgccgccgacgcggtgatgagaagtggcgccatcgcgtactaccacacgctgaccaaggtttgccaggtgctcgatcatcgcatgccgagtacttccgtcaccttctcaagcccgtgacgtaggttgaccagtacataatcctcctcccttcttcacccgacgagagagctagctgcgcagcttctctcacaaggaaaaaaacagaggagacaaacagagtttggaagttaagagcagaagaagatgcagggagaccacgggtactacggcgggagggactcgccgccgcaggggtacggctacggcggcggctacggctacggaggcgggtatggctacgacgccggtgggtactactccggcggcggcggcggctacccgtcggctggggcggcggcggcggcgtacgaggacccgatggtcgggaggaggacgcacgacttcccggcgccgatgaacgagctggagttccagccgtcggccacgtgccccaagaactacgtcatcttcgaccagacgtgcaccaagagccgggtcatgttccacccctcgctggcgcacaagttcggcggcgggtcgtcggcgtacgacaacaacgtgtacggcggcggcggagcgcacgacgccgccaagggcgcgtacagggacagcgtcggctacgacgacgacgacagctgctcggtgcggcagaaggaggacacggacgagatcgacgcgctgctgagctcggaggacggcgacgaggacgacgtggtgagcacggggcgcaccccggggtaccgggacggcagctccccggactcgacgtgctcgtccagctacggcggcgggcaggcgaggcccgggcgcaagaaggagcgcatgaagaagatggtgcggacgctcaagggcattatccccggcggcaaccagatggacacgccggccgtgctcgacgaggccgtccggtacctcaagtctctcaaggtcgaggtcaagaagcttggcgtgcgcggctccgacaactgatcatcatcatctccaacaccggcagaacggaggaaacaaacaaacaaaaaaaaaggagaggcagctgcagcggcagcaacagcaccagcagtcagcagcagcgatcgagtgctactactgacagtacactgcatctgcatgcacgacatgtaccctactccatcatcctccatttctccatgccttgggtcggcattggtatcgccaagctagccatagctagttgatgcccttttcgcagtgccatgatctggccaaactctttttgtgcgctctacttttggctacgggctttatgctccgtccatgatgagagagggagcatgggagggggcagaggagaggcagcgatcatcatcaatgtactactagtactagctagtgctcatttgctttgggtgtactatagtagtagtggagagatgatggatatggattatggagttctagttaggcagaggagaggagagggagaagggcagcattgcaatcgcatatttgcatgctttggctttgtctgctactactcctcttcatttgttgccttgcttgcttttttcctttctgcccctgccatgtggcccccccttcccctgctggatgaattatccattgatgatcccctccttcgttagcttgacgtgttcagttatactggttactgtttctgcc

SEQ ID NO: 9655 - DNA, 1475 bp, Oryza sativa
  ref <308>: DATABASE ACCESSION NUMBER: AK107003
  ref <309>: DATABASE ENTRY DATE: 2002-08-28
gcaagcacaccccccgcgcgcgcgcgcgtttcgttcgaacgatcgatgcgccccggagcacacggcacgcacccgcgccgcgagagaagaggaaaccaagcgatgccgtcggcccgtgacactaacatggacttgatggaagtcctctcgccgccggccgccgcacgggatcatcagaagagccaggttcgtgtccagaggagcctctcaagctcttctggggtgtttcagggatctctcacgtttctctttgtggaaaaaaaaactaggcaaaaaaagggtttgcctaatgtagtaaagcagggggagtttgaaagggctctctctcacgttgggtaagcttgccacccggcccccccaggtgcacgccgccgcgcgtgcgctaccgcaccaaagcgccagcgttgtcgtggacggacgcatgccgccgccggccgccgtcgcaagcctgacgttacaagtccccggaggagctcacgatgtcacttctctggctactagtccaaggaccatggccgtgcctggaacgactgaacagctgacgattttctactccgggtctatggtgaagttcgacaacgtcccaagggagaagattcgctatgcgtgcaggctgaggaggttatattcttcgctgcaaagaagtctccagacgcaggacaccagcatgttccccagcagcagcagcctgcatatccaaacaaaaagaagaggatattctgttatcaggctcctgagagagatgctgatggtttgttcatccacgagaacaaagccgatgcttgttcacagcgacagcatcggagcccagaggacgggtacgccaccatcaaggagacgaatccatgctcgcggcaaatccagatcgtgccaagagatgtctcattgctggtgaagaatgcgtctcttgttagcttcctggagagccgcaagcagaggttggcgagtgcagcttacactcgccgtgagaaatctcctgatgaaaaggacatttttcctacggctttcccacgaaataaaaccccactcggcaacacggaacggcatagtgctttcacgaacctgaagaatattaacggaaatcatgacgaggaggcactagataccgagttgaagatctagccgcgaagttttggattcagtttgcggcacgggaacctcttgctaatcaagcacaagttttggactcagtaggtggagtgatgaactaagtagaaacctagtggtgcatttggtagcaagagcctttttttttcttattttaattctgaatttctgatgaggttttttaagtgcagtagtgatgttcactcgcagtttcatatgaaaccgaggcatcgtcacccttttcttcttctcattgacgggagaaaaggttttcggattcgttcggattgttgcctctgattacattgatcagattgcacggtcctttttgtaactgaggatagctgaaataaaatactattttgttt

SEQ ID NO: 9656 - DNA, 769 bp, Oryza sativa
  ref <308>: DATABASE ACCESSION NUMBER: AK107004
  ref <309>: DATABASE ENTRY DATE: 2002-08-28
tatcaacaattcaaactctaattccatctatctcttcctgttcttcctctgttcttcgtgttcttcctccgttctttccccttttccaagtcttcctcttcttcttctgattctgcgagagaaatatgttgcagcgagacttgagactgtgacagatacatgggctcaaatcgtgagtggcagcccagttacggcctgcgtggggattctcaccgacctgcgttgccttcgctgctcgcacgaaagggaacctggcccccgaccccgaggtctccctcaactgtggacggcggacgccgcgcgctcgccgcaggggcgccggctgcggcagtggggatcaggcgccgtcgcgcgcccacggcgtcctcccgtgcggttggtcctctgcgccgggctcccctcccgtgatcctcccaccggttcctctcaaggtaagttccccaaaccatctcccctctcgcttgtgagtgtctagctagatggagcactgattctggaaggggctgggcgattggccattgcgatccgattcgtggaaaaccgtcttagttagttgtaattggctgtttcgtatccttggagataggtgcatttctgtaccctgatgtctaatgtactgtgaagagccagagatgaattttggattctatcatgagttcctgacggtgtccacggtttgtaaatcaactggatgaatggacctgggtcttagtcttgcaatgatttgttgttataactttcacatttatgatttatcatattttttatg

SEQ ID NO: 9657 - DNA, 1886 bp, Oryza sativa
  ref <308>: DATABASE ACCESSION NUMBER: AK107005
  ref <309>: DATABASE ENTRY DATE: 2002-08-28
ctccctccatttcgactcggggctccggccggcctcttcttcttccgggcgtggtcatggagccccagcccggctcgccggagaccgccgagctgcccgcgcctatggtgctagagccgccgccgccgccgtcagatgaggcggcggcggaggaggaggaggccggcgttaagcctgataggcaatcatcttcatcgtcttcgtcgtcgtcgtcggaggaggagaaggaggtgtccaaggacgtcgcggtagagaccagcgtcgtcgtcccgtcggtggtcgccgcctcgccggacgatgaggccgccgccgtcgcttccggtgacggcggggacgttatcaaacacgacgatgaggccgtggtcagaccggacgattgggcatcgtggccgcagcagccggctcagaccgtcgacgacgtagcggcggcggcgacgacgacgccgcaggcggcgccggagatccagacgatgtcgctgcagccggcggcggtggcggggttcgatccggagaggatctccaagtccatcttccaggcgaagcccccggggtcgtcgtcgcaggcggagtggagcgtggcgtcgaacgagtcgctgttcagcatccaccacggcgcccggccgtccggcgacctctgcggcttctacgccggcgagagcaggtcgcatttcgactacttctacgacgaggccatggccggcgccgccggcgaccacacgtcggactggaagctggccaccgtcgccgaagggtcgcctggtggcagcgcgcggtcggacgccaccgacggcggcggcggcgcggccaagcaaaaggcggccatcgacttccgccgccacgagagcggctccgccggcagctcgagcaacttctccttcgccttccccatattggcggagacgacgacgtcgccgaggaagagggactacggcgggatgtaccatccgctgaagaaggaggcggagcagcagcaggcggcgtcgccggcgtcggcgttcgaggagatgacgccggaggaggagcggcggcggcggcggagctggtggtgctgctgctgcggcgagtgctgcggctgctgctggttcgcctgctcgtggtcgtcgtgctgctgctgctgccggtggcggtggtgcagccgctgcagctgcagctgcccaaccttctgccgccgcaactagtgcctctctgctcctgaccaagacatttttggcgggaaaagatgaagggaaaaaaccgagaccaactcggctaatcctgatacagccatagttaaattaattattgctaccagattaggcatcactgcatgagaggatcatatcatatgtatgcatgtgcagatgggtaaaaagatgaagatgatattgttcactgttgacaaggaaatgttatgctaacctgcagatgggctgagggattagttccaggtaccccactgccatctgatccccggataccttagcgtccaaactgatgtcgcggcttggcggatatcatcgctggagtcggcatggaaaagaatggtcacctcgcaagatggagcacagttattaaacaagggtgcaagatgaggaacatccttcaatggcggtagatgaaacaggagtctcctcaaacagcttctaaactggttgctggtgcataacatcaggcaatgcgtcatttcacatgaaaaccgaggggccaacttgacttcgctgatgccggcaaacagctgaagaagatactcgggcttcactgcttcaaaaagttcatatttgtttgtagaagtgggcagctcaagctctaatgtagtgatatcatgattctctgcaaatacttgcaagagggactttagatccaatgactctaaaaaaaaaaaaaaaaaaaaaaaaaaaaaaaaaaat

SEQ ID NO: 9658 - DNA, 2087 bp, Oryza sativa
  ref <308>: DATABASE ACCESSION NUMBER: AK107006
  ref <309>: DATABASE ENTRY DATE: 2002-08-28
gatccatctcaagtctcaagcttaattaagctcgtaatctcatataacctctttttggacgaagcttgccactcgatcgtgttaaccactcgagcttgagcgagcgagctagctttgctctgacgagaaaaatggcgtcctttcacatcgccacggcgctctcggcgactctgctgctctccttgctcgtcctgggccgctccgacgccaccctgccgccgccggccacgccggtgccgccgtccacggcgtgcaatgggacgacggaccccacgttctgccggtccgtgctcccgtcgaacggcaccagcaacctctacacctacggccggttctccgtcgccaagtcgctggcgaacgccaacaagttcctttcccttgtcaaccgctacctctccggcggtcggctcgccgccggcgcggtggcggcgctgcaggactgccagctgctgtccgggctcaacatcgacttcctgtccgccgccggcgccacgctcaacaggacgtccagcacgctgctcgacccgcaggcggaggacgtgcagacgctgctgtcggcgatcctgaccaaccagcagacgtgcgccgacggcctccaggccgccgcctcggcgtggtccgtgcgcaacggcctcgccgtgccgatgagcaacagcaccaagctgtacagcgtctcgctctcgctcttcaccagggcgtgggtgcgccccagcaccaagaagccgaggacggcgacgccgaagccgcctcgccacggcggccgcggcaggggcctgttcgacgccaccgacgacgagatggtgcggaggatggcgctcgacggcgccgcggcggccgtgtccacgttcggcgccgtgacggtcgaccagagcggcgccggcaacttcacgaccgtctcggacgccgtggcggcggcgccgacgaacctcgacggcaccaagggctacttcgtgatacacgtcaccgccggcgtgtacgcggagaatgtggtggtgcccaagaacaagaagtacgtgatgatggtcggcgacggcatcgggcagacggtgatcaccggcaaccggagcgtcgtcgacggctggacgaccttcaactccgccacgttcgctgtgctcgggcaaggattcgtggcggtgaacatgacgttcaggaacacggccgggccggcgaagcaccaggcggtggcgctccggtgcggcgccgacctgtcgacgttctaccagtgcagcttcgaggcgtaccaggacacgctgtacacgcactcgctccggcagttctaccgcgcctgcgacgtctacggcaccgtcgactacgtgttcggcaacgccgccgtggttttccaggactgcaccctctacaaccgcctccccatgcaggggcagagcaacaccgtcacggcgcaggggcgcaccgaccccaaccagaacaccggcaccaccatccagggctgcgccatcgtcgcggcgcccgacctcgccgccaacacggcgttcgccaccaccaactacctcggccgcccgtggaagctctactcgcgcacggtgatcatgcagtccgtcgtcggcgggctcatcgaccccgccgggtggatgccgtgggacggcgactacgcgctcagcacgctctactacgccgagtacaacaactccggcgccggggcggacaccagcaggagggtgacctggccggggtaccacgtgctcaacagcaccgccgacgccggcaacttcaccgtcggcaacatggtgctcggcgacttctggctgccgcagaccggcgtgccgttcaccagcggcctcaactgatcgatcaggcggcgctgcacgatacatacatacatacatacatacatacatacatacatagatacacgtgattgggatatgtatacgtactcggtgtgtcaattcgtcaaacactcttagaagatgcaattgtaactttagcgagagcgtatactgaaataggcagagaaagagaataataagtggtataaagaaatgccacagctagaatcagattgtttagctttccttaaattgttgtttggataaattcagttcttaatctaatcgaattgcataagg

SEQ ID NO: 9659 - DNA, 1981 bp, Oryza sativa
  ref <308>: DATABASE ACCESSION NUMBER: AK107007
  ref <309>: DATABASE ENTRY DATE: 2002-08-28
atcacaaggacgccattgtcatgcacgccgccggcaaggcgcccaagtgcaaggcttccttcttcctctgcagcctcctcctctactttctcctcccggtgctcgccctgtacgtcgttgccctcgccgtgtcgccgttctactcgggtagctcgtgcccggaggagagccttgccagtggcgacgttgcacatctcgcggccgccggcgatgctggcaacaggcgtaacgactcgtcgccgccgtctgatgacgccgcgccgaccgggctgggtcacattgtgttcggcattgccgcctcttcggagctctggaagagccggagggagtacatcagaacatggtggcggccggagcagatgagcgggttcgtgtggctggacaagccggtgtacgagttctactcgaggaacgcttccacggggcttcccggaatcaagatcagcgggaacacgaccaagttcccgtacacgcacggccgcggcagccggtcggcgctgcggatcacccgcatcgtgtcggagagcttccggctgggcctccccggcgcgcggtggttcgtgatgggcgacgacgacacggtgttcttcccggacaacctcgtggacgttctgtcccggtacgaccacacgcagccgtactacatcgggaatccgtcggagagccacatccagaacctcatcttctcgtacggcatggcgttcggcggcggcgggttcgccatcagccgcgccctggccgcgcagctggcgcacatgcaggacgggtgcatcgaccggtacccggcgctctacggcagcgacgaccgcatccacgcgtgcgtggcggagctgggcgtgccgctgacgcgccacctgggtttccaccagtgcgacctgtggggcgacgtgctgggcctcctgggcgcgcacccggtggtgcccctggtgacgctgcaccacctggacttcctgcagccggtgttcccgacgacgaggtcgcggacggcggcgctgaggcggctgttcgaggggcccgcgcggctggactcggctggcgtggcgcagcagtcggtgtgctacgacggcgacaagcagtggacggtgtcggtgtcgtgggggttcgcggtggtggtgacgcgcggggtgctgtcgccgcgggagatggagatgcccatgcgcacgttcctcaactggtaccgccgcgccgactacacggcgtacgccttcaacacgcggcccgtggcgcgccagccgtgccagacgccgcaggtgtactacatgcggcagtcccgcctcgaccgccgccgcaacaccaccgtcaccgagtacgagcgccgccgcgtcgcgcccgtcaagtgcggctggcgcatccctgaccctgccgcgctgctcgaccgcgtcatcgtcctcaagaagcccgaccccaacctctggaaaaggtctccgaggaggaattgctgcagggtgttgtcgtcacccaggcaagggaaggaccggaagatgaccatcgatgttggcgtctgcaggggcggcgagttcgccagaattgagggaagctagctaggatcagttgctaggacagcaaaacgagagcagaaggcgaaaaccatcaagcatcaaggacggtatcggagcaggacgcgcccacctcgcggcggtgcacggcggatcgctcggttactgcttgcttcggctaatgatagctgtaaccttagataataggtgtatgtaagtaaccgaactcaccttgatacaacactgtgccggcgagaatgtggcgcacttgtgggcgttgtacaagtacgggcagtgctgctgcgaacggcgacaggcttgtttgtttgtgagcccgtcgactgtcgaggtgttcaaataatctggcaaacaggtgaagaccagaggctacgagtgttcaaatagcccatgggcaattttcaaaaaaaaaaagaaagctcatgggccatgtatcaactaactgatgaataagttcactttgtcgc

SEQ ID NO: 9660 - DNA, 1829 bp, Oryza sativa
  ref <308>: DATABASE ACCESSION NUMBER: AK107008
  ref <309>: DATABASE ENTRY DATE: 2002-08-28
actactccggccggcggccgcgtctcgagttctcggcggaggcggcaagccggcgagggcaacccacccaccgacgtcgtgcggccgcgcttgctgcgtcgcgtgcccacgccaatcccgtggcggcggaaggaggaggagcaagcgcttgggaggagctaaaccctagaggcggagctctagaatcgaatccccccccttccttccgctttgcggcgatgagtcggcggcaggagatttgccgcaacttccagcgcggaagttgcaagtacggagcgcagtgcaggtatttgcatgcctcccctcaccagcaacagcagcagcagcaggcgaagcccaacccgtttggatttggcaccggaagcaggcagcagcagcagccgtcatttggctcacagttccagcagcagcaacagcagcagcagaagcccaatccttttggttttggggtacaaggtgccaatgcccagtcacgtaatgctcctggtcctgcgaagccttttcaaaataagtgggtaagggacccctcggccccgacgaagcaaacagaggcggtgcagccaccgcaggcgcaggctgcccacacctcctgtgaagaccctcagtcatgcagacaacaaatttctgaggattttaagaacgaggctcctatttggaagcttacttgttatgctcatctcagaaatggcccttgcaatattaagggagacattagcttcgaggaactaagagctaaagcctatgaggaaggaaagcaagggcattctctgcaatcaatagttgagggagaaagaaatctacaaaacgcaaagttaatggagtttactaatctgctcaatagtgcacgtccatcacaaactccaagctttcctactatgagttccttccctgaagtgaaaaacaactcatcattcggggcttctcaaaccaatggaccacctgtgttcagtagtttcagtcaaattggagcagcaactaatattggacctgggccaggaaccaccgcaccaggaatgccagccagtagtccttttggtcatccaagctctgcaccacttgctgcccctacttttggcagttctcaaatgaagtttggagtttcgagcgtatctggaaaccagggttcaggtcaaccatttgggagctttcaagccccacgttttcccagttcgaagtctcctgcttcctctgtccagcacagagacattgataggcaatcacaagagttgcttaatgggatggtaactcctcctagtgtgatgtttgaggaatctgttgggaacaacaaaaatgaaaatcaggatgatagcatctggttgaaggaaaaatgggcaattggggagataccgctggttgaaccacctcagaggcacgttagccatgtgttttaagaactcaaaggtgtttttttttgtgttgttgaggcatgagaccatgaactactcagctatgatctgacttccttgtagttgggttgccaccatatgtcgtacttttcttgcccaagcttcatgacgatacaaaggaattatacaacaaacaagagaatttgcaagagtgaacagtgaaggaaggctgatgaaccaatgcattgtttggtaccacttatttattcctggaacatgaatgtgggcaactagagctaacaaccagctaactgcagtcttgcctgtcgagttagtatgtttttctctcttttttttaatctgtaattgtttattccaatagtatgtttttcttttttttaatctgtaattgtttattccaaaacttgttaggaagttattggaataagaaacagtattgcaatattgagtgattggccgggt

SEQ ID NO: 9661 - DNA, 882 bp, Oryza sativa
  ref <308>: DATABASE ACCESSION NUMBER: AK107009
  ref <309>: DATABASE ENTRY DATE: 2002-08-28
gtgctgaattaacacgaaccgtcgcatcgacgacattacctctagattgagttttctttcaggggtggcgggcggcgacggcggcgcaccggagggctatctcggcggtgatcacggtggcgccggagtcgaccacgaacgactgctccattccgcgccggttgacgatgagtcgggcggcgacgagggcgtccgccccggcggcgtcgaggtagcgaagtgcctccacctcggggaggtaggggaagaggcaggtcaggaaggcgacgagcccatccagcgaccgctggaacatgtccgcggcatgctctcctccgccgccgccgccgacttccggacgccgggaagaggacgtgatgacgctgttgacgacgatgttggaggtgggagaggaggccgaagcagaagccgccgctggagatgaactcctcctcgagacacttcaaccgacagtggtcgtagcacctcgcgatcttggcaagaaccggcacactctcggctttcgtgtcgcctctggagtattcgtccttgaagtttcttggcccgtagatgcggggaaggtggcggcggccgcctgggacgctccggtgtgacatctatagtcgatggtttggaggatcgggtggtggaggcggcgatgtcgtcgaggatttggagatcgggagggggtggcggcgctgcacctctcctcctctctttagtcgatcaggaggcgaaacgccggcgccggccaaaacgcgcggtgctgcttgcctgcttcctttcggtttttttttttttgtgtgtgtgtgtgtgtgtgtttcagtgtttggactgtgccgtggattgattcgtttccttactataaacatcgccgtattttctccggctgggtttccggct

SEQ ID NO: 9662 - DNA, 1753 bp, Oryza sativa
  ref <308>: DATABASE ACCESSION NUMBER: AK107010
  ref <309>: DATABASE ENTRY DATE: 2002-08-28
aaccgatcgccgccgccgccgacgtcgacgaccgatggccaccggcgatgaccgcctgtctgacctccccgacgaactcgtcctccgcatcctccacttcgcgaacgccaaggaggccgcgtccaccagcttgctctcgcggccgttcggcgcgctctggcgctcctccggcgccgtcaacctcgccgcgcgcgtcccctgcggcagcagatacatcggaagagcggctctgatcgcccgccgcgacgccttcgtccgtgcggccgaggcggcgctctccgccgccgccgccgccgaccaccgcgtcacgaggctcaccgtccacatcgagtgcgacaaggaggacaaaggctcgatcgccagcttcctcctcagcagcgagaacgacgagcgccgcggccaccgcgacgtgttcgacgccgtcctctcccacccggcggcgcgccgcgtcgaggagctcagcgtcgccgccgtccaccctcactggggcgacaagggcaacatcgtgagcagccacggcgtcgggatctacagcatcaatcccgccaaccttccgtcgaacaccctccgcgttctggacctcaccaactgccgcagcctcgcgccgtcggcggccgccgccgccgccgccgcgttcccgcggctggagacgctgcggctgcgacactgcacgacgaacatcgacgatctccaccgcatcatcgacgccgcgccggagctcgccgccgtgcgcctcgagttcgtccatctcatatccaacatccgcgatgtccacttcctggtgcagctggcaatgtcctccaccacccgcctccgcttcccggctgccaccgcgctcacgctgaccaactgcctcaccaacggcggcatgagcggcagcgttatcgacgcgccgaggctacgatccttgacatacaagggggcggcgaggtcgcagttcgagctaacctcgccggcgccggacatgaagatggtgcacctccacttcaaccactacttccatcaacgtgattaccttcgtttcatccataacttcaccaaggtcaaggtgctcaagctaaaggcggagcatggctgtccatggcgtattcttccccaacattgctcgcctcgagctcgacggaggtttcaaccgttggagcaagacggcgaaggccgccgcgatcgcgagcatgctccattgctgcccagtgctctgcgacctcaacctgaatctcatcagcacggtgtcacctgactatttcaagaactcgaagcaagttcagcatttctttcaaagaaaatcccagcttgatttcgacaggtcgatcgatgatttcatgcgaaacagcatatcaaagcgtggtgatcatcgccataacggcgatgaggtttctggattcatccctggattgactgcctgctccttcacctgcttgcagtacaatctgagaagagttagcctgcaattcaggttggatgagaattctgagaattttggagttcgtctggtaaaattcttcgctgaaaacgcaatggttctcgaagaattgcgcgtattgacagtggaaactgaaacctgagagagtagaacaatctgaacgttgaaggatggatgatgcccaaattaatcatccaagagtactaggaattctgcacagagtttgtctggaatttctgaaaagttcacctggttttgtagtaggagtattagtacatctatctggatttgtagtctcatcttgaaagaagaactatcaagatagttggattt

SEQ ID NO: 9663 - DNA, 656 bp, Oryza sativa
  ref <308>: DATABASE ACCESSION NUMBER: AK107011
  ref <309>: DATABASE ENTRY DATE: 2002-08-28
aatcgaggggaggcgaggctgtgcggtggtcgccgacgacgacgaggaggaggaggatatcgatcgccggcgatggggtactggtgggaccgcgtcgtgcttccggtgaggagggcgtggctcggcgtcgccgcccgattcggggttcggcagacaggtaaggcggcgagacggggtggtttttggttgggcggcggaggcggaggcggcgtacgtgggggctaactccggcgatgtttttttgggtttgtttggtcgcagggctgtggaggctgaggcaggaggtgagcacgtgcgagtacgaggacgtgcgcgtgatgtgggagatgctgagccgcaccagcacggcgggggcgggggcggggcgggcggcgccgccggcgaggaggcacagccggttccggcagccgcggccgtggaccgagagcatctgcctctgcgcgggcttctagaaggtctcccttgtgggcttgtggctgtggcttagctcgtcctcttctcttcgcgacttctctttgatttttttttttcttcctttttttttcttttctccgtctcactactgggctctgagatgtagtaatcgattcctcctcttgtatcgatccgcctagatgatacttggggtatgtgaatgaacagagctgtttcagatt

SEQ ID NO: 9664 - DNA, 1649 bp, Oryza sativa
  ref <308>: DATABASE ACCESSION NUMBER: AK107012
  ref <309>: DATABASE ENTRY DATE: 2002-08-28
ttccatggtttcactgaaagagggggttccacctgaaactttccccagatgtttatgggtacttgacaggaccgtcgacagaaggttcgtcagcttattagagacagactccgtgaatccttttgtgctgaacttgttttgttggtacttgacacaagtttcgttggtcgattagcgacagagagtagatttttctgccgatgctgaatatagttttatgttgctctcagatgcgcaacgactcgcattctcgcaagattaactcctttgagcagattcgtttcgtttccagcgagcagaacaagttcagatgttctctgaatcttcagagttttagaggtctgattcagagtctaggagtttcagaattgaagcttgctccaatggaacgattctccagaattaactggactagctagttaatgagttattaagaacagttaactaccgaaggaagacggtggatgatcgaacggtgggagtgaaacgaaacctgatagttactgtggaggactgcttactttccgttttaactttttcatccttaaccgcagttgaaaccgccgatgtgagcaggaatttacagtggtaatattcgcgttttggggcacataatccagaggcagttgaatatgtaatttgagatggagacgaattaacccaccaacacaagaggttaacagtgaattcgaatcgggctcagtacgtgcactacacagactctcgcactatatctatatttttgcttcggtgcccgaagcgagccgaccacactagcctcgcctcgccacgccacgccacgccgccgaaatttcatcgagttcttgaccccctcgctgacgaagaattaatcaatggcggagccgccgccgtcgccgacgacgacgacgacccaacaggcgtgcgccgcgtgcgcacaccacggggcaagcagctgcccgccgaactgcgcccccccccccccccggccgacaagccgaagcgcttctggtacgcgcgcctcatgttcggcatggagaggatcctcggcttctcggaggcggagaagcaggggatccggcccaatggctccaccgtgattagcatggcggccgtcgtctacctcgccgacgcgagggtcgaggaccccatccttggcgcctacggccggattctcaagctccagcagcagctcgaccgcctcaaggccgagcgcgctcgtcaacaccatccggcaacgtcaagcccagccccagccgacgacgtcgccctccagcccgagcccttccaccagccgccggcgcagccgtcgacgccgccggcgttagcgataccggacgaggaggaggaggaggacaacgacgacgacgaggacgaggacgaggaggagggtcaagaggacggggagggtcacgcgcctgcagatgatgatgtgccttgtgccaaaaggagaaagtataattaattaacgagctagatttaagttcttaattatccaggattattaggtcatttattacacttctgcaatccctgaattcaaagttagctatccccatatttcatcaactgtttggcttcatgcatatgttttttttatttttgggcactgtagcatttgtttcgatgtagcacgttatcaaagtaatactatagagaaattttatcgt

SEQ ID NO: 9665 - DNA, 1683 bp, Oryza sativa
  ref <308>: DATABASE ACCESSION NUMBER: AK107013
  ref <309>: DATABASE ENTRY DATE: 2002-08-28
aacaacgagacgactcaggggagatcaacctgctctccactactgtggactgcagtggagtccgtggtgagtgaggcacacacacgcgtccttcttcggcgaacgatggggtggggtgagccgccggcgccgcagcagaggaaggcggcagggggcggcgggctgaagctgctgctgtccgtgctcctcgtcggcctcgccctgcgcctgctcgtcaacccctccgcgtacctcctcctttcgtcgtcgtcgacgacgaccaccgccgccgtcgcgctagggcaaggggacgacgcggtcctcgccggcggcggctcgctgccttccaacggaagttgtgatttattccatggtaaatgggtccctgattcatctggccctgattacactaacaacagctgccgcttcatcgagactccgcagaactgtatgacaaatggaaggcctgacagtggctatctttattggagatggaagccctatggctgcgagatgtcgcggtttgagggcgagaagtttttggaggccatgcggggaaaacattgggctcttattggtgattcaatcctccgaaatcacgttcaatcgttgctttgccttcttgctaaggttgaagagcctactcaggtctaccatgacaagacattcaaatcaaggaagtggcactttgctttgcacaacatcacagtctctcttatctgggcaccgttccttgtcgaagctgaaatatttgaggatgatgatggagtatcaacttctgagctccaactgcaccttgacattcttgactcaaactggacaaggcaatggaacagcttcgactatgtcgtgatatcgacaggccaatggttcccgaaaaccgcagtctactgggagaatggagctgtgaccggctgccactattgccaggacaagagtgtagcggaactgacttttgagtatgccttccgcaagtcactcagaaaaaccttccaattcatcacgtcctcacctcacaagccagtggtcttctacagaacatggtcaccgtcgcattttgagaatggtgagtggtccagtggcgggacttgcaagaggacagttccattcaagccaggggaaaccggcgatcgagaatcggacatgaagatgtggaggatcgagagagaagagtttgccaaggcagttgtgcacgacaggcacaacaacgccggccgtctgaagctgctcgacacatttgagctctcactgcaaaggcctgacggccaccctgggccttaccggacgtatcatcctttcgagaaggcaacatcggccaaagttcagaacgactgcctgcactggtgcttgcccggtcctattgatgcgtggaacgatataatcatgcagatgttggcaataaactgaaacctcctgaatcatctaaattttgacaaaaagtgttgattcagacctgattattatacataggtaaacttcttagcataatcaagtgccttcttttttggcgctcattgaagaatttccagtcggtaagtatcggtctcttgttgtagcctgtctgattgcggcacccatctgcagccataggaatgtcccctggccgtaattatcagttatgaacttgggttgtgttgtacaacttgagatagttgatttaaagagtcaaatataagtctcatcagctactcgtcttctgttttc

SEQ ID NO: 9666 - DNA, 2253 bp, Oryza sativa
  ref <308>: DATABASE ACCESSION NUMBER: AK107014
  ref <309>: DATABASE ENTRY DATE: 2002-08-28
gtctatggtgaggttctgatcgattccgctggccaccggtgcttcctccacatctagcagaccatgacccatcaactcttggactgatcccatatcggtttgccatttataatagtagttgacatcaacaactcgatgcattgtggcaaacatgagcaattgtttctttcggatgaaaatgtgttgtggtacctttatacagatctgcacaacaaggggatagctttagcagcatccagtaccagctcatgtgcaaaattgctatggataaacgttatgatgtgatgtttttatcgagctaaagcactacatttctttgcaatgcaagttctattgaagagatccgtttgtacatatgtcagaccatcttctaattacggtttgtaaccacttagtttccctaatataatccactgtacgtatgcgccacttttctgtggttgctatttttgctcaagtgtacatgatcatacagatagcactccaaacaaattgatcaaaacaactcatatttgaactttggtggcatggttcgaatgtaatgttggctatatctaccttctgttgcttttattatgacaaaccttctaatgtcagcaccaacacacgcagcgtagcgcgtggctctttctagttcacatcatacgacatacggtatcctgaatcatcgaatatgggaattcagggctgtcaccacctgtcgtctacctttgacaaatccgtgggatgcacagcaaacatatgtaatctctaacctaggcaccacgtctaaggtattaattactactctaatacttgcgcatgtacttccttctttatccagagtcctagtactatagcacttagtacgaagactaaacaatgaagccgcaaagattgacatctatcttacttatactaagtaattaaatgacataagaaaagatgcagaatgcttacttaatagaagaagtttctccgaatccagagtagagtgtactaacagctccggtactcctctgtaattcctcatagaaagctatactcgtcgaggtagaagtcgaagagtgcgccaaacttctaggcactcctacagagcttcccctcactctctacctattttctagggttaattggatccatgccattacaaatttgcctattcaaaaaaatgctattacaatttatctattcgtaactgtgccattgaaattttataaaattaaaaccgtgccactgctgtcacgttttccatccattctttcattttccgtcttcatccttccttctcccgtcttcttcttaatccggcagcgaagacgagcacgtctgcgacagctgcggcggcgagcacggcgtccgcacagcttcacgcgtcagcgtggaccacggcggcggcgctgtgcccgcccgcgtggagtcccatcctcggcggacgttgagcacctggaacgcggcggcgtcgccgaggagcagtcgcggcgggtcgttgctccagtcgcaagtgaggttgaacccggccgagtggtagcagtcggcgccgatgccgaacgggaacggcacggccacgtcgccgcaggtggtcgggcagtctccggtcgcggcgccggcgacagcttgctccagcgccagcacggcggcgaacaaatccagccgcgacactgaccacgccatgaaaatgaatcctcctgcctgcgtttgcatcgatcgatcatcaaggcagcatggccaactgaagtgagaagaaagtcagaaactgtgggtatatgtatctgcaggtgaagtgtcctcattctcctctcccgccggcggcggcagcagcagccggcagcagcatcggcagcagcagcaacacgccgtccccacacgagcggcagcagcaaccggcaaccacagcagaacgctcttccggcggcggcggcggcagcagtgatagccgacagcagcagcacggtctcccggcggcgacagtcggcagcagcagcacaggcgcttcttcctatggttcccaatccgtggccagcagaagtggcgttgggggcggctgtgacggtgagattggcggcatgagggagaaggatggaaatagtgacgggagtggcatggttccaatattagaaattttcagtggcatctaaccgataacgtgaattgtaatggtatttttttaatatgctacatttgtaatggcatggatcaaattaaccctattttctaatgtacaaaagatacaatagagcatcttgtaaatttagctcaaagttgtgtgttgtg

SEQ ID NO: 9667 - DNA, 2228 bp, Oryza sativa
  ref <308>: DATABASE ACCESSION NUMBER: AK107015
  ref <309>: DATABASE ENTRY DATE: 2002-08-28
attcaccgtacctcccctcctgtttttcccatccaagatcgagaggggagagagaggcggcggcatcctgcgtaggagcgagcgacgccgacgtcgtgcggcggggccagcggcgcccgttgcttcctaccttctccgtccttctccccccatccctcctctcgccggccccctcatcttcttcagagccggcggcggcaacctactacagcgccctagtgcccttctctctctcgtctgctgctgctccgcgcatcctccgtcatcctccttagccaaggaattatatttggtgacgatgaaccgccggtttcttcatgtgttggtcaaagacttcaccaatcatccctgcccctacgcactgctcagcatcaacgcttcaggccttttctatccagcagcagtgaggccgaatggatcaggagaaggtacaaaactagaggaagactacctgcctgaccgcactgtgtccttccatcatcccagcggcagtggaggcagcatgcagttcatgtctctcggccagagcaacaacgccattatcggtgttgacaatgagtgccgtaccatcctttacaacaccgagtggcactccatacgcacaatgcccagtatgcacggttgcaaatggtctcctccggtatcacttgcagtgaacaacagcctgtacgtcatggagttgtatcctcggcaagatggccatgtctcctttgaggtgctcgcctacggcagccagcatgcatacggcagccagcccgtctatggcaggatgcccagcaagcccagcagagcgtaccgggaggactggtactggcgctctctcccaccacctccctatgtgcactatcaaggatatgaaaaggacgaggcgccgccgggctacgacatttccgtcgaacacccttgcaagatcacggcgactgcggtggtcggtggcggctccggctcgagcatctggatatcgacagccggtgtcggtactttcgcctttgacacggcgaatgatacatggaccaagcggggcgattgggctctgccgttccgtggcaacgctgagtacgtcgccgagcacggcctctggttcggcctctcaagtcagggtgatgacttgttctgtgcctccgatatcgcagcagcatcagtatcaccaccggtggtgctggacgcgtgggggttggatcatctaggggtgacaacgtcgcgcaagtgctaccatagcaagtcctacctggtgtacctgggcaatggcaggttctgcgtcggcaggttgttccatgttgaggagggtgacacggaaacggagaggtttgtggtgtttgatgggcgtggaggtggaggagcgaagtgatggtggtgacagcagggtgctcaggatgatcaagcacaggtccaagcgttaccgtctcagtgcctacatgacgatcaatctggtagcttgatcgagtgcctttgattatcggcgatatcctagcagaggagactctacctctaccatctccatgacggggcggaagagatcggcgtagacgacggtggtagtggcggcggcgccggggtgcttggaccggagctcgtgcagcgcgtcctggagcagcgagttgtggtgggataggggggtcttctcctcagcccgatgccgtcctcctcacagtcgatgccgtcctggttggcttcctctcggtgtccgtagcagtcgtcttcgcctcaccggccgccattctttcctccatggcgacgcctgctgccaccttcctggacttcgagacggtggaggggccttccgttggccggcgcaaaggagcccatcatttcccatgttgtcgttgccgtcgtagctcccatgtcggttgggggtgattgaatcaagtgggacagctcccatgtcgccgagagaaagaagaggaagatccgagggtggagagggagaggggaggggagccggcgagaacgagcgaggcggccaggcgggctgtgaccttggccggtgagctcgcccgccaccgctccgcccgccgccgctcccgccacccctctgctccgtccgccgcctgtcaccccctctgcgcccctccgcctatcaccccctccgcgccgccgctcgccttcttgtagtgtaagggagagagagagggaatagagactagagaggagggaggctgacaggtggaaccacatgattttttgtgtaactgacatatgggtcccttgatttttattgttttttggat

SEQ ID NO: 9668 - DNA, 1857 bp, Oryza sativa
  ref <308>: DATABASE ACCESSION NUMBER: AK107016
  ref <309>: DATABASE ENTRY DATE: 2002-08-28
aaggaacgtgtgaaattacatatttgccctgggccttctcctctcaacgcgtgagtcgccgccgcgagcccgcgacggaagaaagaggcggaaacgccgccacccccaacgccggaaacgccggccgctacgcccagccgccggggctcacctccaagatgccgccgccacccgtactcgctggaaccgtcgccgccacccctctttgccggagccgccggcgctctctcccgacgccgctactcataattgggcaccccaggcctgagacccagcagaatctttggacaaaattttacaacacttgtagttcaggcacgctgcaactgctgcatctgccaaattgtgcttatcctgtgcaagaaatagctatagattgactcggccgggcagtagtacactagtttatcaaatttcaacgtccaatcttctgtgaaaagaagattcagaccatcatctgccagaagaagtgcattcattatctaatgcaacaggacagtaactcctgagctatgcaaacaagtgagttatataatgctcagacagacaaagatcatcttatgttgaatttggctcagtaattttcagtgggcagatatgctcggacagacaaagaaaggctgacagtgtcttcagacttgttcagttgcagttcaactggaagagtatgtattgagtgtactcagttcttgagtttcattttatttacaaaatctgaattaatccttcagtagaaaccatgtttgccgctgggctgcttgaaccttcctggcttcatctcctagtagagcaatattttgtgcgtcattgctgtgaggtgataataggactaaaaagtgacaatatggtcagattttgtgaggtgataataggcctgaaaagtgacaatatggtcagattttgtgcatgttgaaattcagattttgtgataatgttggagaggaagaatccaagagcaattaggatgtgactttcagacctacattcagattttgtaatagtactgttcatttttaaatcttgaatttacttcagtttttttgtccccttagcagaatttatgacagttcttatgaattcagcatttcactgtgaattcgcaggacagtagtagcactccttgctgaaaccttaggttacagcttcatcaaagcagacaactaccattctcaggcaaacaaagcaaagatgagcaagggcatccactgtgtgctggatgaatcatgccaaaaaccttatttataagccacagacaagtgcagcagctaagctagctcaccttcctcttcaccaccaagaacgcaagaacgcagcgagagaggaggagattcaagaaccggaggaattgatgtcgtcttcggctgtgattccgccgccgtcgccggagaggagggtgccgatggtggccgacgacggaggtggaggacatgggacgagatggtggcgtccgtctccatccactacttcatctgccacatgtgccgccacgccgccgcccggggctcgtcggccttctccgccgcgtcgtcggcgtcttcctctgctgcgccggtgcttcccgtcgtggtgcgtcccgcgttggtggagcacgcggcggacatggagcggctcatctcgcagctgccactcttcacgctagcgtcgtcgttggcggcgctcccgaagtcgtcccgcgcctgctgccgccatcccctgcttctccacgccgtctccggcgaggaaggtgactgtcgccgtcgaacagaggggtaaagatggaaacggtttttctgattgtactgcagcgtcaaacatttagactccttttaaaatgaactacaacgtcaaacaaaacgggacggagggagtaacggattt

SEQ ID NO: 9669 - DNA, 1348 bp, Oryza sativa
  ref <308>: DATABASE ACCESSION NUMBER: AK107017
  ref <309>: DATABASE ENTRY DATE: 2002-08-28
aagaagctaacacgatcgatgagatcatcatatattatcgggtgaaaaacgaattgaaatcgacatatcgatcatggcgacgacgaagacgcagcttctcatgaagctggggctactgctgctggcgctggcgtctcagccgtcgccgtcgcagcagtcgcaggcgttcttcgagatctggctggggcagaactcgatgcagtacggcacgccgacgatggacacgccgtcgatcgccggcgacatcgtcgccgccaacgcgacggcggtccacgcggccgtcgaccccgccggcggcggcaagcagtaccgcaccatcgccgacgcgctcgccgccgtccccgacgccaacaacaccaggcgctacgtgttcaggctcaagccggggcaggtgttccgcgagaaggtggccgtcggcgagggcaagcggtacgtcaccttcgagtccgacccggccaaccccgccgtcgtcgtctggaacaacaccgccgccaccccgggcaaggacggcaagcccctcggcgccgccggcagcgccatcgtcgccatcgaagcctccaacttcatcgccaatggtgtcgtcttcaagaatgatgggccaacaggggggaagcaagggcagacagtggcactgcgggtggcagaaaaaagggcatcattcttcaattgcacgatcgagggcggacaaggcgtgctatacgacgagatggggacacactacttcaggaactgcaccatcaatggcggcgtcgacgccatcttcggcttcgggaggtctttctacgacgattgccgcatcgatctccaagcgagaccccgccgtgcccacggcgccagcgacgtagaagaggccgccctcgcacaccaagcagatcaattctacctggaacggcttcgcctttcacaactgcgtcatcgagaccggtggcgccgacgacaaggtctacctcggcagggcatgggaggactcgtcgttcgtcgcctacacctatagcaagatcgccaatgagatcgtgcctattggctacgacgaccacgggaacatccaaaagccaccgaaagggagcggattctactacggtgtgtacaactgctctgggcctggattggatgcaagcaagaagatgggatgggccgaagaaatcgctgatagcaacgtaccgtttgcatatagctattacgcttttgtcgatggcgaatcgtgggtcgtgcccaggcccgcggaccatatcgagattcacatgtgatgatccatatgcgtgaggaataccaccatattgccacacgatatatctcgcacttcgatggtctcataagtacttatctgtaatgataatgtatttatagc

SEQ ID NO: 9670 - DNA, 1998 bp, Oryza sativa
  ref <308>: DATABASE ACCESSION NUMBER: AK107018
  ref <309>: DATABASE ENTRY DATE: 2002-08-28
attatcatcatcatctaaacctccgacgagccggacttggcggcggcggttggcatggcggccatctggtggtggtggtggccctgatacttggggtccttcctgacgatgcgcttccaataccagtgcttgtcgaagagcatccagatctcctcgatgggcacctgcttggtctccggcaggaggaggatgacgaagatggacatgacgacgatgagcgcggcgaagaggatgaacaccccccaccggaggtggcacatggcggcgaggaagcactgcgccaccgccgccgtccagaacaggttgacgcacaccaccacgctctgccccgccgacctcatctccagcgggaacagctcgctcggcaccagccaccccagcggcccccacgaccacccgtaggccaccacgaacaggcagatcgccaccaccagcaccgtgcccacgcccttcgatagctcctcgccgtgcccgaacttgagcgccaggatcaccgccaccaccacctaagcatttccacaaacaccttgccggcgtcagtcctccgagcaccgtcaaagaaaaatcaagaaacgtctgtgtagtgtactgaccatggaggagatcatctggatgccggcctcgatgaagaggaatctgcggccgaggcggtcgacgacgaccatggagacgagcgcgccgacgacgagcatggatcccgtgatgatggaggagtagagcgcggcggagttgccgaagccgaggctctggaagatgaccggcgagtagaagagtatggagttcatcccggacagctgctggaacgccgggatcccgagcgccccaatgatgagctgcggccggttgcgcgcggcgagcaggctcctgaacgtgccgcgcaccgccctcgccgcctcgctcgcctccctcaaatcctcgaactcggcgtccaccttcctcgtccccctcaccttctccagcacccgcctcgcctcctccagccgccccatctcgacgaggctgttgggcgtctccggcaagaacagcgcgccgacgaagatcgcggtggcggggcccatggcgagccccagcgacagcctccacccccacgggtggatcttgtcggtgaagtagttgatgacgtcggcgacgaggatgccgaggcaggtggtgagctggaagagctggttgacggcgccgcggatgttgtagggggcgatctcggagaggtagagggggacggcctggttgccgaagccgatgccgacgccgaggaggaggcggccggcgatgagcatggcgacgttggcggcggcggcgttgacggcgccgccgaggaagaagctgacggcgccgaccatgatggtggcgcggcggccgcggcgcctggtgaggtgggaggcggcgaaggtggagacgaggccggcgaagtagagggaggaggtgaagagggtcagcacctggttgtcgtacttgcagtagtccgtctcgtgcaggtgcgcgctcttccgcgcgtacacctccgggaagaacttgatcaagaaatcgtccatggccgtcacaccacctgcacattgagagagagagagatcgattggttttttttttcttgctgatttcttcttcgataacattgcagttgcagtcttgcagagcaaaaagatcgcagttgttcaaatattgtaaagaatcaaggtttgcattcttgaaaatattgttagaaagagttggaagcataaagaacttgatcagattatactgccatgcaatccttttgcatgttaaaaaaaaaagcataaagaacttgatcaggaagtcgtccatggccgtcacaccaccagaatattttgattttttttaagaaagagagagagagagagagattggttagttttcttgttgatttcttcttcgataacattgcagttttgcaagtgttgtacaaagattgaaaaacatcaaggtttgcgttcttgaaaaagattgttggacagaaatgaaagattaaagaatttgatc

SEQ ID NO: 9671 - DNA, 1797 bp, Oryza sativa
  ref <308>: DATABASE ACCESSION NUMBER: AK107019
  ref <309>: DATABASE ENTRY DATE: 2002-08-28
agcacctcgtcgacttcttccagcttccatagctagctagctcggctcgccatgggccacgccgtcgctcgccgcctcatcctcctcctcgtcttcctcccctgcttcttgctgccgctctccggcgcgcacgccttcccggcctcggcgctggaggcggaggctgtggcggcgcgccaccaccggctccgcattgcgctcaacgcgacggcggtgcacgtggggaaggcgctcgaggccctgtcgggcgccgccgtcgcgccggcctccgctgtgatgacaacgccgttctcggcgggctcctcctcctcctcgcccctcgccgccgccgcgcgcgacgactgcgcggagctgctcgaggactccctcgacctccttgccggcgccggtgagcccagtgccgcccacgacgacgcggtcacgtggctctccgccgcgctcaccaaccacgacacctgcgccgacagcctcaatgaggccggcatcccccacggcgcggacgccgcgccccaccttgccgccgcccgcgccatggtccgcgactgcctcacaatgtacgcggaggccgcgtcggcggccatggcaaccagcaacaaggacggcctcgccggcgtccccgtccggaacggcggcgggaagagcaagaagcagaggaagagagggagaagaagaagaagaagcctcttcccgaggtggctgtcggcgagggaccggaggctgctgctggtccccgcggcgccattggtggagagcgcggacatggtggtggcgaaggacgggacggggacgcaccggacgatctcggacgcggtgaaggcggcgccggagcgcagcgggcggcggacggtgatacacgtgaaggccgggcggtacgacgagaacgtgaaggtggggaggaagaagacgaacctggtgttcgtcggcgacggcaagggcgtcactgtcgtgtccgccggccgcagcgtcgccgacaacttcaccacgttccacaccgccaccttcgcggcgtcggggagcgggttcatgatgagggacatgacggtggagaactgggcggggccggagaggcaccaggcggtggcgctgcgcgtgagcgccgaccgcgccgccgtctaccggtgcagcatcatcggctaccaggacaccctctacgcccactccaaccgccacttctaccgcgactgcgacgtctacggcaccgtcgacttcgtcttcggcaacgccgccgccgtcctccagcgctgcaacctctggtcccgctcccctctccccggccagaagaacaccgtcaccgcccagaaccgccgcgatcccggccaatccaccggcctcgtcatccacgcctgccgcgtcgtcccctcgccgccgccgccgtcgacggcgccggccgtggcggcgccattggcgccgacgtacctggggaggccgtggaagctgtactcgagggtggtggtgatgatgtcgtacatcggcgggcacgtgccgccggaggggtggctggcgtggaacgcgacgttcgcgctcgacacgctctactacggggagtacatgaactacggccccggggccggggtcgccgggcgcgtggcgtggccgggccaccgcgtcatcaacgacagcgccgaggcggagcggttcacggtggcgcgcttcatctccggcgcgtcgtggctgccggccaccggcgtctccttcctctccggcctctcgctgtagctagctcaaccatatgctgcatgcgcatatatatatatacctgttgcgttggcatgtgcacgcacgtacgtacttgggatt

SEQ ID NO: 9672 - DNA, 2336 bp, Oryza sativa
  ref <308>: DATABASE ACCESSION NUMBER: AK107020
  ref <309>: DATABASE ENTRY DATE: 2002-08-28
acagagagaaaagctaaaccaaactaccaaggcccaaacgtccaaaccccaaacgcatcgacgcttcacaggtagcttggtttgtgcgtgcgtgcgcgcgcatggcgacgatgggagaggagctgtacgagtccgacgtgctgtggccggatcaccagtcgccacacgacgtcgtcccgccgacggcgacggcgacggcgaccgcgccgacgccggctcggcggggccagcagcagatcacgcgccactgctccacggcgagctctcggccggtggacattcccagggccgcgcagcggtggagcggcggcgaccagggcgacgactgcggcggggggacgatggtgccgccccacgtgatggtgtcgcggaggcggtcgacggaggagggggatcaggcgttctcgctgcggacggggaccgggcgggcgcgccgcgacctcagccacctgcgcaactccgtgctgcggatgaccgggttcattgaaggatgacccggcacggctgacccgtcgtttgtgcacacatgcatgcagaggagtggacgacgactggtcgccaaacacccgtccgtcgtcctctcggcttgcactgggtgctcccatttttgttcgttccccttaattagttgcggtgtcatggtgtggacgtgtggtccatgagcaaatattgctcttgtaggaaaggaagcttcgccatgtgtgcctgagttaggattctgattatggactaattcaagtgtgtcttgtgtacagttcctgaaaatgcattttgaaatatcgacctttttgtttgaaagatcgtttttgaaatatccaccgttgtttgtttatccacgcacgattgcactgagaagtttccgttgcggctgtgcactgccaatttatcatggtgtttttgctgctacggaaacctgaaaatgaatgcatgtgttgtttgaccaaaacgtgcaaatttagcaggcgggcaaagccgccaccaagcacgagctcgccagttccaccgcaaaatgggaagccaagtacaaaccgtctcctgcaggtatcagttgatgcggaatggataaaaattcatcggacacagtagcaaggaagtaacgtatgttcagacagccataagaaacaggtgatacatttgtatattcatttcccccaaaagcaaaagagacctcattattcatctgcgctgaacagttgcctcctttcgatgtcccattgtattgactaggagtaatacaaactgcatgacgcatctccatgcctcgtgatattcagcaattatcacatgaaaaagtgccggtaagaaatttccagccctgagaaatcctacaaaaggaccgatttgtggaaaccacaaattcagagtgtcctcaatgccttgatccaatcaacctctagcctaaaatcacctggtccagtctttgcaccaggtacaccgccctcagcatttacggatagagacattcccacaacacgagcagggttcatttccatctttgcttcgatcacatttcctctccatgtgggtagatacgaatcaagagggatctgagagaaaggacaagtgctgtcgtatcatcaaaaaccatatctttcaacttcgaattgaaattaccttcatgatttgccatctgtcctggggtaagtacacaaaggcttgccacgaattatcttcctgttgtccaggtgaattcacccagttctctgtgtatatctgtttaattaagattcagattatatagcaacgtattaacttgatatcgcacattcaatactgtctcaggatgaggatacatacagtagatatgtagcatcttccatcccctctgagtttcatcgctatagtatcatatgcatcaagatcaatgaaaccattaaactgaaacggagaaagaaataagggtttatcagcataatagcatctacagatattgagcaatgaccaagtcaatatcactttaccttctttgatctcattccacagaaaccactacgccttatcttccatgttgatccctcagacatatccaaagagagattgccagaaaagagaccttccagaatgcatatgttggaaaaatagttgcaaaactgtcaaagcttataaaaattaaattaagtgaatcaggcatgaaatctaacaaaaccatgaaaaaaaaggccgctttctttccaattacaaaagccaagacagcaagctggtattatctggtaagttggcaaggacatatgagattcatgagaataacaacactagaagacactccatagttcaacaggttaatttgtactcataagctatatataacagcagataaataaactattttccagttt

SEQ ID NO: 9673 - DNA, 1128 bp, Oryza sativa
  ref <308>: DATABASE ACCESSION NUMBER: AK107021
  ref <309>: DATABASE ENTRY DATE: 2002-08-28
gagagacaaaaatatctccatcgcgatctccatggatgtagagttcttcgccgacctcgacctcgacgcgctcctcgcctccttctcctcctccgccgccgccgccggctccggcgtctcgggcctcttcgccccgtcaccgccgcacgatgcggaggcggggtcgccggagtcggtgagctcccggcggcccagcccttcccgggaggcggcgctgtcggaggtcgagaggttcctgatggaggagggccccgcggcggaggagggggtcggcgcggaggatttcttcgacgcgctgctcgtcgacggcggggaggaggaggaggaagaagaggggaaggggagtgaggcggggggaagcacggatggggattccgggaaggagaatgaggtggctaccccggacgcggagaaggaggatgtggaggcggaggtggatggcgatgatcccatgagcaagaagaagaggaggcagatgagaaatagggattctgccatgaaatcgagggagaggaagaagatgtatgttaaggacctagagactaagagcaagtatctagaggccgagtgtcgtcgcctcagctacgcgcttcagtgctgcgcagctgagaacatggcgctgcgccagagcttgttgaaggataggcctgtcggtgccgccacagccatgcaggagtctgccgtactcacggaaaccctgccgctggtttccctgctttggctcgtgagcatcgtgtgcctactcccggtgcccggtctacccaaccgaaacccggtggctcgaagcagcgccggaagagatctcgcgacggtaaccggaaagaagacaagcagtgaacaacagctagaagaaacattactactccatgggaggcgttggaagggctcgagggcgaggatcaagctagataccggaccgttccgtttagcagcagctgcttgctaggctgccgcttccttgcaaagttgtttccagtctgtattgtagctagcaaatcaaattggcgtgtctatcgcctgtcgtgctgccgcttatccatggactatctttttccttttttggttccctccccccttgtttttataatatcctcctatgcataatgcattatccaggtagttttgaag

SEQ ID NO: 9674 - DNA, 711 bp, Oryza sativa
  ref <308>: DATABASE ACCESSION NUMBER: AK107022
  ref <309>: DATABASE ENTRY DATE: 2002-08-28
gcgtcaatcactctcgtccacacctcagacaaacagcaatcatggaacacatcggccctttcctcctggcagcaatggcagtggcggcggccgtcgccgcggcatcggagacggctacaactgtgccggtggcggcgctaccgccgctgccagcgctgccggtcacagcggcggcgagcacgctgcagccggggacggcgtcgtgcatggacgacctcatgccatgcgcgaccgtctccgacgaccccaccatgctaacgccatgctgcgaggcggtggcggaggtgttgaagagcgatccggagtgcctctgcaaggtcgccgagatgtccagaaacaacaccaggaagctcgcgagcgtcagcaacaacctcgacagcgatcagcaattgttcgcccagtgcaagatcaccggcgtttcgtccgacgtctgccacaaggacaaggggcatcaaggaggtcataatgaaacagacacgccggccggcgactctttgacagactcccaagcaaaaaatgcctctcctccctcgaggctgagtgaggcattccggatcttgttcctgcttcagatactgttcattttcggactgtgaagcaccattcattggagacagtattttcattttccgtattcatcttcctgttcaatgttaccatatggatgccaagtatttgacagtggtgaatgattcgagcttaatggccttc

SEQ ID NO: 9675 - DNA, 1190 bp, Oryza sativa
  ref <308>: DATABASE ACCESSION NUMBER: AK107023
  ref <309>: DATABASE ENTRY DATE: 2002-08-28
gatcgcttccgcaatgctctgatcctgccgagtgcagacgcgcacgcgttcccctctctcccgagcggtgcctttgatccttcttcctcctcgataccctccgtatcaacagcggtcaccgatccatcgtccagacgccgccgccttcatcctccttcctccccatcccccatcccccagcgcccgcattccacctccccctgcggacggcttctccaccgcgccggcgccggatcggcgaggcgggagcacgtggccgcgggaagagcagcaaccggtcaccccgccgccgcagaacgaggtcgcctggacggccgccgccgaggcctcccgctcctccatcatgttcgggtcagcgggcaggccgtgctacatgttctatgcttcaccggcaatggcggccaagcagttttaggtgccagttttggtgtgaagaactaaattgaaaccgaacaatgattttctagagttgcggttaacttctaatcaagttagttctgcaatggataacaatggtggcggttcagcaccaacatcgtccaaaagatcatgtccttttgtgaatataactaatgtgattaatgccaagttgacaaacaagcgtgccgcgcggttatcccaagtgaaatcaatgttccaaaagaccgtgagaactgtcaacagatcaacaagaactctacatataagattcagagaacctcaactattggatttggctatgaaaataacgcttctgtcattaggcatgtgcggctaccatgcacagacaaagctgaactgtcgtacggtacacccaacatgcatgaagatgttactaatcccagtacggctgaactaaaaaggaagtgtgctagagagaggtacccattattgacaaaagagctaaaggaagatagaaacaagaagagacgtgattccagaaagcggaggaaggatgaatcaattggtttttataaattaacacatctattgttatcaaaatttggactttttgaacacaacaccttattattattgaattaattcaactctttcatatcatggatctcaagattccacgaccaaaatggctactcctacatcctcatctgtttcaggttgatgtgtaatatttcacatgtagaaatttgttaggtgttttgtaccaaatacgttctaatctatttggatatgagcagccccgcttggag

SEQ ID NO: 9676 - DNA, 1767 bp, Oryza sativa
  ref <308>: DATABASE ACCESSION NUMBER: AK107024
  ref <309>: DATABASE ENTRY DATE: 2002-08-28
atggagccggcgtcgttgttcagcttcgtgagcgcgatgataaagctggcgatgaagatcgccacggtggcgaagaaggctcgccagaaccagaccaagtgcctggagctctccgaccgcgcgcggcgagtcgccgcatcctgagcaactacaactacaagcccgcggctaccggcgaggcggcggcggcggcgacgtgggacatgctgggcagcctcaacgaggccctcgacgaggcgcacaagctcgtcgagtcctgctgcggagacggccagatgtacaggctcgtgggcagccgcgcggtggacgccaagctggacagcgtcaataacaagatcagcaactgcctcatgaacctcctcgccgcccaaggcgcaggcacggcgaagaagatcgatgagctgcaccttgtggtcgtggatcgcaatcaccaccgtgcaagcaattcgaacgccggcgtccgcgaggataagatgaccagtcatcagcacgccgctcctggttatagccgcccaaacaattcagcacgaatgaagcagaacaccgccggcatcatgttcggcaaccacaccgcttccgatcatggccgccgcttaaacagttcagtaagatcactgagagtgatgaacccggctctcagtcatcaccagctggcaaacaattcagcgtggtggaagcagagtgagatcaacaccggcagctcaaattattcggtaagatcgctaggagagagcagctctgccaagtcgtcctcgggaagatcgtggacagagatcaactctgccaactcttcgatagtaagatcgcggacaaagatcaactctgctcactcttcgatagtaagatcccggacagagatcaactctgctcactcttccatagtaagatcgcggacaaagatcaactctgctcactcttcgatagtaagatcccagacagagatcaactctaacaggtcctcgataaattcggtgagagagatcagctctgccaaatccatccacaaagagaagatcgaccctctccttgctcacagtcatcaccaggcaaacaattcagttagggtgagctacacctgcaagaacggcaacaagagcgtgcagcagaacggggtaaacagcagcaattcgatgagaagcgagaaggcttccaccgcggctacggctaggccgccattacagggctcctactccgacgccggcgtcgcgggctacccgaacgggcaaggctacgctctctaccaatattccattgaggatgatccaacctcctgcgccgtaatgtgatgtgcagagcagaggaagccatgaatctaagctccggcagaggacgcagcctgtgcttgatccatgaccctgcatctgcatgattcctcgaaccgatcgatgaggctttatttttctctcgcgtatttcgggtgcccggaaatccatggattatgtgatggttcttacattacgcatgtgcattaatcgcgacatcacgcatccatttgggtagtagcatctcgggattgtaatgttgcgtgtttggatgtccgtgtaattttttcgccggacgcatgtctggtgttgttaatgactgtaggctcctatagtagcaaatgacaacaagttttttttactaaagtatgtactatatgcctatacgattaatatcattaaactttaatgctacaggacagtatcccgttcggatgatactcgaaaatataggcgatacctcatatgtatcatcccatccgtactgtcgtgtaactttcaccag

SEQ ID NO: 9677 - DNA, 1291 bp, Oryza sativa
  ref <308>: DATABASE ACCESSION NUMBER: AK107025
  ref <309>: DATABASE ENTRY DATE: 2002-08-28
aacataatacaacaattagattttctacaccaccatgatgtagtagaggtagttggacagctcccgcgcgatctccatgtgcttcctggtctctcgctgatcgacggtcgccgcactcgccgcggaggcggcggcgccggccgcctgtgcctcctcgcggaaccgcaggtccgtcgcgatgtgccatatcagtaggctctcgtcgaactccttcttctccaggctccagctcaggttgctgatccgctcctttttcatcacttggtcccccctgcaatccgtcaaaatgctgtacatgctactcgtcgtcgtcgtcgtcgacgttccggtttgggttggagtcgtagcagatgcagatggagatggagatggagatggagatggagatggagatggagctctcactcgcttccgctcacgctcacgctccctctccatcctcttgtcgtactcgctgagacggcgaaccttctcctctagctgggcgtagatgaaatccttgagcttctcgctcaccgggacatacttggtatgcttgtacttgctccagaagcttccagaacggacctggtcgagcagggaacgcctctcgaacagcttctggaattcgtccatggacgctaacgtggtggaaagagcaggagcaggcgatgcgtcttgttgttgcactcctcctcctcggccgccgccgaggagtagccgccggagaagaaacgacgacgagagcggcgccgggtcggagtcgttgttggaaggcagcttccggaggcagaaggtgacgaggttggattgcgccatgctcgccgaccacctcctccgcttcaccagcatgacggagcaccagctcagccagtcgccgtgcaccagggaccagacggagaaggcgtgggcggcgagtatcgcggcgtcgttgagcgccgctccggcgagcagcgcgtacgtcacgcaccggtgccgctgccggtactggctcgcccgcaggatcgccagcgccgcccagaggccggcggcgagcgtgagcgacaggctgcacacacgcaccgccagcctcgccccgcgggacaccgaggccttggtgtagagccgatcgtacgcgaaacccagctcgatctccacgatcttgaacgcccacctcgcgtccttgcgcaagaacatggcctggctctcctgcctgtcctcgaagctgaagatgccgtccgcgaacaggacactgaatctcgagaacagagagtgtgctgaccggatggttttgatggccacctgctcatcttcgctgtaatctttcacctgc

SEQ ID NO: 9678 - DNA, 1608 bp, Oryza sativa
  ref <308>: DATABASE ACCESSION NUMBER: AK107026
  ref <309>: DATABASE ENTRY DATE: 2002-08-28
tagaattgagattagtgcgacccacatgccggtgggtcccacatcctccatctaacccctctctcctccctatctcctcccattgctcccaaattccaaacgagtgtgcggcgacctcaccgcactctccggcgagcacaccattgggtgggcatactgcaccaccttcccctcacaacatctacaacaacaccggcgtgaacgccaccttcacctcacagctacgtactgaccactgtcggggacaacaacctctcgccactcaagctgcaggcgcccaacatcttcgagcttcgacaacgcctacttcacggacctcctcagccaccgcgtcctgttgcgctctgaccaggagccctacggcagcggcgccggcaatggcaccatggacgtgttcgtgcgcgcgttcgccgctaacgcgacgacgttcgaggacgacttcgctgttgcaatggagaggccgggcaacctgagcccgcttaacgggaagaacggcgaacggcgaggaccggatcagctgccggcgagtgaactcatcatgaacatgtaatggattcttgatgtacgcttcgcaaattccataaacttattatcaaatcttgtttctaccggtaaaattggaccactatgagaggactcccgtgccgctcgctctgggcgacacgggaggccaaaaacctgtacgcgtgggggctcccgcggcggcggcggcgtctccctccctcttcctctcctcttcttcctcctctcttttctctccctccctccttttctctagatctagggcttccggcggcgagggcttctcctccccatccggcaccggcagcctccgtccctgaccagccgcgacgtcctcgtcaagggctggcggtggcgtgccaggccggcggtcttctcctctggccagatccagggcgtcgctgggtcgcctccggctccggcgacctgcttcctgcgtatggcgctgttgcggcgtcggccggcgggggtggtgtgagggggacggccggacctggcccctttaggtccagatccagtgcgtcctcagtcggggtcaggtggggccgggcacccagtggtggcggtgacgtcggttgctcgacggagcttgggcggtggtgccgtcagtccggctcctcctctcggtgtagtccggccattgtgcaggtgatgtgaatagtgcagttcccttcggtgtgcaggtgacatttggtggcttccgctacggttgctatggttgaaggggactccgaggtgaaagccttgctctcaacgccctcgggtgccgttcaccttcttgaaggcgttgctattggagttctcgttcaactccacttcaaggaaattctccgggtgaaaaccttagattcgtttggatcggcaatgtcgccgttttgtcggcttaaccttcttgaaggcttcattttaggaatttttttccttgtcggactatcgttcttaggtttaggttcagtatgccaatatcagggttttcgccggttatccataaattatctatgccgatgtaaggtttttgggtccggtttcccttataaactgtatcaactttcttcttctatagtgaaattgcaagagctccctgcc

SEQ ID NO: 9679 - DNA, 2541 bp, Oryza sativa
  ref <308>: DATABASE ACCESSION NUMBER: AK107027
  ref <309>: DATABASE ENTRY DATE: 2002-08-28
ctgtagctcactccctcgccgccatttacgaggcaggaaggtgtttgtgtgagagagagagagagagagcctttgaccgccggagcagcagcgtcaccgccatggcgggcgatcagatgcacgtgctctccgcgctggacagcgccaagacgcagtggtaccacttcaccgccatcgtcatcgccggcatgggcttcttcaccgacgcctacgacctcttctgcatctccctcgtcaccaagctcatcggccgcgtctactacaccgccgacggcgcgtccaagccgggcagcctgccgcccaacgtctcggcggccgtgaacggcgtcgccttcgtcggcacgctcacggggcagctcttcttcgggtggctcggcgacagggtcggccggaagagcgtctacggcatgacgctgctcttgatgatcatctgctccgtcgcgtcggggctgtcgttcggggacacgccgacgagcgtcatggccacgctctgcttcttccgcttctggctcggcttcggcatcggcggcgactacccgctcagcgccaccatcatgtcggagtacgcgaacaagcggacgcgcggggcgttcatcgccgccgtgttcgcgatgcaggggttcgggatcctcgccggcggcgcggtggcgatcgggatcaccgcgatcttcaggagccggttccccgcgccgccgttcgccgccgacccggcggcgtccaccccgccccaggccgactacgtgtggcggctcatcctcatgttcggcgcgcttcccgcggcgctcaccttctactggcggatgaggatgccggagacggcgcggtacaccgccatcgtcgccaagaacgcggagcgcgccgcggccgacatgtccaaggtgctccaggtgaagatcacggcggagcaggcggagatggcctcgccggtggacaagcccttcaccagcaagcccttcggcctcttctccggcgagttcgcgcggcgccacgggttccacctcctgggcacgacgtcgacgtggctcctcctggacatcgcctactactcccagaacctgttccagaaggacgtcttcagcgccatcgggtggatcccggaggcgaagacgatgagcgcgctggacgagctgtaccacatcgcgcgcgcagacgctgatcgcgctgtgcgggacggtgccgggctactggttcacggtggcgctgatcgacgtggtcgggcggttcaagatccaggcggcggggttcttcgtgatgacggcgttcatgctggcgctggcggtgccgtacgaccactggacggcggcggggaaccagatcgggttcgtggtgctgtacgcgctcaccttcttcttcgccaacttcgggccgaacgcgacgacgttcatcgtgccggcggagatatacccggcgaggctgcgcgcgacgtgccacgggatatcggcggcgtcggggaaggtgggcgcgatcgtcgggtctttcgggttcctgtacctggcgcagagccccgtcccggccaaggcggcggcgcacggctacccaccgggcatcggcgtccgcaactcgctcttcgcgctcgccggctgcagcttgctcggcttcctcctcaccttccttgtgccggagcccaagggcaagtcgctcgaggagatgtcacgggagaacgaggtcggccagccgtgatccacccgttaattccaccgccgtccgtctgcatgcaagatccatgcatatgcgtggttagtccactagagatttttgttctcttttttctagaacccattggaatgcatatgttctttttttttctagaatccattagaggctggatgatgaaataatggccgccaattaattgttgacgacaatgtagtttagcattaggtgagtttttcatataatgaaactatcattagagttcatgctgattctgtttcggcacgagggatcctcgcgtcgttcctttttttctgttgattgtgatgatcaagagcgatctctcctccaaaaaacaaaacagaatgcatctctctataatcaaaaggaaaagatatttggtagtaacaagtacttcgtaacaacactcacttgacaggcctggagaaagccccacactgccccaggcccaacacggggcttctattcgggccggcctcgcccaactccacaccaggcccaactgccgcgtttccttgacactgacactgcatggcacagtgacacctgctaccatgtctcagaagggagcagagccgtttttttggaaggggagagcagttcagtttaacctgttcttggcttttggcgatgatcatgatcaccaacaggaagagaattctttttccctccagcgacatgttacacgcagttctggttccttggctcccatctggagcttcatttccaaccactttaacaattttgttaattttgcggtcatgcaacattttactgaatatggattgagatttagtagtaggcttttgatattatatttgtttcatgtaaacaacgttggtgtttctatgttactttatgtgtgat

SEQ ID NO: 9680 - DNA, 1974 bp, Oryza sativa
  ref <308>: DATABASE ACCESSION NUMBER: AK107028
  ref <309>: DATABASE ENTRY DATE: 2002-08-28
ggatgcgtcgtcgccattagcggggagaggagcgggagagagctcgtcgggattattccgagctccatatccattgaaccgaaccagctctgagtgagagagagagagagagatcggagctgttgtttcttctcgtttctttgattggtggcggtgttgaattgaattgaattgatcgatcgattgtttcttggtgtggtggtggcggcgacggcgagcagcgcgccaaggtacatgacctcggcggcgccggcggccgcgcagttcgctgcgccggcgccggcggcgatggggatctacgaccgccggcaccatcccctcgccgccggcgtctggggagaccaccccttcatccgcccggacaccaccgccagcaccagcaacgccgccgccgccgccatggtcgtcgcgccgccgccgctaacagagcccaagttcgagagccagctagctctgcctctgcagcatggagacgatcaagacaacgctgcagctctgcaagaatcgccgaggcatgcgtcggacagcttcgagcaggaggcgtccaagcctcgagacaagatccagaggcggctcgcgcagaacagagaagcagctcgcaagagccggctacggaaaaaggcttacatccagaacctggagacgagccggatgaagctggcgcatctggagcaggagatcacccgagcaaggcaacagagcgcgtacatcaaccgcagcagcaacccagccaccctaccagcgcccatcgattcaggtgtggtgacgttcgaggtggagtacgcgcagtgggtggaggagcaggggaggcagacggcggagctgagggcgtcgctgcaggcggcggcggaggggccggagctccgggcggtggtggaggcggcgctggcgcactacgacaggctgttcgcggcgaagcgtgaggcggcgaggcgcgacgtgttcttcgtgatgtccggcgtgtggcgcaccggcgccgagcggttcttcctctggatcgccgggttccgcccctccgaggtgatcagggtgctcgcgccgcagctggagccgatgacggagcggcaggccgccgacgtgcaggggctccagcagaaggcgcgccacctcgaggacgcgctgtcgcagggcatggacaagctgaagcagacgctcgccgactcgctgctcgccgaggccgtcgtcgtctccacctcctgcgacgcctcgccgccgccgccgccgccggaggaggaggagccgtcgtcctccgccgccggtgacggcggatgctacatggcgcagatggggagcgccatgggcaggctcagcaacctcgtcgcgttcgtcgaccatgtacgccatcgccgatcaccaccacctacctcccatctccatgtccgacgacgagcagagctcggctgacatcttgctgatgacgtgcaggccgaccatctccggcaggagacgctgcagaacatgtacaagatcctgacgctgccgcaggcggcgcgcgggctcctcgcgctcggcgactactgccagcgcctccgcgcgctcagctcgctctgggcggcgcgcccgcgcgagccggcgtaaagcgagctgagctcgccgccggcaacggccagcctgatcgatcaccggaggaggagcaagatgtcgtcgctgagctcgccggggaagacgacatggagctcaagtggctcagtttgagttctctgcattttcatttgcaaggacaggaaagaaattaaacggacgtgttcacttcatcataggatagcagcagcagcagtagctaggaggaggaggaggaggaggagaatttgaatttgaatttaaaagacgtgtaaatatttactacagtaattaacttgcttgggtagttatttgcgtcgctcaacttgtaattgctgccatttccatggataaaaaaaatgtcagggatggtcatatgaaaaattgggagtgattccaggcgcctgaagtttg

SEQ ID NO: 9681 - DNA, 1696 bp, Oryza sativa
  ref <308>: DATABASE ACCESSION NUMBER: AK107029
  ref <309>: DATABASE ENTRY DATE: 2002-08-28
atccatggccgcctagcttagaggctcaccatcgtcacactggctcactgctgcattccgcattcctcgctcgctcacctcacctcacctcactcacctacatcgccggatcgatcgcaccgtcgccggcggccaacgagatgcttcgcgccgccgcccgcgcgctcaccgtcagctccctcaacccaaaggtgctcgcgctggcggatcaccacctcggcggactcgtcgcccgccgcgcgcagagcatgcaacaagagctagacgctaatccagcttcacatcctttcagtgagatcatctattgcaaccacagcaacccacagtcccaagggcagcaaccaaacaagttcttccgggaggttcttgcattgtgtaatcatccccatctcctagaccggagtgaggccagcttcatgttcagctctgatgcgataacgagggcacgggagattgtaggcttcattcctggaaaaacaactggaggatacagtcactgtcagggtattgaagggttgcgtgatgcaattgctgctggaatagcttctcgcgatggtttaccgtcgtattcggaggacattttcctgacagatggagcagctgcaccggttcatatgatgatgcacttgttgatacgtggcaagaaggacggcatcctttgcccaattccatcacactctttgtacacagattctatggttcttcgtggcgcaactcttgtaccgtattaccttgatgaatccagaggttggagtgtgaacatttcagatctgaagaaacagttggatggtgcccgggcaaagggcattgatgtgaggggacttgtggtggtaaatccgggaaaccctactgggcaggttcttgtggaggaaaaccagtgtgaaatagtggagctctgcaagaatgaatgccttgttctcctagcagatgaggtttaccaggaaaacatttacacggatcagaagaaatttaactccttcaagaaggtagcacggtccataggctatggggaaggggatatatctttagtatcattccactcagtatctaatggatactacggagaatgcgggagaagagggggttacatggaggtcactggcttcagctcggaagtaaggggagaagtatacaaagttgcatccctaagcgcatgctccaacatatctggccagatccttatgagcctagtcatgaacccaccaaaggttggagatgagtcatacccctcttatcgtgcagaaagagacagcatactatcatctttgtcttgctgtgcagaggccatggtgtccacattcaacagcatggaagggatgacttgcaacaaggctgaggtggaatatctgtgttccctagtgttcggctgccgccacgggcaattgaagctgctgaggcgatgaacacagagccggatgtgttctatgctctccgtcttctcgaaagcactgggattgttgttgtgcctggctcagtgtttggacaagtacctggaacatggcatttcagatgcacaattctgccacaggaagagaagacacggcagattatctcccgctttaatgtgttccatgaagcatttatggaagaattccgcagctaaaaggcgcaaacattctttttccatatgtagtataactctatgtactttctatgactgataagtgataagtgataagtgtgagatttctacctg

SEQ ID NO: 9682 - DNA, 805 bp, Oryza sativa
  ref <308>: DATABASE ACCESSION NUMBER: AK107030
  ref <309>: DATABASE ENTRY DATE: 2002-08-28
aaaaaagaaatcagtcagactcgtctgaatttctgaattattcagagtttcatccattccactattcgctagtgctaatctacgctgtgatagggaggaggaggaggaagggatcgagcaggttggttaggttttaccaggaggggacgaggttggcggcgatgaagaggaggtagccggaggtgccgagcacgagcgcgcgcctggaccccatccgccgcaccaccggcgagcccaccaccgagaacgccgtgaacgacgtgtacaggagccccagcgacaccgaccccaggttctgggcggcgtggtaggcgaggaagacgaagaggaaggccgagctcagcaggtgcaggtcgcgggtctgggacgtcgccgccctcgccgccgccgcggcgccgcgtctgccggataccagcggggcggcctcctcctcctcctcgtcgagggccaccgcgagctcggctccggcgggagcgtggccgtcttccatggcggatttggggggaggagttggtggtggcgtggcttcggtgccaaactgcgcgagcactctgctctgcttgtgatttgggggaaggggggaggggcttgtttttctaaatttaaggtctacgaggggtgtttgtgataaattaagtggtttcaggagaatagcagatagtttagggggtctttgtgagaattttagctgtttcgtgtccgaagaagtccgaaccgcccgatgacaggcgtttgtttgttttaagaagagatagtagcttttacagggtgtggttagtttctgaaaaaagttgaaagtttgaag

SEQ ID NO: 9683 - DNA, 1773 bp, Oryza sativa
  ref <308>: DATABASE ACCESSION NUMBER: AK107031
  ref <309>: DATABASE ENTRY DATE: 2002-08-28
ctcgagcttttttttttttttttttgacagccctatccagcacgccaacggaattctcccccaccccacctcctcccgtgcaaaacctccaccaccaccgccaccaccgccgcgcaaaaccctccatcgctgccatgccgccgccgccgccgccgctgccgctgcaccaccagattatcaaggtgcatcccgtggttgcggcgatcttctccgttcccctcatcccctcttcttggcgctgaccgattggattctcccccgcacaagcacacgaatccgtggagcgggccgggggtggtttggtttggattctgatgcttctttcttgggtttcttgctctgcgctgcttataggtggcaagggacgaggatttccgctcgcgtatcgggaacgatggccgctacttcgatcttgtcgacttcagcgcaatcgacgtattctacgttccgaatagcttgaccgtctacgagttcaaggtagtaccaccatatatttccagatttccttgaatcccggatgatgcctatgcctctttttcgatggtttctttctttttctttttctcttttttttttggcgaggttctatggtttctttttagtcagtgacatttcgtgcactgttgttattcggaaaattatgtcagaagatggatatgggccatatggcgtcatcctgtttaggattagaggctaattaagtttgatagttcagaaaatatgatgagcattaattagggaaatgagttgcatggcatgacatctgctgttttgaaggaaatctttgtactacaacttaggaatgttcctattcattgtcatgggaagtattgtgctggagaacatgtaaaccaaccattgcatttggtccttgtgaagttgtactatatataccactccaaaatagtgaattggtaaattaaagtacagctccaaagtatggtctcttttaaatgtgctactttaggacacttctactctaataatgacaatgtgattatttgccacatgtaagctgacaaccctgtatgactatttattgtgcagctcgtcattcttatgctctatattacgtatagataccttataggttcaacttgtcacagggtacgctcatggagaaatttggaacccctgtgcaatgtcaacacctctggtggtgggctagacgactaaacaaaacataccgtgtagacaggccattgacaaccgaagaggagaaactatctgtaagttaacattgtgatcgccttattttctgattggttcttcatactgttttgttccatgcaggtgtgcagtaaaaagtattcttttcattttggccttaagtctgctgtgttgagtaagaaatcagagaaggaagggtttccttcaaacctgtgcatgtctgattgttttgcctgaactagcacaaactaaacatagatccattacttcatttttctagcggttgacaacttcatatgaattttgtgcttccttgattggcttctttggcaccacaattttgaattacgaattctgctctcgttacatatgtcttttatttagtgctactaagcgttaaatgttagcttgcagtcatgccatttcattttcctcaaaggtgtgctgaagagcagataaagtttttgaaagcaacatttgactctcaattgattgcttttttttttagcacgcccgttgggtatattcactttcagaagcttggtctatttgtagccataccatcttgatcagataacttcttattaaaaagttaaattttat

SEQ ID NO: 9684 - DNA, 1159 bp, Oryza sativa
  ref <308>: DATABASE ACCESSION NUMBER: AK107032
  ref <309>: DATABASE ENTRY DATE: 2002-08-28
atcaagaacacaaactagaaacacgagcagaagtagtaagaggttcaaatctctagccacccccacagccgagttcctgaaactgatcgacagaaatggccggaggaggagatgagctgaagcttttgggcacatggttcagcccgttcgtttccagagtgaagttcgtgttccacctcaagggcctgagctacgagaacatcgaggaggacctcaagaacaagagcgagctcctcctcaagagcaacccggcgatcaagaaggtacccgtgctcttccacaacggcaagccactctgcgagtccatgatcatcgtcgagtacatcgacgagaccttcgccggcgtcggcccgtccgtcgtccccaccgatgcctatgaacgcgccgtcgctcgcttctgggtctcctacatcgacaacaagctagtggcgccatggttccaggtgttcaggagcaagtcgatggaggagaaggcggaggggctgaagcagatcttcgtggcggtgatggtgctggaggaggcgttcaaggagtgctccaaggggaggccattcttcggcggcgacaacgccgggatcgtggacatcgcgctcggcagccagctcgggtgggtgcgcgcatcccaggcgctgtccggcatcaagctgttcgatcccgccaagacgccgcttctggcggcctgggcggagcgcttcctcgcgctggacgcggcgaaggcgtccatgccggagttcggcaggctgatcgagtatgccaagatgaggcaggccgagtctgacgccgcgaacgcagcagccaactgatcaccactcaccaaccaactgcgatgagctgagcagactcgcccctgcaagtgtcgatttggggaaagcgagttaataatttgtgtcctgtttgtgtcaagtgtcaactgcttcattgttgctctgcacctctgcctacgttgcgcaacttgttccatgccagtgttttgttcagtcagtctgtcgttgttccatgtcgtgtttgtttatgaccaataaatatatttgtatccttttattttaaaaaacgcacagacattatatatccttgtaaaacaatacatgccaaaaaatatgaaatttgaacaaagttttattttcttggtcagcggcgaagaagtgccctgaccaaattt

SEQ ID NO: 9685 - DNA, 789 bp, Oryza sativa
  ref <308>: DATABASE ACCESSION NUMBER: AK107033
  ref <309>: DATABASE ENTRY DATE: 2002-08-28
aaccccgcctctccctcccgcacctccctctctccgcctcgaccgcatccgtgcgatccgcttctgtcgcacctcccccttctggccgctatcgaatccgtccccctcccgtcgccgcccagtctcccctcccaccgccgcctccctcccgtcgccgacccaatccgccgtcttgccgcccagctccggctccggtctccccactctctttctcaaacccgtcgcctgttgatcctcgtcctccgccgcaacctacgccctcctccgcgcagacaccgatctccgtcgccagttcaacgtcgggcgcatccatccacgaccacgaccacgaccacgccgcccgccgatccggacatcgctgctgtccctccgccggcgaagtctgtgcggcctccgcctcaaccggcatcgccgccgctgtccctccaccgcggaaatcgtcacgcctcgcctcaaccgccacctatacggagtcacgccgccgtccctccgccgctgaaaggacaacaccagcgacgcctagcggatctccacgcctgctgcccaccggcactgcccactgaacaagtgtaattagccgttggagtgcttcttgaagtagacagaaagcataatggataaaatgggtgagacattatttgtttttctcaactttgagagttgactgggatgtaattctggataacataatcatcacgtgtgaatatttgaaacgaacttcaattgtctatttcagacagctgtacatgtcattggttgttcattccaataaagcgtgcattgtcgagc

SEQ ID NO: 9686 - DNA, 1674 bp, Oryza sativa
  ref <308>: DATABASE ACCESSION NUMBER: AK107034
  ref <309>: DATABASE ENTRY DATE: 2002-08-28
aaaaccatggccatggtgcaagacatcaccggctacctgtgcctctccttggctctcctcttgctcactctcgtcctccacaaggtggcgaggaaggcgaccggtaatggcgccggcaagccgaggcttccgccggggccgtggcggctgccggtcatcggcaacctccaccaggtcgcgatgggcggcccgctcgtccaccgcaccatggccgacctggcgcgccggctggacgcgccgctcatgtcgctcaggctcggcgagctccgcgtcgtcgtcgcctcatccgccaacgccgccagggagatcaccaagacgcacgacgtcgcgttcgcgacgcggccgtggacctccaccatccgcgtcctgatgagcgacggcgttgggctggtgttcgcgccctacggcgcgctgtggcggcagctccgcaagatcgccgtggtggagctcctcagcgcgcgccgcgtccagtcgttccgccgcatccgggaggacgaggtcggccgcctcgtcgccgccgtcgccgccgccccggcggcgcagcccgtgaacgtcagcgagcggatcgcggcgctcatctccgactcggcggtgcgcaccatcatcggcggccggttcgagaggcgggacgagttcctggagggtctcgccgaggcgatcaagatcacctccgggttcagcctcggcgacctgttcccgtcgtcgaggctggccagcttcgtcggcggcacgacgcggcgggcggaggcgaaccaccgcaagaacttcgagctgatagagtgcgctctgaggcagcacgaggagcggagggccgccggcgccgtggacgacgacgaggacctcgtcgatgtgcttctcagggttcagaaggatgggagcctccagatgcctctcaccatgggcaatatcaaagccgtcgtcctggaactttttggtgctgggagcgagacatcagctaatacacttcaatgggcgatgactgagctcataatgaatccaagagtgatgctgaaggcacaagctgagttaagtaacgtcatcaaaggaaagcaaacgatatctgaagatgacttagttgaattgaagtacttaaaacttattatcaaagagaccttaaggttacatcctgtagtgccactacttctccctagggaatgtcgggagacatgtgaggtcatgggttacgatatccccataggtactactgtgcttgttaacgtatgggcaataggtagagatcctaagtattgggaggatgctgagacattcatacctgaacgatttgaggatggccatatagacttcaaaggaacaaactttgaatttataccgtttggagctggacgaaggatgtgccctggcatggcatttgcagaagtaatcatggagctcgctctagcctcattgctttaccactttgattgggagctccctgatggcatctcgccaaccaaggtggacatgatggaggagttgggtgctacaattcgaagaaagaacgatctttaccttattcctactgtccgtgtgcctttgtcaactgtcttatagttgtttacacttataaatagtgtgtttgtctcgtatgtacgtgtctaaatgataagctatgtaacttttgatgatgtgtactcctacttcctatcctacctattataaattattatttaagtt

SEQ ID NO: 9687 - DNA, 1059 bp, Oryza sativa
  ref <308>: DATABASE ACCESSION NUMBER: AK107035
  ref <309>: DATABASE ENTRY DATE: 2002-08-28
aactcctgctcaccccctttctccccgcgcctctcctcctcaccctagcccctctccccccacgcctctcctcctcctctcggcagccaaggcagagacggcgacggtgaacgacctccttcctcgttgagccaccgccgtggagccgcatcgatttggcccggggggcggatctggccgccgaacagcggatccagtcatagaagaggcgcgtgcagacggtggtggtcggcctcctccctcttcagtccagatggtggacagcctccttcctttttgagacaccgccatggatctgcaccgaccggccaccggatggccacgggagcggcgcgggcggcggatccggtcgcgacgacgacggatcctccaacccccttgtctctcccgacgatgcagcgggtcggggtcacctgacgaccgtggctcggtgagcggcgactgcggctcggcgggcgatgacgacggcaaccacagcagccacggtgacgtctgcaacaagctccctccttcgccgacgcagctcgatgacggcatccgacgattggggattagggattttttattggaattttttttgctcgaaaaaaatgttttcgttggcgagtatcttaacattgccgccagcgaaatcctattttcactggtggtcgtcttagcttggccgccaacgaaaatgattttcactggcacgctgtattagcgtggccgctagcgagccgactgcccgccagcacaaatgaattattttcacttgcctttggttgttggcagtatagccggcctccagcgaaaacccattttggctgccagtaaaaacggtttttttaagtagtgatgagaaaccaaatttttaaattttagtatccgtggagccaaattatataataaaaaaatacaaattctcttggtaacttcacaaggtgtaaaatattttttctttaaatttcagaaaaattgcactcctgtttagggatgaaaacggatcggaaacggacagaatatcatattcgtttttatttttttttcggaatcggaatcggaatcgaaaataagaag

SEQ ID NO: 9688 - DNA, 2072 bp, Oryza sativa
  ref <308>: DATABASE ACCESSION NUMBER: AK107036
  ref <309>: DATABASE ENTRY DATE: 2002-08-28
gggcctccctcccccctcctctcctctcccctctctcgcggtcgcctcggtgcagcccgcgaaaatagcagccgcccgttccctccctctccctctcccctgccctgccgaagccgcggcgatgaacggcgccacggccggctccggctccggctccgaccacgacgacgcgcgcgccgccgaggaggccagaggggaggaggcggcaggccgtgccgtggaggttgaggaggaggaggaggaggaggaggcggtgcccgtggcggaggagagggccgcgtggggcggcggcggcactcccccgacccccgagccgaagagcgacgcggacgcggagggcgcgggctcgctggatcgggtggagctcaatgcaggggcgggcggcggccgtgagcgcgaggacgacgagggggaggacgaggccgtgggggcgaggggggtggagctgaacggggaggacgccatgagccacgacggccacgacggcgatgaggatggcgatgacgaggaggacggcgacgacggcgaggaggaggaggaggaggatgatgatgaggaggatgacgatgacgactccacccccgatgcgtcgccgagggcggaggcgaaggcggagggcgagagctccaccgtgatggcgggctgcgccaaccagcccgctgagcccgaccccttcctcgacggtgacgactctggaacggaggaggagcaggcggcgttcatggtggagctggagcgcttccacagggagcacggcctcgagttcaagcctcccaagttctatggcaaaggtctcaactgcctcatgttatggaggcaggttgcccacctgggaggccatgagcaggtaacaatttgtaaactatggcgtcaagttggagagactttcaggccgccaaagacgtgcactactgtatcgtggtcgttccgaattttctatgagaaggcacttctcgagtatgaaaaatacaaagtccgaactggccagcttcaagtaccattgtctgctttaccacagcctggtggtactggccgtgagattggtatgaatcaatcatcttctgccagagttagaagggattctgcagcgcgtgctatgcagggttggcatgctcaccgtctccttaccaatggcatatatggagatcaaatgttgaaggaaaaagattcagtcccttcttcaagtcgtggagtactcaagaggaagaaagcatctagtccagagtgtgctatcaaggtgtctcgtacaaaaataaacaaatcacaggatgactcaatggtcactgatgttggagaacctgccgagtgggtgaagattaatgtacgacagactaaagattgtttcgaaatctatgctctggttcctggacttctacgcgaagaggtgcatgttcagtcagatcctgctgggcgtctggttataactggggacccagagcagcctgataatccttgggggatcactccattcaagaaggtggtcaatctgccattgaggatcgatcctcatcaaacatccgccgttgtcacgcttcatggccaactatttgttcgtgcaccatttgggcatgctgatatgtagatagtttcctttgagtgcagataccactggcccggtggtatttctggaattctttataggctttagacaattttgttgcagaagcaagtttttgtgtgagcagacgctcaatgccgagctgacaacggaattttgctgtaatcagtagcaagacttggggatctgctataatagtattgtttatagtagttgacataagtaggctggtttattttggtttgacctaccggagatttttgttttgttgtttatttttagtcggaagcagagtatatcaaaatagagagatgaaaataggttaaatgaaagcttaacttctttattttttggaaaacaaaggattagtttcttaacattattatttactattttcatagtaatgtttataagtgcctctgggcaatgcttgtccttaagcaaattttttatgcttgcatttgattcctcgtcccaatggactattgaattctaaattttgttgctggctatc

SEQ ID NO: 9689 - DNA, 1713 bp, Oryza sativa
  ref <308>: DATABASE ACCESSION NUMBER: AK107037
  ref <309>: DATABASE ENTRY DATE: 2002-08-28
gttgcatatttgcatgaacaagtcacaagtgtagtagaagtgcagggcgcaagctgtgcaacacacatggcggcgatgacggtgaggccacggccggccgccgccgcgatcatcatcgccgccgtcttcggcgccgccgcggcggcggcgggcggcggcatggtgggcgtggacgggacgcagttcgtggtggagggcggcaggacgatctacttcagcgggttcaacgcgtactggctgatgatgatggcgtccgacccggcgcgccgcgccgccgtcgtcgccgcgttcgcccaggcgtcatcgcgcggcctcaacctcgcccggacctgggccttcagcgacggcggcgaccagccgctgcagtcgtcgccgggcgtctacgacgaggccatgttccaggggctggactttgtgatcgccgaggcgagacgacatggcatataccttctcctctgcctcaccaacaacttcgacgatttcggcggcaagcgtcagtacgtccggtgggcggccgacgccggccacaacctcaccgccggcgacgacttcttcaccagctccgtcgtcaaatcctactacaagaaccacgtcaaggtacgtcacaatcgatatatacatacatcgatatactagatgttaaagagctggagctcgatctctcgtgcaggcggtgctgacgagggtgaacacggtgacgggggtggcgtacaaggatgatccgacgatcttcgcgtgggagctcatgaacgagccgcggtgcgacgccgacccgacgggcggcatggtgcaggcgtgggtggaggagatggcgccgtacgtgaagcgcgtcgacggcggccgccacctggtgacggccgggctggaggggttctacggcgacggcgagcacgagagcaaggagctcaacccgtggggcatctactacggcaccaactacgtggccacgcaccgcgccgccggcgtcgacttcgccaccatccacctctacccggacgtctggctatggggctccaccgccgacgagcaggccgccttcttccgcaactggacgcgctcccacgtccacgacacggcggcgttcctcggcaagccgctgcccgtcaccgagcacggcaagttcctctggaagggcggcggcgccaacaagacgcagaggaactacttcctcgacgtggtgctcgacgccatctacgcctcggcgtcgcgcggcggcccgctcgtcggcggcgcgttctggcagctgctcctcgacgacgacgtcgtcgccggcatggacgacctcagggacgggtacgagatcatactcgccgaggacagccgcgccgcgagcatcatcggcgagcactccgagcagctggccagcctcaacggccaggacgcggaggcgcttcgccgccgccgccggcggccggcgagctcgcaccggaagacgcgtcttggcagcggcggcgacagcgacgcactccgactcccccgaacgctcttgattcgcttcatctctttgtctagatcgatctcttcatttattcaagacaattttgttcttttctagtttgtatatagcttgcatccttctccttaggtatagttgttcgttggcacatcttgcaactgtaacctgtcgaaatcatcaggaacgcttcaggatggctgttctgacgatgtatgttttgtaccatagtttcctgtataaggtgttttgcaacggtt

SEQ ID NO: 9690 - DNA, 1865 bp, Oryza sativa
  ref <308>: DATABASE ACCESSION NUMBER: AK107038
  ref <309>: DATABASE ENTRY DATE: 2002-08-28
tagtagctgaactctttgcagccaatgcacaaatctctctcacctttgcgtcgtccggtctcctcttccggaagctgcctccgccgccgctgctgccgctgccgttgctggcctccggcgccagcggcggctcgccgcctaagctcccgtaacacatgcttgccaggtcctgccactcctggaggtagccgaacatggcgcggcacttgtcgtcgtcgagcatgacgtcgtcgagtagcccctggcagaggctctcgacggtgtcaaggtgacccttccggcgtcgtgaaacgtcgccgccgccgcattgcgccatattactaaccacttagcaagaagagaagacgatcaattctaggaacaaagctaagatttggttggttcttcctatcctttgatgcaaataggtagtatgtgaccctttcaaggtaagcaacaggatggtagctaatgtgtaagcttaaggggagggttcttgtgcctgaagtttgcgtgtccctttctctccctccctcttttgctcttcaggagttttttcctaatccatatatatagagtggacgataggtggatagagaggaggaacctttcattgtgtaatcgtacttttggtatgagattggatttggccctttaggtatgttcatgtgaggtagggctggataaagtagtgcgggtccctgtgtttcagctggcatatgcattggctagaacgtctcatcaattggccctcctgtaatccacaaattagcaattatgctcttgctttcatttcctctacaaaagaacatataaatgtgagaatcaatgggattgctttagttatgggcatatgaatcaacaccatatcaggcaataagatgttggctcttgaaccactccatattatttactcattatatactgcatcatccttttcaatttgcttttgaatcatagtcatagccattctcaagtatcaacttaagtgatgatcatgctccatgcacttagctaacctttttctaaaggaataacatgcacaaggttttatttgtgcatatactgaaataagaggtggcttctgaacatttgctgatgctgcaaaaggacgattggggaggtgacagctgctccattaacctgtatggacagctctatcttctctgcactgacccttgtcccaccacaccatactcgccacgtgtacatttgcattaagaaataagatgctcagattagtgataacccgttggccatattactgaacagaaccggactttgcattccagttcgttaacacgagtattccttaatgagcagtgcacgtgaacatcggcttaatttttgtccactgacaatctcctggtgattgtctggaagcatgcattgcaccccatcttggtgtctgttgtctagcacattatggaagcaggatattgaggggaactgttagtttaagtagaagagactattttcttttgaagggcaagtaatgctgctatagatcatgattagatggaattgtgcaacagttagtggttgttcaaagacaggagtggattcgaaaaaacctggagtgcttctgttcgttttgcggctaggcggttttcagtttagcattcaactatattagctccctgtctaattaatgaacgtttgtgtggatctgctgatgatcttattaagctgttcctgcagttttatgatttttttagcaaacaaatgctccaaatagtcgacgtccacttgaccattgcaactaactaaatctattatattactatcggtgtccatcatgtatgtatgtcttgcttacatagatctgcacctatatattatgagtatatagttggcatacacagttcattcggctctttaaagtt

SEQ ID NO: 9691 - DNA, 1722 bp, Oryza sativa
  ref <308>: DATABASE ACCESSION NUMBER: AK107039
  ref <309>: DATABASE ENTRY DATE: 2002-08-28
tagaaaaggataatagaacatttgtttcccataaaaaaaataaaaggtagcattatgcatagaaaatttttcttgtagtattgaagagtcactgtcgatgttgtaactaaaatatttaactgttaagctattcataccttggcagcaggtgagcctggagcggtgaaaagcacatcgcagactgctccgagaggggcaattgtcaatgatactcccttgtacgccatcatctgatccatccttcccagcacggccattgctaggaatgcacctgcacgttatcattatttgaggaaaaatatgtcagagaggaaaccaagccctcgctgaattcacttggcgaaaaagcacggagattcagagacccagccaacgaaggccgacgaagaagacaagtttcaagtttcagactcaccggcggagggccaaagaacatcgctgacgctgatgccgccaggcgacgacgacgacgacgccggcgtgacaccggcggcggcgctcacttccgcgacaacgacgccgctcaggtccctcctcctcctcctcctacttaagccgatcctctgagaagaaaggaagctgctaccctgcttcttgctgccattgacatgcaggaggacgggtagacatggcatattggagtgggacgccgctgctagacattgctgcacccttgctcgtgccaagacgttgctgcagccaatgccgagcatccccggtcgttgctgcaatgccattctctctctctctctctccccttctctctccccaagaagcacagtatgggtatttaaatgggcaggataaagcggcgaagaggagatagggtcaagagagagagagagagagatggatggcctcttgggtggacgtgaggggaagagaaggcggcttagctcttcagcgccgtggagagtcgcagatgttgatgcctggaataagaacaagtatatagtaaacaaatactactgtactgacaagtgcatatgcttcccatgttttcttccgtttttgatccaggtcatatgctggttggatcacaggggagaggcatggatccgttgctgctccttggcagcttcttgctcatcgctatctggccacagcagatggtaccagttgctttcacatgctgttcatgtggtcagtggtgacaggttacacgggcggcatgaatccaagcgaaatctgattatattttggtgtgaagatcatcattggccgcaatgctggcaagtgctagagatggtctatttaccacaggttctgacaacatccccaaccggtaagaaagaaaagaatctgagcattttatagccttattaacttggctagttaaatttcaatatttgatattgattgttcttgtctcctcacaaattatgggtttgtatattccttgtactgcacgagtatctgctccttccatcttaaattttgcatatgttaatcacaagcaccaaagaagcccccaagaaggccctccgttcgttgacgctgctggtcgtctgggagagatttggaatgaaagaaaccgtagaaccttccagcaaaaggagctcttgtcgaatagcttgctgacgaaaatcaaagaggaggccagagcatggatcttagcaggagcaaaacatctgggaaattggcttataacttagtttgttaggaccaaagctttggtcctgttttttcttttatactgtgcagtttactccttccttgttt

SEQ ID NO: 9692 - DNA, 965 bp, Oryza sativa
  ref <308>: DATABASE ACCESSION NUMBER: AK107040
  ref <309>: DATABASE ENTRY DATE: 2002-08-28
atttcccaccccgccgcgcctcgctcgatctaccgcctccgatccgcttcttcttcttcttctcccccgcgatctcgtgctctgatggcgatggcgatggcggcgtcctcctgcgcgtcctgctccgccgccgcggattctttctcctcatcggcgtcctcctgctgctgctgcggctcctcgcggattcaggtacgtggtgatgcccctttcttgttcttcttgcaggagctaggtgtcggtagcggcggcgaggggtgcttctgctgtgcttcgtctccggggtacacgccgtcgagcccgatggtgatggggagtccgcggcgcgccgcctcgccggactacacgccatcgacgcctccgcggcgcgccgcgtctccggactacacgccctcgactccgactactccacgccgcgccgcgtcaccgaactacacgccatcgactcctcagcgccacgccgcgtcgccagactacacgccctcgactccgactcctccgcgccgcgcggcgtcgctggactacacgccctcgacgcctccgccccgggccgcgtcgccggactacacgccgttgtccccaccgccacgggccgcgtcgccggagtacagccccagcacgccgcctccgccccccgtgccgtccgacgcagagtctggcacgtctccgctgtggcgccgccgccgccgccaccatccctaccagaggcgcggctccagcatcgcctgctcgccgcgcgcggtccaggtcgccggcggccaccatcaccaccctcgctgcgccatcctgcacggatactaggctcttttagttgtaggcaccaccttgtaacaggacaactccgattcttgatgtaactaatgtctggcacaactaatcatgtgcctctatctactatatttacatcatcttgtattatcatggctgtaactatatgtctatatcaaatgcaatagaaatctgag

SEQ ID NO: 9693 - DNA, 1951 bp, Oryza sativa
  ref <308>: DATABASE ACCESSION NUMBER: AK107041
  ref <309>: DATABASE ENTRY DATE: 2002-08-28
aaaaaaccctaacctccgaagtcgcgcggtcgccgccgccgacgaactttgcggcggcgacggcgctgtacctgctcttcgagtcggcgtcggggtacgcgctgttccacgcccacggcgtcgacgagatcgggcagggcgtggacgccgcccgcgcctccgtgctcgagctccagcggttcagcaaggccgtcaagctcgccggcttctcccccttctcctccgccgtcgacgcgctcaaccagtgcaacgccatctccgaagggattatgactgatgagctgaggagcttcctggagctcaatttgcccaaggtgaaggaggggaagaaggctaagtacagcgtcggggtcatggagcccaaggtcgggtcccatatctccgaggccaccgggatcccctgccagtgcaatgagttcgtccaggaactgctccgcggagtgcggctacacttcgatcatttcattgatcaactcaagccaactgacttggaaaaggctcagctaggcctggggcatagctatagcagggcaaaggttaagttcaatgtgaaccgtgtggataacatggtaattcaagcgatttttttgttggatacacttgataaggatatcaattccttctccatgagagtgagggaatggtattcttggcattttcctgagctggtcaaaatcgtgaatgataactacgtttattctaagattgcaaagtttgtggtgaacaaatctgatttagcagaaaaagacatcccagctttagcagatataattggagatgaggacaaggcaaaagaaattgttgaagcagcaaaggcatccatgggccaggatctttcaccagttgatttgatcaatgtccaacagttcgctcaaagggtcatgaatctatctgaatacagaaaaaatctttatgagtatctagtaacaaagatgaatgacattgcaccaaatctgacatcattgattggtgaaattgttggaggcttggagctcggttaatctctcatgctggcagtctttcaaatcttgcgaagtgcgctgcttccactcttcaaattcttggcgctgaaaaggcacttttcagagctctgaaaactcgtggtaacacacccaagtatggcctcatattccactcatcttttattggccgtgcgtcaactaggaacaagggcagaatagctcgatacctggcaaataaatgttccattgcctcacgcatcgactgttattcagagttgaatacctcagttttcggtcagaagctgcgcgaacaagttgaggagagactagacttctatgacaagggtattgcaccgcgtaagaaccttgatgtgatgaaagctgctattaatgatatgacaaatgccgtctcagaggatggtggtgaaaaagagaagaacgacacatctgctaagaaaaataagaaaaagaagtctaaagctgaagctgatggtgaagaaatggaccttgataagcctgccaaggttgctgcagaagagactgatccagaaaatgagaataagaagaaaaagaagcacaagctagaggagccacaggatcaggagatggcagtcaatggcaatctcgaacaagatgaaactcccaagaagaagaaaaagaagaagccggaggcttcagaagatgttgagcctaggacagccactgaaggaaagaagagaaagaagaaaaagtccaaaacattgttgataatgagtcatgatcaacttaagtgtcaaggataacattgctgctctggttagagcttccttgtaacattgctgctgttctgggtatcaaaattctagttagggcctaggggttcctctaagagttacatgtgatgcatatcaccttggatggagccttttcttttcagatagcttaattaccatcttatcgtagtatcgcctgtgaaatcccaaacatgtatacaagtttgcattgtaatc

SEQ ID NO: 9694 - DNA, 2067 bp, Oryza sativa
  ref <308>: DATABASE ACCESSION NUMBER: AK107042
  ref <309>: DATABASE ENTRY DATE: 2002-08-28
actggtgccgcccacctctccgtataagacaaactgcgttgcggcgttggtttccgccggcgctgctgctgcacctgtcagctagggcgggcatggcgcgccgcgccgcttcccgcgctgttggcgcccttcgctcggacggctcgatccaagggcgaggaggccgcgcggggggcagtggcgccgaggacgcacgccacgtgttcgacgaattgctccggcgtggcaggggcgcctcgatctacggcttgaaccgcgccctcgccgacgtcgcgcgtcacagccccgcggccgccgtgtcccgctacaaccgcatggcccgagctggcgccgacgaggtaactcccgacttgtgcacctacggcattctcatcggttgctgctgccgcgcgggccgcttggacctcggtttcgcggccttgggcaatgtcattaagaagggatttagagtggaagccatcaccttcactcctctgctcaagggcctctgtgccgacaagaggacgagcgacgcaatggacatagtgctccgcagaatgaccgagctcggttgcataccaaatgtcttctcctacaataatcttctcaacgggctgtgtgatgagaacagaagccaagaagctctcgagttgctgcacatgatggctgatgatcgaggaggaggtagcccacctgatgtggtgtcgtataccactgtcatcaatggcttcttcaaagagggggattcagacaaagcttacagtacataccatgaaatgctggaccgggggattttacctgatgttgtgacctacagctctattattgctgcgttatgcaagggtcaagctatggacaagccatggaggtacttaccacgatggttaagaatggtgtcatgcctgattgcatgacatataatagttatttcttgaaatgttggatcgaggcatttgtctggacactattttctttaattcaataattgacagtcattgcaaagaagggagggttatagaatctgaaaaactctttgacctgatggtacgtattggtgtgaagcctgatatcattacatacagtacactcatcgatggatattgcttggcaggtaagatggatgaagcaatgaagttactttctggcatggtctcagttgggttgaaacctaatactgttacttatagcactttgattaatggctactgcaaaattagtaggatggaagacgcgttagttctttttaaggagatggagagcagtggtgttagtcctgatactattacgtataacataattctgcaaggtttatttcaaaccagaagaactgctgctgcaaaagaactctatgtcaggattaccgaaagtggaacgcagattgaacttagcacatacaacataatccttcatggactttgcaaaaacaaactcactgatgatgcacttcagatgtttcagaacctatgtttgatggatttgaagcttgaggctaggactttcaacattatgattgatgcattgcttaaagttggcagaaatgatgaagccaaggatttgtttgttgctttctcgtctaacggtttagtgccgaattattggacgtacaggttgatggctgaaaatattataggacaggggttgctagaagaattggatcaactctttctttcaatggaggacaatggctgtactgttgactctggcatgctaaatttcattgttagggaactgttgcagagaggtgagataaccagggctggcacttacctttccatgattgatgagaagcacttttccctcgaagcatccactgcttccttgtttatagatcttttgtctgggggaaaatatcaagaatattataggtttctccctgaaaaatacaagtcctttatagaatctttgagctgctgaagcattttgcagctttgaaattctgtgttggaattcttttctcctacagtcctattagaggagggatcttctctgtatgtgtaaatagcgaggtatgtatgccacctctccgaattatttttactgtggttcctagactgtaaacaagcaattatgttatgctgttgatgccag

SEQ ID NO: 9695 - DNA, 903 bp, Oryza sativa
  ref <308>: DATABASE ACCESSION NUMBER: AK107043
  ref <309>: DATABASE ENTRY DATE: 2002-08-28
aaaaaccaactcctcctcgagccaagaaaccatctagctagcgaggccacctcaccggccgccatggagatcccgccgctctaacggcggcgcgttcttgctcgtcgtcggagctagagatcgatcgaccaagctagcgtttcttcgattagatatagtcatatctatataggtagaaggatgggtgtgcacttgctgaagaggcagcagtcatcggcgtcggcggggggctcgtcggcggggggagggatgccgccgaaggggtgcatggcggtgagggtggtggggcccggcggcgtgggcggcggcggaggaggagcggagggagagaggttcgtggtgccggtgggttatctgaagcacccgctgttcgtggggctcctcaaggaggccgaggaggagttcgggttcgagcagaagggcgccatcaccatcccctgcggcgtcgaccacttccgccgcgtccagggcatcatccaccaccagaagcaccaccacggcggctcccatggcgccggcggcgccggcgccggcggcctcctctccggccacggctcgtcgggacaccacaacaacttccacatcgccgcctgcttcagggcctgattgagatgatcatcagatgatgatgcatggtgtttctttggctagcttctctctctcttagatcgatggattaataatacttagggttttaatttccttttggttaggaatttagtcatggtttgtgatgatgatcaaaaaggatcatgcatgcatgagcagatctgtcatgcagctgcgggttgttctctgttcatccttataggactctctctctctctctctctctctctcctagttaagttagattgtgatgatgatgatgatgaaaatggagatcaaaggatctgttcaatc

SEQ ID NO: 9696 - DNA, 1718 bp, Oryza sativa
  ref <308>: DATABASE ACCESSION NUMBER: AK107044
  ref <309>: DATABASE ENTRY DATE: 2002-08-28
caataggaaaaaaaaaaagatacacagctccgccgccgacaccgctccctccgccgccgcgaaaactccctgcggcgtccgtccggcgattcggagaccatggggaaggctgcgagaactgggctgccgccgcgccgtcgcggcctcccggaggagatcgtcgtctgggagatcctggtacggcttccccccaaacccctcctccgctgccgccaggtgtgccgcgcatggcgccgtctcacctccaccggcgacttcctcctcacccaccaccgccaccagcccaccctccccctcgtcgacagatacaagtgcaacgaggagttcctcctaggcatcgtttcgctcgaccgccgcgccgctgcagcccggctccagcccgtcgcccagctcgatgacacctgctacatgatgagcgctgatgcctcctgcgatggcctcctcttgctctccatcggtggaatatggtggttcatctgcaacccaatcacgcgtcaattcggtgcgctccacctgctttgtggcttcatggtcatggggttctacaagcatccccctactggggactaccgactgctactataccgaaatcaggagctgatgagtgaacatctgattcctggcgataggaatacctgctatgtatacacattgggctccagcgacgtcccgaggtgtatcgggtggcctgagacgtcggcgagcggcgcaactgttgtgctccattgtagcctgcattggtaccagaggtcccaggatatgattttggtgtttgacaccacagccgagtcgttccgatggatgcgcgctccatctgacaggatgaagtgcacattggatagcgggaatctgtttgacatggatggtaagctcggcatgtactgctctaatgatggatgcacaattgtagatatctgggtactgcaggattataagagagagatctggtctctcaagtaccaggtggaattgcctgttccagagatcagggggatgcttggtggggcttatcattggagtgcgatggtcttatcccaggagggggttgtgcttgtgctggttagctgtgatcgatggctattttacattgacactgagggcaacttgttggcgagtttccaacattatggtgatggcctctttactattggactgaagctgaaaccaagccttgttcaacatgcattctttccattgctggatagttatgccgtgaatgcttcgcctttcatctgatgtctgttcaatgaggtggtgcttctttttaacattctgaattagatgaaatccaaacgcacaagctttttggttaaggtatgcattatttttgcaaacttcttaatgcaagctaagtgttatttcgctgcatgaatttttgttgtatctcatttttgttgtatctcagtttctataatgcaaactctataattgccatttcaggacatgttgatagtcttcttttaatgatctgacaaatactttgattgattagcgatgaataatacagctcatatagtttcatcgacataattctggaagccatctggaactgtaatattgtgtacatagtattatctggtcatgctgtttactcggtcagaaagtgctctaatgctctacagaacactctgtaaaatagttgcagacttgcagtagagagggctgttcagttaaatgatcagttcctattatattctaacagagtcattacattatgc

SEQ ID NO: 9697 - DNA, 2127 bp, Oryza sativa
  ref <308>: DATABASE ACCESSION NUMBER: AK107045
  ref <309>: DATABASE ENTRY DATE: 2002-08-28
gcagctttcaagcatggcaagacgaataagagacgcttttccttaattttgtttgatcattccctttcagctttgattttcctggtatgacatgaagcattgttcagattatttgttgtctgaagcccttatcaagatttgattccagattacctagaaactcaagctttcaataaactaacaacgatggaggacggcatggatttcagccctcataaaaatagcacagaacagaatcgaaccagctttgaagaagatgatcaattcagcattcgatcagcaccctccaaaccatctccagacaagaaatcgaagcccaagaacaagccgaatcatcactccgacaagacggcgaacccgccgccgcagaggcccgagacgacggcggcgctggtgacgacgaccgcagcagcagcaacagcaggaacaaaccgtggcgaggccgtcagcaacggcagcctggacagcatcagcagcggcagcacacggagcaacagcctggagagcagcagcaccggcgccgcggcggcgccaacggtgctgacgacatcggcgtcgacggcgtcggtgtcggcgtcggggcagaacgtgaagcggcacaccggcggggacagccggtgggaggcggtccaggcggcgacggcgcgcgacgcgccggcgccgctgagcctggcgcacttccggctgctgaagcggctggggtacggcgacatcgggagcgtgtacctggtggagctccgcggcacgtcggccttcttcgccatgaaggtgatggacaaggcgtcgatcgcgagccggaacaagatggcgcgcgcggagacggagcgcgagatcctgggcctcctcgaccaccccttcctccccacgctctacacccacttcgagaccgacaagttctactgcctcgtcatggagtactgctccggcggcaacctccattccctccggcagaagcagccctccaagcacttctccgagcccgccgccaggttttacgtggcagaggtgctactggcgctggagtacctgcacatgctggggatcgtgtacagggacctcaagccggagaacgtcctggtgagggacgacggccacatcatgctctccgacttcgacctctccctccgctgcaccgtctgccccaccctcgtcaagtcctcctccgtccacgccaccggcagcggcggcggcataggcagcagaggagacgccatcgacggcggcgagagcatgccggcgaaccagggctgcatccagccctcctccttcttcccgcgcatcctgccgcggcgcagccgcaaggcgtccaagagcgacatgggcctgctgctcaacggcgcggcggcggtggagttcaacgcggagccgacggaggcgcggtccatgtcgttcgtgggcacgcacgagtacctggccccggagatcatccgcggcgagggccacggcagcgccgtcgactggtggacgctgggaatcttcctctacgagctcatccacggcgccaccccgttcaagggcgccggcaaccgcgccacgctctgcaacgtcatcgagcagccgctccgcttcccctccgacggcggcgccagcgccgtcgcgcgtgacctcatccgcggcctgctcgtcaaggagccccacaagcggatcgccttcaccaggggcgccaccgagatcaagcagcaccccttcttcgacggcgtcaactgggcgctcgtcaggagcctcacgccgccgtcggtgccggagccggtcgacttccggcagtacgccgccgccgcgtccgccaccactcccaaggacaagaagccgccggagaacgccgccgccgccgccgcccccgccgcggcggatggtggcggcgcggccaactcgagcaccggcgagtcctacactgactttgagtatttttaattagtactatatatttattcctgacaatattgttgtgcacaccagattgttttgatcgatggttgtgaagtatgagaactcgattcgtgataattaagttgtactaactcattcttggactatggtagattcattgtaaacctaaaattcatatgaaaatgtagcgatttcatttgattggtttgttatatgtgaacatctgttacttgttattgt

SEQ ID NO: 9698 - DNA, 1820 bp, Oryza sativa
  ref <308>: DATABASE ACCESSION NUMBER: AK107046
  ref <309>: DATABASE ENTRY DATE: 2002-08-28
acacacccccaaaccaaaattaaccaaacccccgcgccgttaaccctctgagcttgtgatgaattaacgatcgtgaccgatcaagtgagcgattaataataacccagcggcacacaattaagcaatgcaagaagccgtcgtcgttaacaccggcggccggtgggcaccaacccgtatttatatacacttctatccggccaaagcagcgggcgcggccgggtaacccaaccacacacgcacgacacgaagaacgccatggcgaagcaggcgtggagctcgctgttcgggtgcttcacctcgcaccacgacggcggcggcaagaggaagaaaggcggcggcggcgggaagaaggcgaagaagaaggtggcggcggcggcgagccagaagcagcggaagctgcagagccggctgtcgttctccgacctgtcgttcggagggatggtgtcgccggaggacctgtcgctgtcgctggccgggtcgaacctccacgtcttcaccatcgccgagctccgcgccgtcaccagggacttctccatgaccaacttcatcggcgagggcggcttcggccctgtctacaagggctacgtcgacgacaagctcaagcccggcctccgcgcgcagcccgtcgccgtcaagctcctcgacctcgagggcacacagggacacaacgagtggctgactgaagtcatctttctggggcaactgaggcatcctcacctcgtcaaactgatcggctactgctacgaggatgaacacagacttctcgtttacgagttcatgacgaggggcagcttggagaagcatctcttcaaaaagtacgcagcgtcgttgccatggtcaacacggttgaagatcgccataggtgccgcgaaagggttggcctttctccatgaagccgagaagccggtcatctaccgagacttcaagacctccaacatcttgctagactcggacttcaaagccaagctctcagatttcgggctagcgaaggacgggccagaggatgacgagacgcatgtctcgacacgtgtcatgggcacacagggatacgctgcaccagagtacatcatgacagggcatctgacggcgaagagcgacgtgtacggcttcggcgtggtgctgctggagctgctgtcggggaggaagtcggtggacaagagccggccggcgcgggagcagaacctggtggagtgggcccggccgtacctgaccgacgcgcggcggctgggccgcgtcatggaccgcaacctcgccggccagtacccggccaaggcggcgcagaaggccgccgcgctggcgcaccgctgcgtcagcctcaaccccaagtcccgcccccacatgtccgccgtcgtcgaggcgctcgagccgctcctcgccctcgacgacgactgcctcgtcggcaccttcgtctacgtcgcgccgcccgacgacgtcgccgccaacggcgacggcagcagcaagaggcgagccggccggaggaggtctgacggcgccgcggcggcggcggcggccgatggtgtgcagcgggaatgactcggttttgcttgcgtttgtctgtactcgtcgagctacgtgctgatcaagcgatgccggtaaattaatccggatcagtgagttggctcgtgggtaaaaaatgattgtggatttgaagcatgttattatttgtcttaggcttgaatagcagaataggattagagcgtgtaaatacgagcatgtcagacgtacatgagcaaattgagcatgtaaacagtttgacaaaatatggatggtttatcacttctcatgttgggaggtttctctagtatcttcccagcgccgtg

SEQ ID NO: 9699 - DNA, 1715 bp, Oryza sativa
  ref <308>: DATABASE ACCESSION NUMBER: AK107047
  ref <309>: DATABASE ENTRY DATE: 2002-08-28
agatgcaaagtctctctcaagcttgcctaggaaatataaaaagagagagaaaaaaaagggttgttttgatcagccaagaactggaaggatttgatgctctcctactgctaccattgctaaacaactaatttttagtatgctgctgctgatggtgatgatgacgatgattaatggcggattaattggatgctctaatctcttcctccctcttcctttccctttcctttttcttgcgagctgatgagctaaaaaaagctaagaacggcgcggcgatctgtgcgagctagctgccggcggcggtgggctccgtccatggcgagggcaagaagggctcgtcggcgatgtcctccacgagcagctcttcctcctcctcctcctcctcgtcctcctccatggacggcgtccgcagcggtgtggtcggggagagccccgccgcctcggctccaccacccccggcgccgaccaccaccaccgacggcggcggcggctggggctgcgcggaggcggcggaggcggcggaggaggaagggagcttgttgcgggtggtgccggcgagcgagttgcggtgggtgggcgccgagtggttgtgctcgccggtgtaggtgaggatgaaggtgttggggtcggagcggctcctctccacctgcttcctcgccgggcaccccttcgagctactgcaccggtagtaccccctgttgcaacaaaaccatagctccggaaggagatgaggagttcagctgctgccatttctggcgaggtgaaaaagagaagctcgctcacctcctcttggatctaggcacgccgccagctggcacctgcctcgccgccgccggctgcgacgccctcgccggagccgtcgtcggagccggtagattctcctgcaccgtcaccggtttctgctgctctggctgcggctgcgtcggaggaggaggaggaggcgtcggcagaggcgacgacttcgacgaggaagaagaaggaaaggcggcgcagaacgccttgaggagctcgtcggcgtcgcggccgagcccgccgccgccgccgtccctgaccgtcagctccgggaagctccacgcagcctccaccccgacctccttctccgccgcaacctccatcgccaccccctgctgcaagaacgacgcgaacggatccacctgctgcgccaccgccgccggagagatcctccgtcggcagcagccgaggcggacgacggcgtcgaggtcccagttgttgccgcagagctcctcctccatggccgtcgagaagaaatcaagaaaatcctcaagaggaggaggtggtggtggtggtttcttgggctctagagaggagataagagggaggcgctgacttttgctagtttattgattgatttggaagagagaaggagactatgggaaagggtaaaaggagagagagagagagaggaggaatggtggtgatggcattggatcctgccctaaaaaggagtgagggctactggtctattttcttgggttttttttttctttttcttcttggagggaggctggttttataggggtgtgggggcagcacaccccccacttgactctgcagcatgtcaaaggggtgagaaaggggatactccatgggtgggaggggtataatgggaaaagctcactgtgattttttttggacttttcttggagaaaatgtatacctcctgtattggatttaagaaaatgggaggtgatcagtat

SEQ ID NO: 9700 - DNA, 2009 bp, Oryza sativa
  ref <308>: DATABASE ACCESSION NUMBER: AK107048
  ref <309>: DATABASE ENTRY DATE: 2002-08-28
gttaagaatatgcaaacagtattatctcacgaaatagggcctgtttctttaaatgcacaagagaaagtatcccttccagatgatcttgtcctgaatgaaaatcttgccgagcttgttgacatcatcagtgaagatgacactactctgtcatcttcaattgttttctaccctcgtagctgtggttcagtcgaaaccagagatgaacctgcattatcacttggttcatcttctcttctttctgagcaccgtaaaaggcacggactgtactatcttccaacaggaaaagcggaggatgggccagttgattatcctcatgccaatgatcctctgctgcctgctagcagcgaaagtgctctggatgataaattgaagactatccagcctgttaccggtgggaaaaaaccgaaggccgtcaagtccagaccaaaagtagtgaagttggatggtgaggatttcctaagttctatggtggctagtgcaagtgttccaaaagaagattctttatctggtgctgtacgtggtgtactgttgggtagagatctcaagccatcatcttcacaaaaggcttcagataaggcttacgaaggaattataaacaaaatggactctggtgaatctagttctcagtggaaaaataatgtagatgctgatttcgtaggccatcccacttcaagttctagaccaagtattcaacagagccatgataaagagagtacaaaccctcttgaaagtgatgggaaggaagcgagaaaacacagaagatctaggagtgggcatcgtcaaggaaaacataagcatagagaaaggcattgcactcaacctgatgtacctcaagctcctataatccaggattttcttctatagttgctgaggactcccttgtttttgatacatttctattgccaagtacatgttaccttttgttcattcacattcagcggtttttagttttcactttcatttcatggaagttatttagttggtttatctgtggcagctggtctaactgccactgttgtatcctgtatatctttcttgagcatagcacttgatgttcttcatagctccatggcaatatatttgttcatagtgtacaaaaaaaaaaaaaaaaaaaaaacgtggctctcgccatggagctgccgctcggtccagcgcgcgcgcccgccgccgccgctctcccatgccgtttctccccgacgttccggccacacgcccctccgcccgctccgagcaacagccgcgcgcacccgccgctcctcgcccgcgcccgcaggaacaagagctcccggatcgacgcggacgcggacgcggagcccaaggtcatcaccatcggccgccccgggaagaagagcaggcggcgccgcggacagccgccgccgtccaaggaggaaggcagcgaggaggaggacgaagaggaggaggaggagagggacgtggcgatcccggaggtggtgacgaaccggatgatgcggcgggtgggggtgtcggtgggggcgccgctggcggtcggggtggcgttcctcccggcgttctactacctcaagaaggcggcgaaggtggacgtgccgacgtggatccccttcggcgtctccttcctcttcttcggcgccgcgctgctcggcgtcagctacggcatcgtctccgccagctgggaccccgccagggagggctccctcctcggctggaacgaggcgcgccgcaactggcccgtcttctgggactcgctccgcggcggcggcggcggcccctcctctccgccgcctcctcgccggagatagccttgctcatgcttggttcttggctagaattagctacaattagtgttgtttcgcgttcatcttgtatgtaagaaaaagcgcacccagaatcagtagtcagtagtttgcccataaagcaacgagaaaatgttttgtctcagaatttcgacatcttttgtttttgagattttatttaaattgtttcttttcatctcaaaactggggcttaaggccagtcacaatgggtgtttc

SEQ ID NO: 9701 - DNA, 1677 bp, Oryza sativa
  ref <308>: DATABASE ACCESSION NUMBER: AK107049
  ref <309>: DATABASE ENTRY DATE: 2002-08-28
cttctggtgagataatcccaaatttctactctgaaccccaaacgcagaagccggcgaggcggcgagccggagaaggatgaatccgccggagctgatggacgacctcgtcgacgagatcctcctccgcctcccccccgacgagcccgcctgcctcgcccgcgcctccgccgtctgcaagcgctggcgccgcctcctctccgaccgggccttcctcctccgccgccgacgccgcgcgccgcctcccctgctgggtttcctccacaacctcgacaacgccgaccaccccgaccgcttcgtccccaccaccgccctcccgatccccccgccgccacccgagctccactgcgggatggccctcgactgccgccatggctgcgccctcctcgacgcctacccctccaggatcgacctcgtcgtgtggcaccccatgacgggccacctgctgcggcggcttccccgccccgacgtcccgtacctcttgtactacaacgccgcggtgctctgcgccgccgccgccgccggctgcgaccacctcgactgccacgagggccccttccgcgtcgtcgtggtgggcaccgaggaggacaacgaggcgtgggcgaccgtgtactcgtcggagtccgacgagtggagcccaccgacctccgctcgcctcgcccgaggacccgagttctgcgtcgagggcaagcccgccaccctcatcggagattcgctctacttcgccctcgtgtttggtatcggagtcgtcaagttcgacatgaagcgccatcgcctctccctcatcgatccgccggctgagctcgacgatggcttcgtgctcatgccgctggacaacgatggcgtgcttgggctcgcggccgtggaggatcacagcctcctctctgtgtggtcaatggatgtgagcctggatcatggacatggtgtggcaaattgggagaagtgcagggtcattgagctagacagtctgctaccaaatcttgatcactctaccccagtgctaccaattggatttgtggagggtgccaatatcatcttcctgagaacagatgcgggtgtcttcacacttgagctcagatcaatgcgtgtcaccaaggtgtgcaagatgggttcttctacgctgtcgtgccgtacacgagcttctacattcctggtgtccatctccagcagcagcacagcggacctcagatcagtaatggccgggcatggggatcgcaggctgctaacatgaggcgtggcagcagtgagcagccgagagagcgtgctccactgcatcagcagcgacgggcaggacggccggtgaacagccaacgtcctactggtgatatggtccgttcttcaggccgtgctagcagattggcatctcaagtgcggcctccatggagaccctaatgattcgcaaggtggcaatagctgacaataatgtttaatctatcgtgcaatttacaggtggtatattgctaatcgtcggttttagtcatttgtgcgatcaagaagaatatcttatggttttgaatgcattgtcagtacagaatatctaaacatggaaagagcagattaactgagaggagtgagagctctatctcgtatccgctaactgaatttccagttataacatccaatttgtttatgggctttcccattgtcatactgcaagtctggtgaatgtttatttcaagc

SEQ ID NO: 9702 - DNA, 2175 bp, Oryza sativa
  ref <308>: DATABASE ACCESSION NUMBER: AK107050
  ref <309>: DATABASE ENTRY DATE: 2002-08-28
atacgttgcgacgaaggagctcctcgcgggtcgcggcgatgagcaacgccggcaggaggaggaggagcctgacctccatagctccctcccccgtttcctcctcttctttcccttccggcgcccgggaagctcaggcgccgccgtcccagcttcccagctggaagttctcccaggtgctcggcgaactgccgctcgccgccgccggcgaaggccacgacaacggcacgctccaagatgacggtgatacgatctcggcaatcgagttcgacggccggggcgagcacctggccgccggcgaccacgccgggcgcgtcatcctcttccgaagaaccgacgacgagagccacccgccgccgccgccgtctcgcgccgacctggagcgcacggactacgccgcggcggcgccgccggcgtacgcctacatggcggagttccagagccacgagcaggagttcgacgttctgcacagcttggagatcggcgagaaggtgaagaagctgagatggtgcgcgcggccgaacagctcgtcgctgtccatgctcgccaccaacgaccgcaccgtcaagctctggaaggtctccgaacacaggtcgaggaaagggaacggccagccgcggcggcggcggagcactccgacttcggcgtcgctgtccgagatcgcgctgctcggggagggtgattcgagcgtaagaaatgggtattattacgagtgggcgagcaagaaagctaggaactatttgtcccctgattcggctgaacattccgaaaagtgacggggagacgttcgtgtcggccgacgacctcaggatcaacctgtggcacctggaggtgacggaccagtgcttcaacgtcgtggacatgaagcccgcggacatggaggatctcaggtgatcacttcggcagagttccacccgtcgtcgtgcagcctcctcgccttcggcagctcgaggggcttcgtccagctggtcgacctgcggcagtcggcgctgtgcgaccgcaacgtcagaatattccaggatcgtgggaacagcgtgcagcctaggacgctcttcaccgagatcatctcttgcatctccgatgtgaagttcaccggagatgggaagtatctgctaactcgagactacatgaacctgaagctctgggacttgcgcgtggagagctcccctgttgcaacttacaaggtgcatgagttccttcgtcctaagctgtcggagctgtacaacaacgactgcattttcgacaggttcagctgctgctccagcaagggcggggactacttcgccactggatcttacagcaatacattcaaaattttctctcgtgctgctgcaaatcccaacggaattacgttggaagctagcacgaacccttacaggatacaatcattcccctctgcaaagagtcaagggttgctcagcaattttgctcgcggaatccagagaaaaggtcaagatggaccaagatctgacggccgggaggacactaaatgtaacatgacatcaaaggtgacacatttagcttggcacccgatggaaaacttcatagtttgtgcagctaataacagcttgtacatgtaccactcataggcatatgcacttattttttctccattacccattttgttccgtgggagtactggatactggaggaaaatatagagggcaagatttactaaacacatcgagtgaaagcactatgcattacatatagaaaggcatttgaagcgctgaacatatttatgcgaagctgaaaccttagtcctcgggaagatttttcgctaagcatctggcatattacaatacatattcgggcatttcaaggtatgctgcacaagatcgccactgtgggtcagagaaatgagaagacactcttaacgtcaagaaaagatgcgccagtcccactgctctttgcactcgccaaaatatccttgcaataatcctgaatcgtgagaggttggactgaggctgcaacttgctttgtacattgcataggctggaaatctgcaagaggactgctgaagcagaatttgctcttctcagatgagctgtccattttacctaaaaactgaagagaattctcatctggagtcttgcttagagccttgcttttctcagacgagctgtcccttttacctacaaagtgaagtgaattctcatctggggtcttgctcttttc

SEQ ID NO: 9703 - DNA, 664 bp, Oryza sativa
  ref <308>: DATABASE ACCESSION NUMBER: AK107051
  ref <309>: DATABASE ENTRY DATE: 2002-08-28
atcaaccaaagccaaccaaaaacttcctctgctgcttagctaaagaatcatcgccatcatgagtgtggagatcctcgacggcaagacggtccggagcttcgtggaggacgagggcgccttcaactcctcggtcgacggccgcttcgccgcgctcgacgccaaccgcgacggcctcctctcctacaccgagatggccggggagctgatgagcctccgcgtgctggagaagcacttcggcgtcgacgacgaggccgccatgggccccgacgagctcgtggagctgtaccgtggcctgttcgcgaggttcgaccgcgacggcaatggcgcggtggacctggaggagttccgggccgagatgaaggagatgctgctcgccgtcgccaatggcctcgggttcctgccggtgcagatggtcgtcgaggaaggcagctttctcaaggtggccgtcgacagggagctggccaaagctgcttaaattaatatacctgaaccggcgagcatttaaattttcacacagctacgattttaattgatatatcttgtgttcacaatattgatcattgttatttgatagcctctgttgagctatatttcattgttacttgtgtaactgtgctctttgagatagacaaagataatatgatataaaaaaccagttttgatc

SEQ ID NO: 9704 - DNA, 780 bp, Oryza sativa
  ref <308>: DATABASE ACCESSION NUMBER: AK107052
  ref <309>: DATABASE ENTRY DATE: 2002-08-28
tgagttcgttggacttgacatggaaatggcaatcaaaggccactactctgaggtttgtgatgttgtggataggctgtttgttgctatgtttgatcatctgaacaagaactgcgccaaggaacttgaggccattaacaggcagtatccgttcaaacctttgaagtacttacccaagacactgcgcattgagtatgacgaaggcatccggatgctcaaggaagctggggtccacgtggaggccatgggagacctcaacacagagtctgagaagaagctgggcgagctggttcataccaagtatgacactgatttctacatgctctgccggtacccgtcggcggtgaggccattctacaccatgccctgctccgacgacccacgctacagcaactccttcgacgtgttcgtccgaggggaggagatcatctcgggagcgcagagggtgcacgtcccggaggtcctggcacgacaggcggaggagcgggggatcgacgtcggcagcatcgccgcctacgtcgacgcgttcaggtacggcgcgccgccgcacggcgggttcggcgtcgggctggagagggtggtgatgctcttctgcggcctcggcaacatcaggaaggcttctctcttcccacgcgaccccaggaggctgaacccctgaaaacaaaaaaacacaaccaactatccaccccaaaaccaactggtttctttcatgtttgtattttgcgtggcaagaattctatctgaacacaaacattcgattcaggaatccattcatctcgaact

SEQ ID NO: 9705 - DNA, 530 bp, Oryza sativa
  ref <308>: DATABASE ACCESSION NUMBER: AK107053
  ref <309>: DATABASE ENTRY DATE: 2002-08-28
attccattagcatatatacacacaagctaccaggctagctacttcgcattcagtttcagtttcagagaagagacagcttcttggatcgtatcggccatgggctctcacctgcaccgtgacttgctgctcgccgtcgttctcgcggcgatcgccgccgcgagcctcgccggacgcgccgacgccgcgaggccattgccgccgagccccgcgttgccgtcgccgtcgtcgtcgtcggcgttggaggcggccaaggcggcggtgtcgacgctgatggagatgctgccatcggggcccagcgcaggtggcgcgggacactgatcaactcatccacgcgcagatagattcaagaagcgatcgacgagatgtctccgagcgatttttgtagctgttttttttttcttcttaatttacgacaccatttttttttcttccttctatagatggataggttatgtgatctgtagcctctgaacatttgtgtacataaagatgaacacaacgtgagaaattaagctactgatgatcggtgc

SEQ ID NO: 9706 - DNA, 1209 bp, Oryza sativa
  ref <308>: DATABASE ACCESSION NUMBER: AK107054
  ref <309>: DATABASE ENTRY DATE: 2002-08-28
agaagcgggacaaggggaaaggcggggcgcacggccgcgtcgtgcgcgagggcgtggagttctacagcaatggggactgctacgagggggagttccacaagggccgctgcaacggcagcggcgtctacaccttcttcggcaagggcaagtacgaaggggactgggtcgacggcaagtacgacggctacggcatcgagagctgggcgcgcggcagccgctaccgcggccagtaccgccagggcctccgccacggccacggcgtctaccgcttctacagcggcgactgctacgccggcgagtgggccggtggccagagccacggcatcggcgcgcagacctgctccgacggaagctcctacgtcggagagttcaagtgcggtgtcaaacacggcctcggcagctaccatttcagaaatggtgatcggtatgctggggagtactttggggacaagatccatggatttggtgtctacagctttgccaatggccactgctacgaaggctcctggcatgaaggcaagaagcaaggatttgggatgtacacattccgcaacggcgacaagcgatcgggggactgggattcagggactctgaagaccccccttagtccaactgatccttctgttcagcgtgctgtacaggtatatatatacacattgatctaactatcagcttatgggttacaattgcaaattgcttgtggtgttctaatggttgcattgtacaattaggcagcgcaactagctgcggagaacgcgtttcacctgccgagagtagacgagcaggttcacaaggcggtcatggctgctaatagggcagccacggctgctcgggtagcggcgatcaaggcggtccagaacaggatggatgggaaattctgtgatacctatgtgtgagtgagtgtgtggtgaagaaaccatggctttccttccttctaactgtacattagggtagcgaaggacaataactaatcggttgaggttcagttcagacgaccggagcaagcacaaccgcttgccccgagtcagagagttcagcaaagaacgggagccgccgggagagcggagctgacaattttgtttcgcaaaacagctcagaatctgcaacatcgcaatcgcgattggcggccccccctttccccctttcttgcaagctgtaaattgtaaatagatccaggtgtatcaatgcaagagtgagctttttttcctc

SEQ ID NO: 9707 - DNA, 1588 bp, Oryza sativa
  ref <308>: DATABASE ACCESSION NUMBER: AK107055
  ref <309>: DATABASE ENTRY DATE: 2002-08-28
tccttctctcgctctctcctctttccttgcgacgggcgacagccgcgtctttccctccacctggcttgcttctcctcgtcggcgatgatctctcccacaccacaacacgccatcctctgcttcccgctgtctcatcgcccctctcccactccgtcgcagcgtcgctgccccgacccgaggatgcaccaccttcagatctggcggtggctagggtttggcttggagtggtggcttgcagcaggccggacgcgggtgcgcagcggcggtgcagcagctggcgcagtcgcagcatgcgcaaggcagcaggtcgccggtggggacgcgcggaggcagcgtcgacgcgcagcgtgcgggcgcagcagcagctagcaacagcccagtgcacgggcgcatggtcgcgtcctggtctgctactgctactgctactccactcaagtgctcacatgctatttctaatcagctaatggcactaataagtgagcattccctatttctctgtagcatttaggtagactctggactctaatctatttatcttttgaatgagaaacagagccttctatttaatagttttttatttactgataaacttgcaagagagaagaaaacaacattgtttaactactttacaaacccaattgatgagagcacaaaccaaccaacaagattcgaatagattttgatcctaatgaaattcttttcagcacgatgaatgacaatggaggatatgttggtggatgcagttacatttgtttctttggtttaagatttgttttctgttgatttgtcactaatttgctactttgcatatatagctggctgctcacttgacttttggctaaggcctaaaagaatgcactttgtgctggcaaagtactccttttttttcttttctatcatgtgaacatttaatttgacttgtaagaggaaggggaaaagaagggagtaagaggcagtttggtctcagaagaatgcacttttttctttaccctgcctcttacggtttgtggctgcaatggctagcagtgtatctggttcaagaagtcttgtcgacgttgttgcattcttctgatgaccacactggatctggtcatttgttgcatgatagaggatccatcacggtgtattcatgtagtcattatctccatgctttccttcatgctcagtgaatggagactgaagactgaaaactggttggtgctcttgcaggtgagattgaagatataaaattggtcggggctctggtaagctttgtaatggagaaattttgcagctctagctgtttgtttcatagcttctcaaattgctgggaaaaggtagagatgaaaacatggtggctagagctagtgtggaccaatgatggcacttggagctgggtaaggaccattgatgatactagaatttagagatgtgtttgcacatgctatactctacatgttttatatttccattgccttttttccttttcttttttcatttcttcttgaaggtattggatcagagagagccaacttaggttttagtgtacctttatattggtaaagtcacttggttattcaatctaggtccagagttcggaatctgaact

SEQ ID NO: 9708 - DNA, 786 bp, Oryza sativa
  ref <308>: DATABASE ACCESSION NUMBER: AK107056
  ref <309>: DATABASE ENTRY DATE: 2002-08-28
atccaagctagctatagctagtatatatctgacaaattcagagaaattcagagagtcaccgcgagagcttaagctagctagctagccggccatggcatcgcatgtggacccgctggtggtggggagggtgatcggcgacgtggtggacctgttcgtgccgacgacggccatgtcggtgcggttcgggaccaaggacctcaccaacggctgcgagatcaagccgtccgtcgccgccgcgccgcccgccgtgcagatcgccggcagggtcaacgagctcttcgctctggtcatgactgatccagatgctcctagccccagcgagccgactatgagagagtggcttcactggctggtggttaacataccaggtggaacagatccttctcaaggggatgtggtggtgccgtacatggggccacggccgccggtggggatccaccgctacgtgatggtgctgttccagcagaaggcgcgcgtggctgcgccgccgcccgacgaggacgccgcgcgcgccaggttcagcacgcgcgccttcgccgaccgccacgacctcggcctccccgtcgccgccctctacttcaacgcccagaaggagcccgccatccgccgccgccgctactagcctccctcccctcgctcggcgtcgcccatccatccatccatggacggcgacggcgacctagctagctaataagccatcggtcggccatgctcgccgtccaaactatcatgcaccatatcatgtcgtcgtttatgtggttaattaattatttccggcgttttatt

SEQ ID NO: 9709 - DNA, 1956 bp, Oryza sativa
  ref <308>: DATABASE ACCESSION NUMBER: AK107057
  ref <309>: DATABASE ENTRY DATE: 2002-08-28
tgatcgggacagaattttcacaagtgccttgtggcaagaattgttcaaactagctgatgtcaaactcaacatgagctcttcttaccaccctcaaactgatggacaaactgaacggctgaatcaatgtttggaagcttatctccgttgtaatgtccattcatgtcctaagcgcagtggtctaaatggttatcccaggcccaacactggtataatacatcctttcacagtgctctgaagaaatctccctatgaagtgctctttgcaaggaagccaactccttttggtcttattgatgttggaaaaagtacagtccctgatgtgcaaatttggttgcaaaacagagctcatatgaatgaggttctacatcaacaactgactagagcacaacagaggatgaaacatcaggctgacaagcatcgttctgagagggtttttgcagttggtgacatggtttatttgaaacttcaaccatatgtgcaaatgatagtagcacgaaggagttgtcaaaaactgtgttttatgtaattagcttactgtagccatcaggttttgtcactactctgtgtaggctttactgggttatgtgcttgtgtaggcttgatgggtatttgggccttgagctgttgtgtgtgtgtgttttgcgacgtgccgtgctgggccggcggacgcgtcgctgattgagttgccttgtacctttaaaaaggaactctcttgtctgagagagatatgaaaaaagaaaagaaaaatctctatcaatttctttcccaaatagctttgttctatctctcgatctcaaattcttctcgaaactctagatcgaatcctggcgagacgccacagaaatctcagttcgtgacaaccatggaatccaattgtctagacaaggaggtgaaggcactatgaaactcctcaatggacatgccacccagctcaaggctctgcaagttcttgcgaagagaaaagcggagagccgcactgctctattgatagcgttgttgaagatactcccacatcttcttagcagaagaaagatcaatgaaattcgttctaacggggacttcagcgctcatgcacaagaaggccatcacacactcatcattacgccgccaagctgcaattttcttctcatcttccttgtcatgaggtggatcatcattcaagtcagaggccacaccatacgacctgagttgcatacgagcagaggaagtccactcacggtaattttggccattgagttttatatccaacggcaaaagactgacattaccaagtggatctgatgccatggttgcaatctgaaagactgagctgctgctgcacttgaaacacttctactgcactgctgcaccgagctgctgctgctgtaattaggtactgtaatcagcaacaggagacccagcacatggcagatttgttggaaagagccctggtggcaagtgcagtagcaaaggatggaggatgcgggtcctgcaggctgcaactagccaacaccactgcagctagtgcagttggataatgcaaacctcaagcaggagaaaaggcagtcaagcagatccagcaggagaaaaagatgctccggccagaagaagagaggatcaatcccaaaaatcaagtgaccacgaaaaaacagaacacacagcagaaaacttccattgggagaagagaggagggaggacactcgccggagaccaaggccgatgaagagctcgctggcggcggacatcgatgggaatcgcaagagcaaccttgctctgataccatgtgacttgtgctgaatcagtacggtgtattccaggatagcaatagtatatacagcggtgtatgggcctcatgagccaatagtaaataagtctaaggctacattgatatacacatatctaacaaccaccacttccaattaagtggtgaactaatgaattttctttcacatcggtagcaacatgacctatttatcgt

SEQ ID NO: 9710 - DNA, 640 bp, Oryza sativa
  ref <308>: DATABASE ACCESSION NUMBER: AK107058
  ref <309>: DATABASE ENTRY DATE: 2002-08-28
ttttttttttctctcgtaattaaatttgacaggcatgggttcttccgtcggtgccactattttctactgcgtcgcattgtccatggtcatcgtgatgacccaattgccccccaccgaagcagactctgtagcagcggcagagttcgcgtcctccgacctgaaggcggacaagttgacctcgcgcaagctgatgggcgccgctaacgcgccggcgccggcgccgctagggatgtgcccagtgcggttcgacgagatgaaggggccattcaccgagctaggaaagaagtgcaaggcggcatcggtgacggagtgttgcgacgcgttcaaggagatcgcgtgcccacacaacacgctgctcaacgacctcaacaatgggtgtggggacgatatgttctacttcatccacacctacggccgcctgccgcccggaaccatcttcaagaaatgtgtcgagggaccctatgggatgaagtgctgagctcggtccatatcactccattgttgctagcttttggcctgatttgtactctacctaacaacaaatgaccctttcgctgccttgcaatgtaattaagaactgtgtataattaaacttgcttttattacttcaaaatgcattgcactacaaaaggtttattat

SEQ ID NO: 9711 - DNA, 1783 bp, Oryza sativa
  ref <308>: DATABASE ACCESSION NUMBER: AK107059
  ref <309>: DATABASE ENTRY DATE: 2002-08-28
gcaactaaaatgacagatgctaaaattctgagtcagatacctctgcaatcatccttgcaaagtacaatggatggcaggaattcatggtttctagatctgtccatctaggcagatcttcgtcttctccatcctcatcgccatcgtcgtcatcgactgcaaacacaccctcctgcaatgttttcagagatgcagcagtgtcaaggaaaatccaatcaccaattgcaattggcaaagtaatcaagaaccctgaatttcctgagaaggatttttcatcaccccatcaaagtcatcgtcaaagtcactctcctcatcatccgagtcgtcatcatcatcgtcgtcgtcatcgtcttcttgagcaaactcagtcgcagatgccgctgccagatccaagtcagcaaagacctgagtgttgtcaagccctatgataacatgctacaaccatgaaccatcatccaaaacaagaattcagtatacaacgaagataaaaattcagaaacaagaacgaaaaccggggaaaaaaaagggcgtaatcgtcaccgcagtcttgtcgtctcccatgatgctctccaggagggcgtcgtcgttgtcgacctcgaagtaaatatctgatgagagcagattgccacacatcacagcatgcagcttcaagaacaaaattaacagtgtctccagcaaaagtcacagagaaggagctaagctaagctagctagctgcatcaaagcatcagctcaagcatccggttttctcgcatacctccgttctcatcggtgaggtaggggaactccggcaggatgatcctctcgtgcacgccctcgtcgatcagcgtcgagatcatcaccgtcgccttgctgttcacctgcattttgttccactgatttcttggtgaaagcttgaagaagagtgatggttggttgtcaccaggcaatggccgtccggccggttgcgttgtgtaacaaaaactctgctttcttctaatacattgacgcgcaatctttttgcgcgttcacgaaaatgaagagagtgatggaagaattttatgaaaaaattttcagataattttgtgttatgtgtagacctcgacgatggttcgtgcggactcggcgtcggtgaggtgggcgggctcgccgtcgtcgacctggagcttctcggcgatctcctcgaacgggtggtagcggcctctccccggcggcagctcgtccatgtggtcctccggcgtcgcggcgccgccaccggccctgcattattactcgccgccatgaaactaactctctgctagctcatgctcaagctcaactctacaattaacgccggcaatggcagcatcgtcgacgcgtaccagcaatggtggctgcggcggcggctgctccggcgcgcttccccattgccccaccaggatcggcaccggcgtggcagcgagagctggagctgggcagtgaagcgggtggtggtggtggctcttgtcgtcgcggcgaagaagctagagctagacgacaccggcgctgctgtggcagttgccgccgccagaagcatggtgtaccatggaaggggggagggtggccggcggcgagcggcggagctgatggggagaggaggaggaggaggagatagttatttgtggagaagatagtttcccagcgcgcctctcacttcctatcccgaactgaagctttgacgcgaataatgccacaggatgagaagcggagcggcttcgcttcttgggccgagttgggccggcagttgttttatctgatggtacaagtctaatttctatcctattttgacc

SEQ ID NO: 9712 - DNA, 2273 bp, Oryza sativa
  ref <308>: DATABASE ACCESSION NUMBER: AK107060
  ref <309>: DATABASE ENTRY DATE: 2002-08-28
acccgcgcgcgccccctcctccccctcctcttcctcttcctcctcctccctggattcctacctctcgtttccccgagcagacgctcccctatcccgctgcgaaggagaggaggcggtggcggaggcggaggtggagatcgacctagctagctagctcacgatgtcgtggctccgcaacgcggtgcaccgcgcggtggaggcgagcggcgggcccctcctcacccgcaccgtccgctcctccctcggcaccgtcgtccaccacgccggccaggccgtcgcgggcggcgccaggctcatcaacgaccgcatcgggagccggagctacaagagcatgaggctgacggcgaagaggctggaggacgcggcgctgtcctacagaggggaggaccgggtgcagctgctgcgccggtggctcgtcatgctcagggagacccagcgcgcggccgcggcggagaaggaggcgaagcgcgcgggccatcctgatcaacacctgcccgtgttggatctgtatatggattacgagaccggggccgagccgatgaactttatccatgtcttcctctacagccaagcgctcgaatgcctcgttttatccatgattatggaattccctactgaagaagaagcctcgcttctctcagaagtttttggattgtgtcttcctggaggaaaggatgtccacaatgcaatacttagtagcataaaggagttggcaaagttattttcaacttaccatgatgaagtgttggcaaaacgtgctgagctgcttcaatttgctcaatgtgcaatctcagggttaaaaataaatcctgaaatttcaagattagatgatgaaatcttgcagctacaacaacggataaatggaatggacgctcttcgatctaattcgaccagtaggcgtagcaaagcatcacaaacagtcgcggagggtttcagaactgcagttaatgagattcgcttatgctctagaatggaagaacttgtattgatgaagaaatcaatgcatcatggcaactcattcgagacttattttgagaaggttaataaattgaaggttttgtcagaatcacttgcaaattcagctgcaaaagcagaaaggagaatcatggaaaataggctacaaaaggaggaatctcttattttccgagttaccaaaacaaatgaagttagtgtaactgaaaaggaaatactggctgagatctctgggcttcagaagcaaaaggatctacttgaggatgaactaaagaaagtagataatatactgaatgcggctgtaatgaagcttaaaaaaactagagaggagagagaccaattcgatgaagccagcaatcagattgtgctgcacttgaaagcaaaggaggaagaactgtcaagatctattgcttcctgcaaagttgaggcaagcactgtcggtgcatggatcatatttttagaagatacatggaagttgcaggctttgtatgaagaactaaggaaaaaacaagccaatgatgaactggacaagtgtgcgacttgctttgcaaaattgattgatcatcatctttatgcacgagtggaagagctgagcacttgcattgatagtataaagacctttgttgataacttgaaaatatttgataacagatcggtatcagcggaagatggaaacaatggttcgtccaagcaatcaaatccacgtaaataccttgaggaagaatatctggaagctgagaaaaaggtggtagcagcattcagtttggttgataacatcagagcaatatatttgtccaatcaagattatcaagccaggagagatgatcctgacgtgaaaaaactatttgccaacattgacaagctgcgggtcgagtttgaatcggttccacggccactgctgcaaatcgagatcaaagaaagagaagagagagcaaagcaatctcgttccttgcaggctgctcgctcatcaagacaagcaggacacgagtccccaatacctgctcaactcaggacacgcctgccatcagagtccgactcagaactggcgaaatctgacccagagtacagggagtattcggctgatgacataagtgggtgggagtttgatgaccttgaagatgatggggcaaggctttcagtgaaatctatataggaggagcatcaaatctgggctcaagtcctgaatagttcgtgtagggatagaatcactggcccaaaaatttggagaacgtgttgtagtggagtgctgtgtacaaaactgtacattgtagccttcgttgccgtaaagatttctttgcttc

SEQ ID NO: 9713 - DNA, 1996 bp, Oryza sativa
  ref <308>: DATABASE ACCESSION NUMBER: AK107061
  ref <309>: DATABASE ENTRY DATE: 2002-08-28
agcagcaatggtgtcctcccatgcagccatcgtcttcttcctcgtcgccgcgtcgtcgctcctctcatacggtgaggcggcgccgaagatgacggcggtggcggcggactacgggtacccggcggactacgggtacgcggcggggagcaagctggggccggagaactgggggaagctgagcccggcgtacaagctgtgcggcgacggcaagaagcagtcgcccatcgacatcgtcaccaagcaggccatctccaaccccaacctcgactcactcaaccgcacctacaccgcctccgacggcaccctcgtcaacaacggcaaggacatcttggcaagccatctaacctaactagctagacctacctacattgggattttttttgaatttgtttttatttttaattctaaaaacaaacatttctcattcatattttcaatatctgaaccttttgaccacgggttggcgtggcaaaataatactgccatgtcagtctgaatacacggtgtggtagaaataaattttcatgctggttttaggtgacgtgatatgttattttaccatggtaggcaggttggcgtggccaaaagattcagattttggaaataaatttaagaaaggtttgtttttgaaataaaaaaatttagaaaagttcaagaaaaaaataaaaaaaaattctccattgggaaaactctattcatcccttcaagagatatccccttatttttgcatgtcacttaaaaagtcattaaaaattttgaaaaaatttagtagcatatgtaatatgtcacttcacaatacatattcaaattcaacttgtacatatagaaacaaaaataacaaatttgactatgaatagaacgcataattcacggttaaatttattatttttgtttcgaattgtataagaattttaacttgcgtgtctgtgaaaagatatatcatatattgatctatcttgatgattttttttttaatttttcgataacgttttgaacgtcatgcacaaaacgagaggatgtcccccgagggacaaaaatccacttcccctgcattgttgcattatccaatggagctagctagcagagatttgattgattggcatatcgaaccatggcgcagatggagttcgagccagacaaggtggggacggtgacggtgaacggcaaggtgtacagcttcaggcgggtgcactggcacgcgccgtcggagcacaccatcaacggggagaagcacccgctggagctccagatggtgcacgctgccgccgacggcagcctcgccgtcatcgccatcctctacaagtacggcgccccggactccttctacttccagctcaagaggaagctcgccgagctcgccgccgacggctgcagcttcggcgaggagaacgcccaggtcgccctcggcctcgtccacctccgctcgctgcagaagcggacggggagctacttccgctacgccggctcgctgacggcgccgccgtgcaccgaggacgtcttctggagcgtgctcggcaagatcaggcagatcagccaggagcaggtcgccctcatcaccgcgctgctccccgccggcggcgcgaggccgacgcagccgctcaacggccgcaccgtgcagttctacaacccgcccaacagcaccatctccttcaaggtctagtagccccaggcccaatgggctttggcccatttatatatactatatgggttgcattgggctgcacaggccctgaaattgattgaaggatctcaatttttgagatttttcttgtttctggagagaaaaattcatgtactgttgcttagataggcccttatctatagtatagtaacatatgtatatgaatttaattttaggatttggaaacatggttgcttatcctcacttggaattaggcttttaaaagtcgagcacatgtgcacttgtttttcattcaaacattagcctgtcgcatagatagtctttttcttaataattagagctgatttgaatttt

SEQ ID NO: 9714 - DNA, 1817 bp, Oryza sativa
  ref <308>: DATABASE ACCESSION NUMBER: AK107062
  ref <309>: DATABASE ENTRY DATE: 2002-08-28
atccatcatcctcatcgtcgcgcgcaccactcgcccggtcgccccatccccactctggcactccagcgcccaaaaaccttcgcctccgcctccgccatgggagaccaccgcgccacggccaaggtccgcgtgaacggcgcgccggcagaagcgacgctcttctgcaccgacccgccgggtgcagctaatggcggcggcggagatggaggggagctccggtggcggtgcgctggtggcgccgcggcggagcgcgtgctgtcgctggacgcggacgtgctcggggtcgaggccaggggtaaggaggtggtcgtgaaggccttcgtgctgccggcggacgcggcggccaggtcggtgtcctgcgccgcgggtgcggggaagggaggaggaggacggaggaggcgcaggagggattacgtgttcgagatggccgccggcgaggacgccgccgcggcctggtgcgacaggatgaggggctccctggactctctcggccggcctaagagattgttcatcctggtcaaccccttcggcggcaaaaaatgcggaaagaagatttacgaggcagagatcaagcccctgttcgaggccgccggtgtcaacgtcacaatgcaagagacccggtatcaggggcacgcccggcaggtggcgtcttctcttgaccttgcgcgctacgatggcattgtctgtgtcagcggcgatggtgtcctcgtggaggtagtaaatggaattctacaacgaatggattgggaggaagcgatgaagataccgattggggtggttccagcaggtacaggaaatggcatggctaaatcgctgttgcattctgccagtaagacatactcggttccaaatgccgtatttgccattatcagaggttacagtcagtccttggatgtatgcaccattgtgcagggaaggaagaaatttttcagtgtcttgaatatgacttggggtttggtggctgatatagatattgagtctgagaagtacaggtggatgggaagtgcacgctttgatttctatgctttggttcgcataatgaacttgagaaaatactacggaagtattcagtatgttcctgcccccggctatgaggcatatggagatgtcgtcaagcaggttgagaattgcactgtagaatgccaagaacagattgggaagtctttgtgttcttatcaaggtccttccgttgagtttcaaggttcagaatggagatcccttgatggtccatttgtgtctatttggatcaacaacgtgcaatgggctgctgagagtatcatggcagctcctggggccaagttctcagatggctacatggatgcagtcatagtcagggactgtccaaaggctgatcttttagccctactgatgaagatgggcgatgggagtcatgtaaaatcaccatacgttacgtatctaaaggtgagatgtcttcggttatcaccaggccagcttgtggagaatccaaaacgaggtggcataatagacgtggacggggaggctatcgctagaggagaaggaacgtacggcaaaaaccagaaacaggacgtgatgggttatggcccttccattcagatgacagtgcaccgagcgttggccacaatgtattgtcccaaatgacccctctatctcctctctctcccgagattggagtatttattcgtgccaattgtttcgctctttgttagaaaaacctggtaatcttgagcagtattcattagaaatatcttttgaaaaaaagaaaacgctgatacaccattacaccttcgcatgaaacaacataactggattattttaactggaaatatgcataaatc

SEQ ID NO: 9715 - DNA, 1616 bp, Oryza sativa
  ref <308>: DATABASE ACCESSION NUMBER: AK107063
  ref <309>: DATABASE ENTRY DATE: 2002-08-28
cctccacattccaatcctcagctccgaacccatgcgatgcgtctgcacgccggcgcagtgcaactccagtatttcatgccccagcagggagccaccgccgccgccgccgccgaccaccaccaggccgactcggctaccgcgtgcagcgcctccacttcgccggccgccgccgccgccaccatgtgggagtatcatcaccagctgtcgacgcacgcggccttgcagccctcgtcctcttttccctacagttactggagcccctactccgggtcgacggcgctcgccggctcggccttcgccgccgactcctcctcgtcgtcgaccgacgtcatgcgtctcccggctgccggcgagcacgcccacggacacggctggagccacggcgaactaagcaacagcaccaccggcggcggctacagggagaacttcctcgatctgctcgcgtcgaagaacgtgacgccggaaatgttcgaggaagtccccgcctccgagcactacaatgtcgcacccgcggggacgaccctgacgacgacggcacggtcgttcgatcatcatgctcgctccgacgtctcgccgatcaagtacgagatcgccggctcgccgctgtacttgggtggcactaacaccgtcctccaggtccaggacatgaccatgatgagtagcacgccagcatgctacggcgaacaccaccaccaccaccatcatcagctgacgaaggaaggcagctgcaaccatcagcagcaggagcagcacgagcttgcgattagccccatggcctcatttctgcagcaaataagctccggcagtgctagcgttggcgtgcacaacagtagcctggattattcaggcttaggagatcagcctgacaagatttgctgccaggacggccgggaaatggaggctagtccttttggcatgaggagcttgccggatcttgggtcattcgccggctacacgccggccatcgagtcgacgtcggtgcaaccgtacatgagatgcgccaattcgtctgacagcaatcgacaagaacaggagactgtcccggcaaggagtagtagcagcggcagtggagcggcggcgactgatcgtaagaagaggaagtcagaggaaaggcaggaaagcactgtcaagaagtccaagcaagaggcttccaaagcatcacctcctaagcaaccagtgcctaaagtaaagctaggggagaagatcacagcacttcagcaaatcgtttcgccgtttgggaagacggatacagcatcggtactgtttgaaacgatcaagtatatcaagtttctgcacgaacaagtacagttgctaagtgagccgtacacgaactccagcaggagcaacaagcagggtaacagcgttccatggggagatcaagcagaagcgagcaagggagagacgatggagcatgacctgaggaatagggggctttgcttggtgcctgtctcgtggacgcccgaagtgtaccgggatggcaacgcgatggactactggacgccggcgtaccggggctgcctgtaccggtgacatctaactgaaatgcaatttgtttggagagctgaagattctaagacagctaatgagtattcagatagtgagattccagagaaact

SEQ ID NO: 9716 - DNA, 1986 bp, Oryza sativa
  ref <308>: DATABASE ACCESSION NUMBER: AK107064
  ref <309>: DATABASE ENTRY DATE: 2002-08-28
tgattgattgatttatttattactttttgctcttttccattgacattggtacacgattccatcgaacgtgtggaccatggaaaacaaaaaagatttttttttctttttgcggggaaatcaatcttttttagtgttgttgtgattgtcatgagccatggcaagttaacaacgtgggaaagaggagaccaagcaattaggcagaaaggaacaattagatgatgatattattgtcgtcgaagaaaatctctataaagtcaattccccttagaacaatatggcaatatctttacagtactgtcagtacagctacctctccaagaacagtacaaaagattatgtgtcagtgtcaatgacatatactcctgtttagagctagtcaaatcctataaattaattcatatatcttactgtattatcttaatttggtgttccatttggacaatgataatgatgcccaacatttctaccattcttcagctgcacagatgaaattaattacgcgctgcatgttccataaaaagaatacaacaaagaatacaacataaatagtagattgtaacgacgcataattaccttatacctctctctttctcagaatttaaggcctgatcaaacttgacaatagtctccaaaactaatatttttttcgcatgtactacctctatttcaaaatatctgttgttttagattatttagtaaagattaatgcttaaaaggaaatgaccatagcgccccctattaaatgatgtatgatggggagtgtgtcggtagtttagagtaggatagagaaaattttcaattagaggtaactaatgtaacaaaaggtacttttaagtgacaaagctttttgacaaaatttaaatcctaaagcgtcaatattttggtacggaggaattactacactgtctataggaacagagtcatagctataagaaagtatattcaaatgtcaatcccgaatccaataataccgttgtcaacaagtaaaatttaatttacatcaaactaattgtcagtaaaatattatattgtgatgaggaggagtgagtattttccaagcttcacacaacaatcgatttacgcggcgcattaatttaacgatctctgcatctgcattgcactactgtggatggttgatcattttgattgatcactttctctgcaaacgcatgaacacgtacgcaggcatgatcgccgggggttggctcaagtactggatcgaggtgggcgccgtgctctccaccatcggcctctactcggcgacgctgagcagcgccgcgttccagctcctcggcatggcggacctgggcctcctcccgcgcgccttcgcgctccgggcgccggtgttcgacacgccctgggtcggcatcctcgccaccgccgccatcaccctcgccatgtcgttcaccagcttcgacaccatcgtcgcctccgccaacttcctctacagcctcggcatgctgctcgagttcgccgccttcgtccgcctccgcgccaggctccccgccatgcccaggccctacgccgtgccgctccggggcctgcccgccgccgccgccctctgcgccgtcccctcggcgttcctcgtcttcgtcatggccatcgccgggtggaaggtgtacgccatcagcgccgtcttcaccgccgccggcgtcgcggtgtactacctcatggacctctgcaaggccagagggtggctcacgttcagcgccgctgccgcagaccgcggaggcagcggcgacgacgcgatgatgtaccggcgtcaggggagcacggcgagcgaggtcgtctgatgaggggatcgatcgtcgtcgacgccattgattccggcgttgcattgcaagctgtatatgctttccgatgtttgtttatctgtgtgtgtgtgcgcgcttctttccttgtgcagaagagcataggaattgagtgatttgtaacagtcttaattagtcgtagatgctgatcaaatcaagaaatgggttgcatatt

SEQ ID NO: 9717 - DNA, 1407 bp, Oryza sativa
  ref <308>: DATABASE ACCESSION NUMBER: AK107065
  ref <309>: DATABASE ENTRY DATE: 2002-08-28
atcaaaatcttgcagcacaccaatccattgaagcaaattaacatttctcttgcaaatttcgatctagctagatcatttgcaaagcttgtttgttgatcgatcgatgatggggccgaacgtgtcgtcggagaagaaggcgttggcggcggcgaagaggagggcgtacgtgacgttcctggccggcgacggcgactactggaagggcgtcgtggggctcgccaaggggctccgccgcgtccgctcggcgtacccgctggtggtcgccgtgctcccggacgtccccggcgagcaccggcggaagctggtcgagcaggggtgcgtggtccgggagattcagccggtgtacccgccggagagccagacgcagttcgccatggcctactacgtgatcaactactcgaagctccgcatctgggagttcgtggagtacgagcggatggtctacctcgacgccgacatacaggtgttcgacaacatcgaccacctgttcgacctcgacaagggcgccttctacgccgtcaaggactgcttctgcgagaagacgtggagccacacgccgcagtacgacatcggctactgccagcagcgccccgacgaggtggcgtggccggagcgcgagctcggccccccgccgccgctctacttcaacgccggcatgttcgtccacgagcccggcctcggcaccgccaaggacctgctcgacgcgctcgtcgtcacgccgcccaccccgttcgccgagcaggacttcctcaacatgttcttccgcgaacagtacaagcccatccccaacgtctacaacctcgttctcgccatgctctggaggcacccggagaacgtcgacctcgaccaggtcaaggtcgtccattactgtgcagcgggttcgaagccatggaggttcaccgggaaggaggagaacatgaacagagaagatataaagatgctggtgaagaggtggtgggacatctacaacgacgagagcctcgactacaaggaggaggaggacaacgccgacgaggccagccagccgatgcggacggcgctcgccgaggccggcgccgtcaagtacttcccggcgccctccgccgcgtaggcgcgctcgtcgccggcagtggccgccgtcaagtcttgatagctacaataataattggcgcttattaaggagtgctagctatgattaattaggggacatgatctgcataaacattttagtattgcagatatatcggtcatggtcttacttttgagtgtgtttttttttcttttgtttagtacgagggaacacccaaagtctgtattcagtttgtaaatacgtacgtatatggttggtctaactataaacagatctgcctactatacatgtacgttactgctgatacattttgtagttaataaaggtttttcttctat

SEQ ID NO: 9718 - DNA, 658 bp, Oryza sativa
  ref <308>: DATABASE ACCESSION NUMBER: AK107066
  ref <309>: DATABASE ENTRY DATE: 2002-08-28
aatgtgatcgtgacggcatacgaggaggtgccgcccgcgccgcggcgccgtcgtccggggagcggccgcgctggcgcgacgtcgtcgtcgtcgtcgacgacgacagcggaggtgaccacttggcagcaggccaaggcggcgccggcggcgtatcaggccggcgtggcggcgggcgcccggtacagaggcagcaaccggcgggcgctgctgctcgcgtacgcgcagcatcttcggcggcgtgatcagcgcggagctagcggcgagcggccgcgggtgctgatggagtggggcaaatggaagacgcaaggtcatcccggtgccggcgccggcggcgacgcggtgaggaggaggagaagcttatactgcagattccggctgtggaccagggcgtttctccggcgagttcggagaatcggggagaatgcgttgtgcaagaacaaggagatcagtcaaccggccaatgtaggataatatggttgatcgatcgattaactaattgccacttctgctagctcatgtgctgtgctgcttctttctggcgaatctagatgaaacgaataggatcaccaatgccaaacatatcgtgcattcgtgcgtgagaacttgtaccgactgtctctcgtacgtggagaactgctctattttctgagtttgcatt

SEQ ID NO: 9719 - DNA, 807 bp, Oryza sativa
  ref <308>: DATABASE ACCESSION NUMBER: AK107067
  ref <309>: DATABASE ENTRY DATE: 2002-08-28
acctccacccacgatctcctctcgctctcgccatctcgccgccggcctcctccaccaccaccgacgactccgactccgactccggctcgatctctcgcggcggcggcggcgatggcggcggggaaggggagccacacgcacagggcgttcctgctctgcaactacgcgctcctgggggcggcgtccagctgcatcttcctcacgctctccctccgcctcctcccgtccccgtgcggcctcctcctcctcttcctccacgccctcaccgccgtcttctccgccgcgggctgctcgggctccttcaccgcgcccgccacccccgcgcagtggcacaacgcccacaccgcgggcgccgccctcaccgccatcttccagggcgccgtcgcgctgctcgccttcacccgcacctccgacttcctcgccgagctccagtcctacgtccgcgacgacgacgccgccgtcatcctcaagatggtcggcggcctcggcaccgccatcttcgtcctcgagtgggccgcgctcgccctcgccttctccctccgcctcgacgacgacgacggcgccggcgactacgacaacaagaactgggccgccgcctcctaccatgtctgaaactctgaagccctcatcacctcctccactccactccgccattggtgcgaccgaagagtccattcttcgtgtgttgtttagattattagtagaattactctcatgattcttttgtactagtgatattttcatgtgtactcgaattcttttgtactaagatgcaaagcaaatatatattgctttaaagcgtttgct

SEQ ID NO: 9720 - DNA, 1881 bp, Oryza sativa
  ref <308>: DATABASE ACCESSION NUMBER: AK107068
  ref <309>: DATABASE ENTRY DATE: 2002-08-28
tcgtctctcacccattaacgacatgggctctccacgttcagccatggccgccgtgaacatacactaatccggccgtcgcctccaccagctgccggtggcggcgccgccgggcgccggtgtcaagatgccggagaagggcaccgtggtgatgagccggtacgagctcggccgctcgctggggcacggcacgttctccaaggtgtaccaggccaggagcctcgtgtccggcgagaccgtcgccgtgaaggtgatcgacaaggagaaggcgctgcgcgccggcgccggcatggtcgaccagatcgagcgcgaggtcgccgtcatgcggctcgtcggccgccaccccaacgtggtccgcctccacgaggtgatggccagcaggagcaagatctacttcgtcatggagctcgtccgcggcggcgagctcctcgccaggctggtcgccggcggcggccgcctcggggaggacgcggcgaggaggtacttccaccagctcgtcgccgccgtcgacttctgccacagccgcggcgtctaccaccgcgacctcaagccggagaacctcctcgtcgacgacgacggcagcggcggcggcggcaacctcaaggtcaccgacttcgggctcagcgcgctcagcgcgtcgcggcggcacgacggcctcctccacacgacgtgcggcacgccgtcgtacgtcgcgccggagatcatcggcgacaagggctacgacggggccaccgccgacgtctggtcctgcggcgtcatcctcttcctcctcctcgccggctacctcccgttcttcgattccaacctcatggagatgtacaagaagatcaccaatggcgagttcaaggtccccgactggttcacccccgacgcacgcagcctcatctccagactcctcgacccaaaccctacaactcgcatcaccatcgacgagctcgtcaagcatccatggttcaagaagggacacaccaagcggccggcaagctcgaacaccatgaaactcaacgaggaggagaaaccagcgaacgccgccatgaacatgaagccggcgagcttgaacgcgttcgacatcatctcgctctcgcagggattcgacctgtcagggatgttctgctgccatggccacagcagcaggacgcaggatcagctgttcgtcaccgggaagccggcgacggcgatcgtgtcgaggctggaggagatcgcggagacggagcacttcacggtgaagaagaagcagaagaagaggcaagaagaggacgggatggcggtgaagctgcaggggtggaaggaagggaggaaagggcagctcgccattgacgccgagatcttcgaggtttcgccgtcgtgctacgtcgtcgaggtgaagaaaacggccggcgacacgctggagtaccaggcgttctgcaacagagacctcaggccgtcgctgaacgacatctgctggacctcgccggcgacagcagcgtcggagaagaaccagctgccggcagtgtcggaggtgtcgccactgagtagtcctcggaattgatgtgacagattatctaggtgcagtggcagatattgatcatcagatatgtgctgtttcccttgttgtttcctttgctttgaattgttgttttgattttttttttattcttgtttgtgtttcataatgatcttgggggtagtggtctggtatttccaagttcaagatgaatttcaattattgtttttttctgttcttttgttgtgtggtggactggtggtttagtgttgattgttggacataggtgatagaatgtgttctccttttgcttaaattgcatggtccatttgtaaggtaaattaatggcatcacaccaccataatatccaatttatgaatgttttagaaatctcttttttt

SEQ ID NO: 9721 - DNA, 2474 bp, Oryza sativa
  ref <308>: DATABASE ACCESSION NUMBER: AK107069
  ref <309>: DATABASE ENTRY DATE: 2002-08-28
agctatggtaatgtacagttctaatttgaagttggaagattatatcactcccatttattgaatgtttttcaaatgaatactctattgtgctattttaattaagtatatgcatgtcaaggggtaatgcacgtgcaatgtgtcactgtatcaactgaataaacatgaacgtgtaaggacattagagctgtataaccaaattgttttctatatccaatgtggtgaaagttaattatataaagcaaggattacatgatgtcaatgtaattgtatatttagttacatagactccctccatccactaaagttacacctattacttttatcaccatgaccaagaagaacttaattaatcatgcatataacaaaaattaaggagcgtatacacgtatgcagctactgaatattaatattgctccttgggttctaatcaaagatttaatttacctctctatttcagttttcttgcatagaaactacaaataggaacaaattatttagaaaaactaaaatatgaaatatggctaactcttgggatggagtgagtatatctatctattgtatattaaaaatctattaaacttcctacaaatgctcataagttaccatgtgacacttctacaaacactactaggtcgccatgtggcactaggaattctataaaacaaacatctagccattgattttcatttaatctggtagagccattatttttaaccattagatctatctgataataggctatagtattactctgcaatgcaattctacaaatgagaaaaatgagatgctagcagatcactttttttccagttagagatgctagcaatctcacataagtagtgagcatagtgactctcagacaaagatacttcaaagttgtttctgtttttatattagtgaaatatttctgtgtagttatctttttgtcctcgggagcattcctagagtgacaatataagatgcaatgcaccatccgtctttattaacagaaattccaaagctccatatggtctatgaaactcaatttttacgtgaagaatttatatggagtgttgcataaaaaagtagcatttattattctacttctgtgtatataatgtcaaaacgtgccttacacgtgcacgataactagttatctaaaaaaagagcacacgaacactaagcatgactaggcggaagtgcaagcataacgaccagttcttccataagagaggggcagctcctgctcagatgcttgaagccgtcgctggcgacgacagcactcaggttcgccggtgagccaagaaaactgaagcacgccttcttcagcccgtcgcagtggtgctgatcagctagtgccaggatgttcgacaccgtgcttacaccaatgtacttgcataacctgttctcgcacatcagcttgagcctgtgcaggtcgtatcgatccgccgtgacgagcagatgctggcatacgacgtcttcctccgtctccatctccggcaacgagtcggtgtacacgaagcggagcaacagcttgaacacctgcgcctccatgtcttcaatgtgcacgactccatcagtgtcgccctccttcatcgagccgtagagcgccgccctgaacaccggcgaccgcgccgcgagcacgcaccggtgcgcggcgaacgtctggccgccgacctcaaacaccacatccgcgcccttctcggtctccagcaggtcgccgaactgctggtccatgtcggacgggggcacgggtacaaaggattcgacggggagtatctcggtcgtctcctcggtgcggatctcacggacgacgacaatgtcgcaccggatggtgaaagaatcgtccctaagatcatcggacttctcgagatctacccttttgatgaactccacatagccccaaccacaagaatcctcgagattaaatgtctttatgggcctgtatttcagcgaaggttgcttcttcacctggttagcgaaactaaacttgaacttggcctgcaccgtcaaacccatgttggtctcttcttcttctagtacgagaaagaaagatatgtaatcggcggtcttgacgtcatctccattggggtagtatttgatgttccagcggtggccgccgacggtgaacgggctcgaagggagaaacgagccggtgggggtggtggccttggtgagggagtagccgttgatcttgaagaggtgatacccggtcgccgtctcggccacgatggtggaggaggaggctgaccgcgacggcgggttgccacggcctacggcgggggacatggcagcacgctggctggtcctgtagggtttagaccggggaaagtgttttcacgtactcttccggtctccccttgttttctcaaaagatcgatgaaaaagaacatgtaaagaaaaatccgaaattaatagtagtcgaattgggtttatagcccagcgtacatgacctgcagccccatcgtttggcctaaacagccaaagaataagcc

SEQ ID NO: 9722 - DNA, 733 bp, Oryza sativa
  ref <308>: DATABASE ACCESSION NUMBER: AK107070
  ref <309>: DATABASE ENTRY DATE: 2002-08-28
agctgctacgagcaaggcaaagcagagccgtcagttgcggtcagtttccctgtcacctccaggcgtccaggaacatacacacacatcaaggtagtggtggccatggccgcgtgcaggtgcagcagccgcctctccctgcagctgcctcctccgtgcttgctcatcgtcctcgtcgccgcggcggcgatggtggcggcggcggcgacaggggcgagggcggcgtgggtggactacccgtcgggggtgccgtgcggggagacgatcccggtggagcagtgcgacccgggcgacgcggcggcgaacagcgcgtgcatggacgtgtgccactacggcggatgccggcgcggcggcgagtgcgtctccctcggcttcggccgcggccggggatgccactgcaagtgctagcagctgaactgagctgagctgatctctgatctgaactgaactgatatgctaatcaggttgagcaaagtagtagaagcagtaattaggagagaataaattaatgagcgctaagctgctgtttgtagatgctcgcttagctactgtcccgttgctggctgccttgctagttttcccgcccttttttgttcctctgttttttcctgatcttcgtgttttgcatgagttggtagcacattaggtttgcttttgtccgcgctgcctctctgtacaaaagcctaaggcgtgagctttgaaaaatgaaatcgccaggtgccttttgttttcttgc

SEQ ID NO: 9723 - DNA, 2730 bp, Oryza sativa
  ref <308>: DATABASE ACCESSION NUMBER: AK107071
  ref <309>: DATABASE ENTRY DATE: 2002-08-28
gaatcattgcaaatccttaaaataaatagaggacttatttaccttaacttaggttgcagctcagaacaacccgagaatgcaactgacgacacggacgattcgagagggagggagcacaccggaacgatgagacagaggagatagagtgcgccaccagctcggattcactgaagggagaccggcgacgacgaatcgcggcggcgctcgccggcggcgagaaaaggggcaaacggcggaggggcgacgaggattcaattcgaggcggtggaagcatctccggggttcaaggagtctgtttccggcgtcgggtggggcggaagagcaccgaggagggccggcaacgagcggcggcctccgggagcaggcggcaacggcggcgaggccatgccgggcgacggtgggtctagggcggcgtctacgcgcgttcgggagtgccaccgagctatcacgcagactagagggggcgagggagagcgaggaaggggaacgggaggaggcactaccgagccgggcgggcagtgatgggcggtcgacggcgcggggcgagttctccggccttgggccggggaaggggaagaagaggggtggccggagtcctcttcggctcctcgtgcgccggcttctaggcacgcgcgatggcgaggaggcgaaagcgacgagcggcagagatggttcggcggcaacgcggcaatggcgcgacggcggtggaggggcaagagcagagagagggggggagtggcttggcttttataggcggagaaaaggcggtttgggagggggaaccgacatagggcggtcgaggcggcagctggctctggtgctagggcgcggctggtggccacgggcggcaggagacagcggttgaggccgggaaaaggaaaaaagggagaggaaaaggggactctgctccttgcccaaaacgggatgagggacaaagggagagagagtgggggcagggagggagaggagctctgcctccattgtttggaaggacgcggcttggagcagcggacagggggtgacgccggtggtgaccacggaggtctctgcctcccggttttggatgctagcggcgtgcagcggcagagcggcagcgcgcgatgcagctggcgccagggcggtcggccaccgcgcaggagcgcgcgcgcgggttcaaacggcggcggcgggagttttggcgccggggtgagaagagggagagagctcggctcgacgatggctcacgcgcacgcgcgtgcggcgcacgtgcggagcgaggtaggggaaggctgagagagagaatgggccgagagagatgggccaaaggaggaaattggtccatccaaaatagagggaggcaaaatagacttcttccaagtaattgatttggagaagatttgaacatggaatttgacttggacttctggattggtatctggatgagaggaagggtctaggaagagatcaaaagagggaaaatttcgatattttgggggtcgggcgaaaatttggcgagaattcaaagagaggacttgaattttggaatttgatttggagacttgaatcggaattggaattcttgaggttggttattttgatggcgatgagagggaacaacgatggagattgaattgagatccatggcacgacttagactcatactcaaagaacaaaattttcgcaattaggattttgccgaattagtttttaacgtctcacggaaagcggagcgttacaaggtgaaaggaaaatatttcttggtgcttgcattgagcttcatcagtgaacttcagaaaaaagttaatcatttatttgactaaaacaataggggttgtgttattcctgaatccattcaaagtttattttactaggttcaggccagcctagatatattatgtactgtaggtaatgtttgctgtaaagtacttatgtgctctacataggctctcctatgtgtgatatgtcctcatgtggggtaacaagttaccatagataatatgaaatgcggtattactaccaattgtctaagccaggaatacaaggactcaccggccatgatcaagaaaaggtcgtggtgaggagcagcaaaataaaaatggccacgggcaatggttatggaactttcgaggtggcaagtggtaacttcacttcattctcttaatgtacaatagatttccaaagtgaaaaattacttcatcagtgaaaaattacaatagctaggctgcagacatggttaactttacttcattttacatctgacataaaatttactcatacagtgaaaaattacccgtgtttttgttggtttcccagctgctgaaatcaactcatcaacagaagcaacaacatagttatgttgtttaatgagataaagtggtctcaatgaagaacggaagatggcaagccaatgctcctactggtacagaagcaagccatcaactgacaatttgaggtacatcacctttgacaatacaagggctcccagtaataggatcattttctgaagacaagcacctatgaaggctacaatcgttgacaggctttgttaggagagaatccttcttttggacatttatttggaacacaatatgtgaactagcaccacaatttgtttgggagttttctttgctaaatcctttttataatcaaactatttctcttttattttcctcttataggagtaaaaagcaaatcgaggactaagcagtgtcaagtgacatgttcggtaaaaaatgtcatgacgagtggaac

SEQ ID NO: 9724 - DNA, 1804 bp, Oryza sativa
  ref <308>: DATABASE ACCESSION NUMBER: AK107072
  ref <309>: DATABASE ENTRY DATE: 2002-08-28
ctacattctctcctcgccgtcgtctcctcctcctcctcctcctccacatcgccggccggccgccgccatgggttgcggtggctccaaagaagctgtggccaccggcaacaccgtcggctccaccggcggcagatccagccgccgcctcttccggcggaagtccagcgtcgtcgccgccgccaacgccgccccgtctcacgcgccgccgccgccgtccgacgagagctcggccgccgccgttgtcaaggaaagcagtgtcaacgaagaggtcaaggggaagggcaaggcgacgccgaaagagaaggccattgatgaggagaagaaggatgtcgaggagagcaccacggcggccgccgccgatgaggtcgtcgtcaaggacaccggcgtagtgatcgtcgagaagacgacgacggcggcggcggccaaggcgacgccggcggccgtgaagaagatcgtcgaggagaagaaaaaggaggaggccaagaacaaacaagaagctgtcaccgatgataagaagaaggagaaggtgattccgaccaaggtcgccattgatgagaagaaagaggatgtagtagtgccaatgaaggaggagttcgtcaaggagaaggagaagatcactgacgccaagaacgacgtcgcatcaaccgagaatgtcgccgccgtcgatgagaaaattaaagcagaggaggacaagaacaagaacaagaacgacgacgaggttgttgccacggcaacaatggaggcagccgtcgaggaggaaggcgacgacgaggcggcattagccgaggacgacgacgacgacgacgacgacgagcagcccaacgacgacgaaagcatcaccttcgcggttgcccccgtcgccgaggacgacgaaggcagcgtcaccttccccggcgcccgtgcccggccggtcgtcgccaacgccgacgaggttcatcaggaggatgacgtcactagtgtcacctcgccgacgactgccccggccaccctggagaatgacaccagtagtagcgccgccgccgccttcccggccgctgtcccggcgccggtggccggcgaggaggtagcacaactagagcaacctagctcttctaagtccaacaatggcgaaatggaggcggtggccggagttgatcaggcagaagatgccaagaaggagacaagcaacattgaggcgatcaatgtcgaacaggaggagatcaaggtcgaggaggaggaggagaagatcatcgtctcacaggagacagaggaggaggaggagaaatccgctgtcatttcgagagatgagatcaccaaggtcgaagtcgaacgcgaggagatcaaggtcgaacacgaggagatcatcgtctcccaggagacagaggaggagaaatccattgccgtttcgaaagatgacgatgggcaatcagatgggaaacaaacaattgaattgaaggaggccatgacagcaacaaaaacggatgaaaaaggagaggagcaggtcgctaaggataaaaaggatgacgaacaagaacaacaagccaccgccgctccaattgagtcgccgaaacaagaacaacaagccaccgccgatccaattgaagcaccgctgaattgaaatttgaaaatgagacgcatcgtaccaaacaaaatgcattgctgcatgcctccacgaaatgtccaaattttctcccttcagtttattagcaagaaactgtacatgatgcttatctgttcttgttggttaaatacttcatcttcaactgagatggtgactgctagtttgtgcaatttcgagtatttaacgttgattagcatgtgctgt

SEQ ID NO: 9725 - DNA, 1957 bp, Oryza sativa
  ref <308>: DATABASE ACCESSION NUMBER: AK107073
  ref <309>: DATABASE ENTRY DATE: 2002-08-28
attggagagcgcggtctcctctcctccctccctgctcgcgctctcagtctcccccatccccaatcaccttactagcttagtagctttgtgaatcaatcaaggccagggtttgatcagatcatccttccctcccatttgcccatgccttggctttgatccgaccaggcatggagggcggtggcacgaggacgcgccgtcgcgccgccaccgcgagccctggacgcaacaaggtctgggtcgagccaccgggcaagactcatcacctgcgctcgccgcccccgcccccttccccgtcctcctcaaagagggtggccgtcgtctactacctctgccgcaatcgccatctcgaacacccccacttcatcgaggtgccactcgcctcaccggacggcctctacctgcgaggtctgtatccttctctttttcttgttcaagcttcagtttttttctttttccccttttcgatccctaccaatgatgcgggaggcgttgatgcagatgtgattaaccgcctcaacgtgctgcgagggaagggcatggcggcaatgtactcatggtcgtgcaagaggagctacaagaatggcttcgtgtggcacgacctatccgaggacgatctcgtcctgcccgcgcaagggaacgagtacatcctcaagggctccgagctcctcgaccgatcaccgccagatcgacagcagaatggcgttggcgagcccaaggttgagaccctcaagcaccctccagaagagtcccctcattcgcgaggatcgcaagaagggtgctcctcctcatcatctccatctgctgttacaaaagaggcctccccaccaccccctacaccacagccacagcagcaggcacaatcggccacgttgctgccttcatcgtcagcttctactaaccgtgaggatgaccaatgccggactccgcgctctggctcatctggaaacatttcccctgaaccggcaggaagagttgctcctccattatcagaggcaagctctccaggacctttagagtacagagtttgcaagcccatcggagcccaggacgcatccacacagaccgacgacagtgagagggatgctcctgagaggaattctcgtatggcaggagtatgtacagagaatagtacatcagattctgagattcaggaatgtcatccaaggagcacacaaccatctccaaagggtcctggagttgttcgagaatcaccaccggtgtgctcctctgacgcttctccaggtggtagagttgagaccttggagtccctgataagggccgaagccagtaggaggagtagctttagggcgctagaggaggaacatctctttgccccaatgggtgtaaagttcaagcctgccaatttgctcatgcagctgatcacttgtggctctatttctgttaaggatcaccggagctttgggctcatcccaacatacaggcctcggtttacacaagttgagtttccttctccaatgttctctactcctttggcattgcgacacctcgacaacattccttgtaatgctagaacaattggaatgagaattccagaatcagaatatttcagtggaagcttggtcgagacaaagaagcaggatgagtcagggaaaggaggaacaccaacacttaaacgctcatcatcttgcagtgaggacaggtatgtcatcgtctagcttattctgatattggactatggtgttggcaatatgcaattcaattcacggttacatgtcaagtactgtagtttatgatgtcgtatcttactgatacagtggcctttctcattgaacgcctgagctaacattggtaagttgcactaaatgttgaacatttcaatgtgttgtacagcataagttaatttctcaatgtccatcttgtactgtctatggtgtcctgtactgaaggcaggaaagaagaaaatagaacccaagaataagatagttcaacagatgac

SEQ ID NO: 9726 - DNA, 1927 bp, Oryza sativa
  ref <308>: DATABASE ACCESSION NUMBER: AK107074
  ref <309>: DATABASE ENTRY DATE: 2002-08-28
aaatcaacagaaaaatatctcctccccttctcctaaccatcgatccaatccagaccgagtcgccgtccgccgtccgccgtcccgccttgcggctgcgcgcacctacaccttgtgtcgcgctccctgcctccgtcccgcacggcgccgctccctgcctccaccccgtgtcgcgctctgcctccatcccgtgcggccgccggccatgcatctttgtccgccatggccatggagcaggaatgaataaaggaagctttctgctctctacttctccttcacagtatgaagcttaatttccgacatttctttttatggtgaaagatctcggtgttgttgtgttagcctttttatggggagatttcaggcttctctatgttttttaatcttttgaagatttcttggatggttttggatccatttagtcttgttgtgttcaatacttccattctatggatgaatggatgggacatattcacatggatatgaatcgtattacttgaatcatactttgatgtatcttgctccatcctgactttgatatcttgttcgggctcacgagctaaacgagctggctcgagccggcagccgagccgagcctgccttatagctcgtttggataacgagcctcagctagttatcctaccaagctagatcgagccgagctaagccgtgctggcttgatatccaccgctagcccattccaaggaagttgttattgccgtctctgagcctaagccaccaagataggcattcccatgatcccatcctcactccactgccgttaattatggggtgaagggggagagggtgggggtgggagagggatggtcgtctagatatgacacctcgaaccttcttcttgatgtgccacaggaaggagaggagagagagagagagagggaggatgagaaacaagataggtgatgagaagtcgttgatatgtgggtcaattttctataggagtcgatttgcaccgatttttaaagatgggagaaacgttatattcgattttatggatgaatttatggttgaaggagaaaaaaaggttatcccaaaaagtaaaggaggctaaagaaaaaaggaaagcaaagagggctatatgccatgggaggggatgatcgtcttccgcccatcgttctttccgtctggttttactgtgtctacctgacgtctctgtcgacgggaactccgtaaggtccgtcaaaggctcatcaagctgcacaggtaaaacacacacaagccgaagccggacgagagagagatcattttttctttcctttttcttgtgagaatcccctcgagttcctcggaccaaaggctgcgccgtccttatttatacgacgagtagtccactagaggaacaaattaagacacaagtggaagttgcacagctcctcctcgatccacccggcaccaaggtaaccccaaaatccctcctttttctgactcctctccttcctagatgcctaatattgtgcaagatccctgcaattgctgctgctgttcctcaattctgcattctcgatttcttaggttaggttacagtcagacacacacacacacacacactctctgtagctcgctgcttccttgtgttttggttatacgcgtggcctcgttctctctgccccctcatcttcccttctgtttcttcttcttcttcttcaattttggcaggagatttccccttcaattcggcggtgctaagtcctcaccaaaacgatcctcgattcaattcttcccttgtttctttcttttctctcttttgccacttgccctttcgctttacgctaaccaaaatatccattcgatttggtcttatccttctctccccgtacactgtttccctccttgtctgctgccaagtctagtggactcactctgtctctatccactgcaatttcctcatactcgttataaaacttaaaag

SEQ ID NO: 9727 - DNA, 915 bp, Oryza sativa
  ref <308>: DATABASE ACCESSION NUMBER: AK107075
  ref <309>: DATABASE ENTRY DATE: 2002-08-28
aaatcctcatctcctctcttagctaagattgtttgacaaaataatctctagcttctacatcacatcatatcacttccctctctcaatctttttctctcctatcctctcctcacactagcttagcttagcttagctagctaccatcgtcttcttcgtcttcggcgagatatgggtgagtgcagctacaacagcatgagcccatcgacgccgctgccgccgccgccatcggcggcggcggcgaagaagggctcgccggaggcggcggcggcgcacaaggagaggcccaagataaggatcatccacatcattgcgccagagatcatcaagaccgacgtcgccaacttccgggacctcgtgcagcgcctcaccggcaagcagcagcagcagcagcaagaatcggcagaaacgacgttgccgccgccatcgccggtggcggtgctcgacgaaaagaaggagaaggtcaccaccaagaagaggccggcgccggcggaggacgagagcatgatgaggaagaagaagaagaagaagatcaagtgcgaggtgaaggtggaggaaggccatggatttggctacgatcatcccgatcacaccgacctgtggatggatctgaatccgggagggttcttgagcttcttggaggaggaggacgtgttccaaggcatggctgccgacctgttccaatcgcctcttggttcatcgaggatggatttcgttggtgaaatgtacgcatcttaattagtatttgggattagaggttcaatttccttttggtttactttgtgagaatttttgcattttggttgagaggtttggatggtcttcaaaaaagaaaaagagagagagagagagagagagagaaggggataaacacaatggtgatgatggttaagtaagtattgcacccatggttgcaat

SEQ ID NO: 9728 - DNA, 865 bp, Oryza sativa
  ref <308>: DATABASE ACCESSION NUMBER: AK107076
  ref <309>: DATABASE ENTRY DATE: 2002-08-28
caaacaaacaaacacgcacgcacaccactactccatcagcagcagccagcgagcccgcgccgcagccacccgcgcgcgcgcgcggccggtgaggtgtgtgagatagatcgtcgagcgcgcgtacgtcgatcgtcgaggctggccgccgccgcgaggataccggcgccggtgcgcgcggtgatggcgtggtggcggaagaaggtcgtcttcccggcgcgccgcgcgtgggccgccgtctccacccgcgtccgcgcccgcaagccaggcagtggaggcagcatactgaagcttcacgaggatgtgcaaacctgtggatacaaggacgtgcaggtgatgttcgagattctgaaatccgagctggaggaatcacgcgccccgacgaagcagcgaaagccgccggcgtggaggccgccgtcggcgtggtccagccggtcgtcgtcgatcgcggccgcgcaatagagacgtcgacggccatgacacggacacgcggattggcagacaccggctaataataagaagttaagaacaccaactttagtactacgtgatagctattagtttcgtacttaaatgtctaatcgcagttgtcaggcatcatcatccatccccctgcccgtctatccggcaaaagagcgaaaattttcggtagcatcaggtcataagcatctgaaagtctgaaaaagaaaaactgtacatactacatggcggttgcgctgaattctcgcaaactctggaggaaaagatggagtaagaggggtttatttttcaagtgtattttctatcctgtttacctatgattcatgatgtatcgttttatgttctgttgaagaatctctgaaatgaaagatttttcagtatgtgcctc

SEQ ID NO: 9729 - DNA, 629 bp, Oryza sativa
  ref <308>: DATABASE ACCESSION NUMBER: AK107077
  ref <309>: DATABASE ENTRY DATE: 2002-08-28
atctccctttctctcccccggcctggtagcgtcgtggtcgtcgttgcccatggccaccagacgccggcgccggcgctgccgcctcgaccgccgcccccaccgccaccgccaccgctcctgaccaccggcgagctctagctccttccccgtgcgcagacggcctgcgagctcctgcccgcgcgcggacggccgacgagctcctcccccgcccgcgaacagcctgcgagtcgccgtcgccatcgtcagctccctccgccatccacggcgccgacggcctccttctgctgcgcgcgctttaggaagatcacatggtgctcgtacgctgccagcgccgggataaccttgcggaggagctcctccagggcgttgatggcggacgcgaccttgtcaaggaagccagcgagcagggacggctgtgggcggaggtggaacatgccggggtcgttgtcaccggcagcagcggcgacgatctggctgtcacaggcgaggtagaaagtcttcccgttgagagacccgataacgtcgcggaggttggcaaccatcgttgggtcgaccgccgccgtgtctaggcgaaccaggagcaacacgggcaccaccatcgagatcgatccgacctagctagctagctc

SEQ ID NO: 9730 - DNA, 2432 bp, Oryza sativa
  ref <308>: DATABASE ACCESSION NUMBER: AK107078
  ref <309>: DATABASE ENTRY DATE: 2002-08-28
taggaatggatttcaatgatgcacggtcaaaatctcaaattcttcatgtctttccatttaattcggagaagaagcgtggtggggttgcagtacagtcagatgctggtgttcatgtccattggaaaggtgcagctgagcttgtgttatcatcttgcaaaagctggcttgccctggatggttcagttcagcccatgagtgctgagaagtataatgaatgcaagaaatcaattgaagacatggcaacgagttcattacgatgcgttgcttttgcatattgtccttgtgaaattgaaagaatcccaaaggaagacatagctgattggaagttacctgaggatgacctgactctgctttgtattgtgggtataaaggatccttgtcgcccaggagtgaagagtgctgtacaattatgcaccaatgctggtgtaaaggtgcgcatggtcactggagataacattgaaacagctaaagccatagctttggagtgtggaatattagatgcaaatggagcttttgtggagccatttgtaatagagggaaaagtgtttcgcgagatgtctgaagctgctagaggagatattgttgacaaaataacagtgatgggaagatcatctccaaatgacaaacttttgcttgtccaagctttgaaaagaaagggtcatgttgtggctgttactggtgatggcacaaatgatgctcctgcattgcatgaggccgatataggtctctcaatgggcatttcagggacagaagttgccaaagaaagttctgacattataatcttggatgacaacttcacatcagttgtgaaggttgttcgctggggaaggtctgtctatgcaaatattcagaaattcatccagtttcagcttactgttaatgttgccgcactcgtgattaatgttgttgcagctgtgtcctctggtgacgtgcctctaaatgctgttgagcttctctgggtaaatctaatcatggatacactgggagctctggctttagcaactgaaccaccgacggataaccttatgaagagacagcctgttggtcgaagggaacctcttgtgactaatattatgtggcgaaacttgtttgtccaggccatttaccaaatagcgatccttcttatctttgatttttctggaagaagcatactgcggttacagaatgatagtcgggaggatgctgagaaaacacaaaacacctttatcttcaacacctttgtcttttgccagatcttcaacgagttcaatgcacgcaagcccgaggagaggaatgtcttcaaaggaataacgaaaaaccatctcttcatgggaataattgctataactactgtatttcagatactaattattgagttcctgggaaagttcttcaaaactgtgagacttaattggagattatggttggtctcagttgctattggcattataagttggcctctggcatatctggggaaattcattcctgtgcctgtaagacctctccaggattatttcaagcctacttgttggagaagagcttcacggcgagatgaagaggagagtggacagagctaagaccggcaaatattcagtgtaaatatccaagggtcaaagaaaaggacaagatattgtttttgcaggcaactcctgtagtggaagctttgcatgcagcgccgggtcaagtgacaccctaatcgttgatatttggcttcacttgatcggagttaatataaatcaaattctaactcggggaagcaatctttaacctcgtgttatttaaaggggttcataaaactgtacatgttttaatatatagtagctgaactgaacctgtatctatgagtctacaagtttgctctagttcagctgtaggatttgaggctcacgtactcgaagctcaaagtccatcgaggttgaggaactcgtcggccggatccagcaacggcggcggcgactgctcctcctgctgctgcggcggcggcggcggcggcggcgacggcaatggtggcggaggaggtggaggtggaggttgctgggaggaagcgacggcgatggcgaggtgagcctgcgtcctggccagctcgcactggacggctcggatctcctcctgcaggcggttgatgatcccggtgcagccgtacaccgggtcctgcaccctccagtacgcctccatcgccatcgtgttcgccgcgttgcccctctccgccatcggcaagctctagtacgtacaaaaaaaaagttcacgaagataaatcagtcatcaataaaaagttagttaatatgcttgaaaatatgttatgggtaaacataacatgaatccctttaggttactgcatatccatatagtcacagcaagctagtgacatgtgagtatgagttcatatgttagtgactatccgatatggatcagacgttacccactttcatcacgacaactatctattccgaaat

SEQ ID NO: 9731 - DNA, 929 bp, Oryza sativa
  ref <308>: DATABASE ACCESSION NUMBER: AK107079
  ref <309>: DATABASE ENTRY DATE: 2002-08-28
aggtgtactttttccttctgtctccaccctcatccagcgatccaaagcccaacacagcaatcgagggtttcggcctcgtcgtccccgccgccggcgacaagcgacggcgagcgagccagcgaccttctccctcgcgcgccgcgccgcttctccctcggcgcgccgtgccgccggtgacgtctccgtgatccaggtatgaagagggcggcgccgtgggaggagccgctggaagtctcctccgacgactccctgagctcggattccgacgatgaagccgggaaagggaaaggggacaacgccttcgggctgcccaattccaccaaagctgccgcaccagacgctatgtcgaagaagaagaaacctggtggtgtggatttcaatgctttgagccggcatgggtatcgtggcggcccatctgtcttgacggtgccccctccaaaggttgagcctaactggtcttggtccaccgggaaagatcgcaacgacaaagaagatcaaactgaatcctatgaagaacgggagcgcacaagaactgcagtaactgagggagaaaagcttattggtgtgcgaaacccgcagccgaggcagatggagaaagagaataaagatgcttccttctcacagaaggaaaagcggaagagagatcgtggccaggctagcagggggaagaactacgttgaagaagagaagcgacttctgagggggagtggcgtctactctggctttgacacttgatgctctgttttctgtgcctttgtttgacatgcatagtaaattgttttgtgcttgtgctatttgatgtgtgttggtagttcgtgcttaatcctctgcttccatatctgtggcgttgtactgattgaattgaattcatcttggatcattggcataccgtgtcccatatttgttggtaatttactaactttagatgc

SEQ ID NO: 9732 - DNA, 1131 bp, Oryza sativa
  ref <308>: DATABASE ACCESSION NUMBER: AK107080
  ref <309>: DATABASE ENTRY DATE: 2002-08-28
attctttcaagctccccgtccaaccgatcgtacgtctcctcagctcatccgcttgcctcgtcgctgctgctgctgctgatccacaagcgttcgtcggagatgaacgacctgttctcgtcgagctcgttcaagaagtatgcggacgcgagcccggcgagcggcgtcggcggcagcgacatggaggccggcggcgagggcgtggtgaacctggacaggttcttcgaggacgtggagggggtgaaggaggacatgaaggggctggaggcgctgtacaagcggctgcagtcgacgaacgaggagacgaagacggcgcacgacgcccgcgccgtgaaggccctccgctcccgcatggacggcgacgtcgagcaggtgctccgccgcgccaaggccgtcaagggcaagctcgaggccctcgacagagacaacgccacctcccgcaaggtccccggctgcggccccggctcctccaccgaccgcacccgcacctccgtcgtcgccggcctcggcaagaagctcaaggacatcatggacgacttccaggggctgaggacgaggatggcggcggagtacaaggagacggtggcgaggaggtactacacggtgacgggggagaaggcggaggacagcacgatcgattcgctcatcgagtcgggggagagcgagtcgttcctgcagaaggcgatccaggagcaagggcgggggcaggtgatggacaccatctcggagatccaggagcggcacgacgccgtcaaggacatcgagcgcagcctgctcgacctgcaccaggtgttcctcgacatggcggcgctcgtcgaggcccagggacaccagctcaacgacatcgagagccacgtcgcgcacgccagctccttcgtccgcaggggcaccgtcgagctcgaggtggcgcgggagcaccagaagagcagccgcaagtgggcgtgtgtcgccgtcctcgccggcatcatcctcatcgccgtcctcatcctcccggtgctcatcaacctccgcatcttgacgctcagatgattcattcatcatttcctccctagctaacctgctaactcagatgtgtcaaattaatttatctactattttttttctccatcatgtatgttaatttcgttttcgttt

SEQ ID NO: 9733 - DNA, 1993 bp, Oryza sativa
  ref <308>: DATABASE ACCESSION NUMBER: AK107081
  ref <309>: DATABASE ENTRY DATE: 2002-08-28
atctggcgagcggcagctaacctccacacggatctggcggccggccaccctcccccctcgggatccggctcccctccctcctcttccttccctccccaaattcggcggaggggaggggcgtcagcagcggtgcggccggaggggagcgcagaggcctgtgggagcgcggatccgacggtcggccgccctccccccgcaggatccggctcccctcccctccccttccttctctccccagacccggcggaggggaggggcgtcggcggcggtgcagctggagggagggcgaatccggccaccgtcgacgagggtgggagcggtgtcctcggccgatgacgtcgacggcggtggcggcagggagcggcggcgccgccgccaattctaggttttcatgtttttttgaattttttttcggatttctgtttttcacacacgcaaaaaccaattctaggcgacataagcacccacacgcaaaaatcacgattttgcagatccctgggtgcatgcggaccgtccaccgcacgcgaaaactggttttgactgtgcagaaaaacctttctagtagtagtgcgcaagagcaagttggatactttaaaaagggcttcagtaattatttttttttggacattggcggaatcaacaaattcttagacggctgacaaatgcaacgtgtccaaaacaagacaaagatttttcacacacaacatgcaacacactacttaaaaaaaataatttttcttagcatctaaaatcaatctttgctaacggataggctagcctcctacgaccaaaggccagagaaaatcaaatattttcataggtgggacttcacccgccatcacaatttatttctactagcagtatgtcatgcggaccgccagcgacaatcggtttcgttggcatatgtgttatgacagccgcatgtgaagctcatttttggtatttttttcttttttcgaaaatatgcacatgcatatgctctctgactgccagcaaagaagttcaaagaaaaattgaaaatgcccagatgcagcagccctgcattctcaatccacattgcaaagcaaatccaacgacaagaacatgtcacaatagaaatccacatatcaatgaccacaatttccaaaaaaaaaaaggttttccccatgcatctccaatgctagccgtcgaagatcaaccttgcctctatcattgttcttaggcccaccaatgggactacgcgcggaggtcggcgagagagacggagtatgcactcgacgaggaagtgcattgctggccagtcggtcgttgtcgccagatccaccgcctctccatcgttcgagcccgcccgcctactgccaccgccgccagatccgagcgaggggcagctgcctctgccggatcccgggggaggggggagggtcgctcgccgctcccggtcgcctgccgccgctggagctgaagaaggcgaagaggttggagccggaggagaaggagaaggaggcggcgccggcgccggcggtgtggcttgcgggggcgcgagctcgacgcggtcgcgcggtgctagctcttgagtggaagataagggggaatactgagaggaggagaggaaagtgaggagaagataagggggagagaggagaagtgaaacttgaatgtttttttgaacatgttgagagggaaagaggatttttccgggcgggcctgttaagagccccacgtccaaaaatagagtatttttccgtgtgggcatattaagaggcccgtctacgaaaattgatttttacgtgcggtgagctgcacacaaaaatggaggacgattttcgcagacgtgaccagttatggtccgtctgcaatctaaatgagtccctgtacaggaaaaatcgttttttatagtgatatttgcagtcagaaatgtatttttttttcatttttctttagcttttgttgtatacttaaagtactcctattataatataacgccaagcaacctatttggccgttgaaaaaagat

SEQ ID NO: 9734 - DNA, 1984 bp, Oryza sativa
  ref <308>: DATABASE ACCESSION NUMBER: AK107082
  ref <309>: DATABASE ENTRY DATE: 2002-08-28
gagtcgaggaggcccccatgccatgcgcctccctagcggctatggccacgcctcgagcacctgatcgagcttcatttagttgatcgatctgaaaattaacgaaacaagagcacattgtctctacaacttcttttttttttaaacacggattgatgagttatcgaaatgacgaatgaatccctgatcgaagcatcttttccccgcattgtgcagatcgaatttcaagctttattagtagtaatgggcggtgcattccagcgccaggtccggcctccaccactggtggatcccgtgcgccgccttgaagtccggcgacgcgccgcggttcaccgtcaggacggcggacgggaacaggtgcagcggctcgcatccacccgccgtgccgatgcccagcagcaggtccttcaccgagttcctcgtcgccaccctccccacggcgcccgcgccgatgtcctccatcttcttccggtggtcgaagtaccccacgtactcggcgctgatcgggtcccccgggttgacgaacacgttgggcacccaccgcgccagcgccgcgaaggcgtcgtagcctccgccgccgctgccatggtgcaggagggtggccgcggcggcggtgacgaagctgttggcgatgcggacgccctgcctcacccgcctgtcgccgatcctctccaccggcgccgacgggaacggcgcgttgaagaggaacatggggagggcgacgcccgccctggccatggacttggcggcgagcgtcgagatggcggagcccagggagtggccggccagccagacgcggtggtgatgctgatgccccgccgcggccacgacggcgtggacggtccgcatggcggcgtggaagcgggaggtgcggtcgaggccgttgcggacgagctggaggtcgagcgccaggtcccgggacgccgaggccttcttggtgatggtgccgcggaacgcgacgacgtagtgcggcgcgctggcagcggcggcggcggcggggtcgaggaggtgccacggcggctggaacgcgtagacggcgccgaagatggaggagtcggcggcgtccacgagcacctctcgtacctcgaagtggaagaacctccaccacgccggcgcgcgggcgtcgtggccgtgccggttccactgccggtcgcgctccatgacgtacacgccctggacgaggctcgccatgacggatcgctggtggtgcgggcaattcctggccggaggaaaaccatcagaactcaaagcacactgctgaacaacacaaactccaagattctgaaacgtcttagcaacatccccttgtggatcagccactacttcaggaattccagtatctccagacgctgaaagctgtaaattataccaaactgtgatcattgcactcacttttatccttgtacaagataggtgggattgagcttacagttggccgtatcggcaaatcgaagaggtgaggtattccaaactgctgcacaacctgaaataattgcaatgctgacgcaattcaaaaaatattcaagagaatgtgctaaatgtgcatcaaaacttttcttgcctgagctccagaaccttgcccaaatgggtaaaatcgttttccatcagcatcgaagtagcacatgttctcaacaactgcaacgcacggaaccttcacaaagaagatgaagatgaagcagaaacaaattgatgcacgaatagtaagcacggtagattacaattaaaatgaacagtgatatgaagattacacaccttcagcttggaaaacattctaactccctttgcaacatcgatgaaagcaagcttctgaggggtggtaacaatgacagctgcagtcaatggggctacctgatgtttcagacatgttaaatttcacagtgcctacaagcatggttgatgttaccacgtgtgatttgtacaatactcaggctagaggtaccacctgacagagtgttaagtgtatatctcctgttcctggaggcatgtc

SEQ ID NO: 9735 - DNA, 1935 bp, Oryza sativa
  ref <308>: DATABASE ACCESSION NUMBER: AK107083
  ref <309>: DATABASE ENTRY DATE: 2002-08-28
aagatggcaacaccctgatctctagcttagctgcagaggggagaggaacctcacatccaaactcctagctacaacttgtactagcatcctaagcaaccaagcacaaccaaagcaagcaagcacgaacaattctttcttcctctctacctctagctgctgcctgcctcctaatcctcctacccaccactccacatgagcccatgctgtgtgcctgtgtctgtgtgtgtgttctactcctaccatgagagaagagaccaagcatcaaccaagctagctagctcgtcctctcctcgatctctacttctctctcccacacaagctgagcgcccaggtaggctgcctgctaggtctcgtgcatggccggacacatctgatcatagcccactacggcactattccccccttccgcctcgcacgctgagaggtggccggagagggagggaggccagcgagcagcagtagcagcagcaacgcggctaggagtaaggagtcccatcagtaaagcatgcttcctttcttcgattccccaagccccatggacataccgctttaccaacagcttcagctcacccctccctctccaaagcccgaccaccaccaccaccaccattccaccttcttctactaccaccaccacccacctccctccccttccttcccctccttcccctcccccgccgccgccacgatcgcctcgccgtcgccggccatgcaccccttcatggacttggagttggagccgcatgggcagcagctggcggcggcggaggaggacggggcaggcgggcaaggcgtcgacgccggggtgcccttcggcgtcgacggagcggcggcggccgcggcggcgaggaaggaccggcacagcaagataagcaccgccggcgggatgagggaccggcggatgcggctgtccctcgacgtcgcccgcaagttcttcgcgctccaggacatgctcggcttcgacaaggccagcaagacggtgcaatggctcctcaacatgtccaaggccgccatccgggagatcatgagcgacgacgcctcctccgtctgcgaggaggacggctccagcagcctctccgtcgacggcaagcagcagcagcacagcaacccggcggatcggggcggcggcgccggggaccacaagggcgccgctcacggccacagcgacgggaagaagccggccaagccgagaagggcagcggccaacccgaagccaccgcggcggctggccaatgcgcaccccgtccccgacaaggagtcgcgcgccaaggcgagggagcgggcgcgggagcggaccaaggagaagaaccggatgcggtgggtcaccctcgcctcggcaatcagcgtcgaggcggccaccgcggcggcggccgcgggggaggacaagtcgccgacgagccccagcaacaacctgaaccactcatcgtccaccaatcttgtgagcaccgaattggaggacggctcctcgtcaacgcgccacaacggcgtcggcgtcagcggcggccggatgcaagaaatctcggcggctagcgaggcgagcgacgtgatcatggcgttcgccaacggcggcgcgtacggcgacagcggcagctactacctgcagcagcagcatcagcaggatcagtgggagctcggcggcgtcgtctacgccaattcgcggcactactgctgatgtgatcatccatccacacacgaacgaacgaacgaacggtacggcactaagatcgaactcctgcagctacataattatcctttgcttctcaagagtaataattcttgacgtgttaattaatccgggtgtgtattaattccctctttattattttttctcgcgtttatccggagttgactgtggtgaagacgaactttggtttggtcatcgcatggtgtgcattgcatatatagctagcactatcgtctgatcgatgattcatc

SEQ ID NO: 9736 - DNA, 1893 bp, Oryza sativa
  ref <308>: DATABASE ACCESSION NUMBER: AK107084
  ref <309>: DATABASE ENTRY DATE: 2002-08-28
aatctgaatttccgggaaaattgagaaaccatggagaccgcgcatctagcctacgtgctcctcttcctcgtcaccgccgtcctcctcttccatctccggcgaggcggccggtcagctccggcgaagctcacgacggcgcaccgcccgcacccgaaccccgtcctgggcaacaccgtcgagttcatccgcaaccggcgccgcttcttcgactggtacaccgacctgctgcgcgcgtcgccgtcgggcgccatcgaggcgtggggcccgttcggcgccggccacgcggtgaccacggcgtgcccggccgccgtcgaacacctcctgcgcggcaacttcggcaactatgtcaggggggcgagcttccgcgccgcgatgtccgagctcatcggcgacggcctcttcgccgccgacgggcgcctctggagcgtccagaggaaagtggcgtcctacgccttctcctcccgcgcgctccgccgcttctccgacgacgtcctcgccgtgcacctccgcggagggctcctcccgttcctggacgccgccgcggcgtccggggaggccgtcgacctgcaggacgcgctccgccggttcgccttcgacagcatctgccacgtcgcgttcggcgtcgagagctcgacgctgctcgagacggcgagggaggactccggccgccacgaggccctcttcgcggcgttcgacgccgccgtcgagatctccttccggagggcgctggcgccgttcaccctcgtgcggaagctcacgggcctcgtcaacgtcggcagctcgcgccggctccgcgaagccatcggtgtcatcgacgactacgccatgtccgtcgtcgaatccaaggaggcggcgtgtcgcgatcgcgatagcgaggacgtggacccggacctgctgtcgcggttcatggcggccatggacgaggaggacggcggcgagctgggcgccatgttccccacgccggaggggaagcgccggctcctgcgcgacgtggtcgtgagcttcgtgctggccggcaaggacacgacgtcgtccgccctgacgtggctcttctggctcctcgccgcgaacccgcggtgcgagaggcgcgtccgcgacgaggtgtcgcggtcgcccgacggcgacggcggcggcgacgcgaaggggatgcacacgcactacctccacgctgcgatcacggaggcgatgcggctgtacccgccggtgccgttcaacgggagggtggcggtcggcgacgacgtgctcccgggcggcgcggcggtgcgcgccgggtggttcgccaactactccgcgtacgcgatggggcggatggagaggctgtggggcgagggctgcctcgagttctcgccggagcgatggctccgcgacggcggcgagttcgtggccgtggacgcggcgcggtacccggtgttccacgccgggccgagggcgtgcctcgggaaggagatggcgtacgtgcagatgaagacggtggcggcagccgtgctgcggaggttcagcgtcgaggtggcggcgccggctccggccatggaatcgccgccggcgtacgagatgacggcgacgatgaagatgaagggcgggctgtgggtgcggctaaggaagcgggaatagtcagtgtgagtgatttgatgccacttgttgttcttgtttgactaagtgaactcttgcatcaggtgttgacgggaaaccgttttaaacactcgttggacattcacccgtttcttacatgtcatctaaataattatggaaaatttttaaaaaaattgacatgataggttaatatgtaatatattacttcacaaatatacaagttcaaattcgtcttctatgaattgtaacaaaaataacaattttgactgtgaatatacgtatactaattagagtttaatttct

SEQ ID NO: 9737 - DNA, 899 bp, Oryza sativa
  ref <308>: DATABASE ACCESSION NUMBER: AK107085
  ref <309>: DATABASE ENTRY DATE: 2002-08-28
tagacgtgatcgacatcacacatgcagcattctccattgttgaaggcaacggcgatggtgccgtgaacgatgacgcggcaatctccatggtccagaggttttgggactctgcaatggccttgggacccctagacgatgagattgaatcacaatcccagataagcgaggcatcgaggtcgcagatgatgtcggacatccacaacgagcagtcgttctcgttcaagctccaggacaggcgaggacggatgcaccggttcagctgtgaggtgcagagcctgacgccgttgatcacctgcatcctccagcggctcggccccgacctcgaccgcgaccacctccctcaaatcctttacgaagacgaagaccgtgacaaggtggtgctggcgtccgacgacgacctcacggcggcggtggaccacgccaggctcgctggctggaagggcctgaagctgtacctggactactccggtagctccggcgtccgtaggaagagcgtggttcccagcgtcggggtcgggggcggcggcggcggccgcagcagtggcggcagcacggcggtgatggacctgtcgagccgggacgcgtgggcggcggcatacagcggtgtggccgccggcgccgccctggtcaccggcctcggcctgatggcctatctccggagagctagctgagttccaagagttgaaggtttacaaagtgatctttcagaaagcttagacgggccgggctggaaaaaaaagctgtatggtcatgaaggctgggctgagctgggccaaaagcccaagatgtatgatgaatatccttagatgggcttgggctaggcccatcagaaaggggtggaaatgaaaccattgtgtatagatgaaagtggtttgatgaaagatgaaagggttaattgg

SEQ ID NO: 9738 - DNA, 820 bp, Oryza sativa
  ref <308>: DATABASE ACCESSION NUMBER: AK107086
  ref <309>: DATABASE ENTRY DATE: 2002-08-28
tctctctctttcctccccgtttcttgtcctccgaatcagatcgaaacagacagcggccaccacattcttccaggttccaatctttgattagttggttgcgtctctaggctgcagcaacacgaggtgatcgatcgatgagctactacaatcctcacgcccatgtcggcgtccccccgccacaaggatacccgccgccgccgatggatgcctacgggaaggccggcggcgtcgacgatcaccacctccaccaccaacatcatcagtacccgccgcagccgccgccgccgatggatgcctacgggaaggccgttggcgtcgacgaccaccacctccaccaccaacaccatcagtacccgccgcaggcgccgccgccgatggggtacccgggggcgcacccgtaccctcctccgccacagccgtacggatacccgccgccgcagatgtacccgccgccgtacgcgcagccgccgccgcccccgccgcaccggcacgagcgcccctcgttctgccagggatgcctcgcggccctttgttgctgctgcctcctggacgtatgcttctgacgacgaggagagacgatcgaattaccgaatgcaaagccctgctaaaatggcgtgctcggagggaatctacacgacgacgtacgtggatggtcctttctacgtcatcgcaggctagactctggttgggtagtacacttgaatagattgtagctgtcgaggtgcatgtataagtggacatctggttgtgtaacttgtgcgtgactatatgttgtctggctgggatgatcgaagaagattactcaaattctgctccggtg

SEQ ID NO: 9739 - DNA, 1935 bp, Oryza sativa
  ref <308>: DATABASE ACCESSION NUMBER: AK107087
  ref <309>: DATABASE ENTRY DATE: 2002-08-28
aatcccgtgtgaatcagcaaggaccaccttgcaaggctaaatactcctgggtgaccgatagcgaagtagtaccgtgagggaaaggtgaaaagaacccccagtgggtagtgaaatagaacgtgaaaccgtgctgagctcccaagcagtgggaggggaaagtgatctctgaccgcgtgcctgttgaagaatgagccggcgactcataggcagtggcttggttaagggaacggaacccaccggagccgtagcgaaagcgagtcttcatagggcgattgtcactgcttatggacccgaacctgggtgatctatccatgaccaggatgaagcttggatgaaactaagcagaggtccgaaccgactgatgttgaagaatcagcggatgagttgtggttaggggtgaaatgccactcgaacccagagctagctggttctccccgaaatgcgttgaggcgcagcagttgactggacatctaggggtaaagcactgtttcggtgcgggctgcgcgagcggtaccaaatcgaggcaaactctgaatactagatatgacccaaaaataacaggggtcaaggtcggccagtgagacgatgggggataagcttcatcgtcgagagggaaacagcccggatcaccagctaaggcccctaaatgaccgctcagtgataaaggaggtgggggtgcaaagacagccaggaggtttgcctagaagcagccaccctttaaagagtgcgtaatagctcactgatcgagcgcccttgcgctgaagatgaacggggctaagcgatctgccgaagctgtgggatgtcaaaatgcatcggtaggggagcgttccgccttagagggaagcaaccgcgaaagcgggggtcgacgaagcggaagcgagaatgtcggcttgagtaacgaaaacattggtgagaatccaatgccccgaaaacccaaggtttcctccgcaaggttcgtccacggagggtgagtcagggcctaagatcaggccgaaaggcgtagtcgatggacaacaggtcaatattcctgtactaccccttgttggtacggagggacggaggaggctaggttagccgaaagatggttataggtttaaggacacaaggtgaccctgctttttcagggtaagaaggggtagagaaaatgcctcgagccgaggtccgagtaacaagattgttcctcacgccggcgtgccccccgccaccgcgcgccatcgccgtagaggctaccactgggacttcgaggtcgctcctctctccatctgggccgccgcccctctcgcgcaccgcgcggcctctctccctgcccctcgccctcgccacctcgccgatggcctccggctgtgcggcggcggcgggatgctggcttctcccagccgatatctaggccctgatccgagagattttgacatggatctatgaatatggccagcagcactaaattaaaaggtgaggagaggctggataagcccaaagggtgcccccacgtctctccgtactacaatgccgccgatcctattatcatcaatggcaaagggattgatccctttgagctgagtgaaggtatggataaaagaagagtggcttcaattcttcaaagtttcacttgaggcaaccgagagaaaccacgctgcttcacaaggcaatggcgattccatacggacagtagcagcctctggattctagattctggaaataaaagaggtattgctgaccataatgtgagtaaatgaacgaaatcttttatactgctggtgttatctacttggttcagagtttcagacaggaaattgcacctagtcctaggtaatgtgtgattgttttgttagctttatgaagacatcttatgtccaaattgctctgacagagggcattcgtcatgctatctggccagccagtaacattttcaattaaaatatcttgagtttgttttgc

SEQ ID NO: 9740 - DNA, 2170 bp, Oryza sativa
  ref <308>: DATABASE ACCESSION NUMBER: AK107088
  ref <309>: DATABASE ENTRY DATE: 2002-08-28
atgcctacacagtacacacagtgcgtttccattttgttctttcttccaacactttgggagagagctataccacgttgctctctcttgctttgcttgatttgcgtatcataatctttttataattcgtgctgtttaaaattttaattaggaggtgaattaaaagccgtcctcgtacgtacataaattagctggcgaatctggccagtctttaattctgccatatatgtgcatgtgtgtgtacatgtatggaaggatagtattctctccttaatttcttgaattgctatccgatcctgagcaatatatgtccctagctagctagctgggcgtccgccataatttgctgccaataataattagccccatatatccttgtagctaggtgaatcatccccttgatatgccttgttaaatatgtagctccgatttaagctctcttgcccattttttttcagagtttatagtttcattttgattcttccgctctctgctagcttccacacaccaagttcatcagccaatttcttcctgacgagaaggccgtgtaagaattttagtgaagtgagtgtcttttttgtttttcgattggtcgatcgagtgctggtacaagctagaggatggcgatgatggagaggattgaggtcaccaagcttcatcatcatcttcttcttcttgttcttcttctcgtcgtcgccgccgccggcggcggcagcgtacaggcggcggaggaggatgagatgagcggccggaggaggagaagcaggcggcggcgtgcggcggacgtgatggtgcccatcaccatcctcaactccgccgtcgacaagggagccgtgtgcatggacgggacgccgccggcgtaccacctggacccgggctccggcggcggcaaccggagctgggtggtcaacctggagggcggcgggtggtgcaacaacgcccgcacgcgccgcttccgcaccgccagccgccacggctcctccgaccacatggagcgccgcatcgccttcaccggcatcatgagctccgccgccgccgacaaccccgatttccacagctggaaccgcgtcaagatccgctactgcgacagcgggtccttcgccggcgacgccttcaacgagggattgaagctgcaattccgggggcagcgcatctggggggcggtgatccagcacctgctcgacgtcggcatggcctccgccgagcatgtgctgctcaccggctgctccgccggcggcctcgccgcgatcctccactgcgaccagctccgcgccctcctccccgccgccgccaccgtcaagtgcctctccgacggcggcctcttcctcgacgccgtggacgtcgccggcggcaggagcctgaggtcatactacggcgacgtcgtcggcctgcaggcggtggcgcccaaccttcccgagacctgcaccgaccatctcgacgccacctcgtgcttcttccctcagaacataatcgacggcataaagacacccatcttcctgctgaatgcggcgtacgacgtctggcagatcgagcagagcctggcccctaacgcagctgacaccagcggcacctggcgagtctgcaagttcaaccgcgcagcctgcaacgcgtctcagctgcagttcctgcaaggtttcagagatcagatggtggcagcggtgagagtcttctccgagtcgaggagcaacgggctgttcatcaactcgtgcttcgctcactgccagtccgagctgacggccacctggaatggtggctctcctgctctccagaacaagggaattgcaaagtctgttggtgactggtactttggtcgagctgaggtgaaggccatcgattgcccctacccctgtgacaaaacatgccacaacatcatatgacatcatgcactgacgtttactcgcctcgaccgaatggagtgacacacatttttgcctcgaagtcctctcaagttcttcactctagctagtagctatatacatgtagaactatcgagttcagagccaaaacatacaaaacagagaacctcacacaaacagatacaaaggaagcaaaacaaagttaacaaaagcaaataggaagggggagaggggcagggcacattaatatcgggaagcagtgtggtggagtcatgggtgtataatttcacctattaagaataaattacagtattcac

SEQ ID NO: 9741 - DNA, 1511 bp, Oryza sativa
  ref <308>: DATABASE ACCESSION NUMBER: AK107089
  ref <309>: DATABASE ENTRY DATE: 2002-08-28
acaaaagcgcgaaccattcccgcagcaaaaagacccaaggccaggtgagctctctcgcccgcccgctcgcacgtgtagcggacaaactcatcgctcggttgagttcttcttcttctcctcctcctcctcgtgcgcgctctgcaagcctgcaaccccatgagctagctagctcggcgaagcggccggcggcgagagagggggagagtgccggtggggacggaggagatcggtccgtacgtgctgccggccggcgagccgacgtcgggcatggacaccatacggtgctgcatcgcgtgcatcctgccgtgcggggcgctggacgtggtgcgcatcgtgcactccaacggccgcgtggaggagatcagccggccggtgctcgccggcgagatcatgaaggcgtaccccaagcacgtcctccggaagccgccgtccacgtgccccgccgacggcgggggaggcgggatcgtcgtccagaagcccgtcatcctgccgcccaatgccgagctgcagaagggcaagatctacttcctcgtgccggtgatggccccaccggagaaggagaaggagaaggagaaggcgaaggcggcccaagcgcaggcgcccgcggcggcgaggaggcggcggaggaggaaagaaaccgctgatgaggccgccggcggccgagctgccagcaacgcagcggccgcgccgcccacccgcgtcggctcggagggcgagaaggagcggctgctggccaacgagaggtacctgtcggagatcatgaaggagaaggcgtcgacggcgagagaccggcggcgcgggcgcgtcgccgtgtggcgaactcacctggagagcatcaccgaggatgacttgtaatcaaacgaggtgttcgtttttttttcttcttcttctctattttttcccattgggttcttgtttttttacttagtttcttttgccaattccttctgtttgccctccgggtttttattttttatttttacttttgccattctttccccggcccgtctcctttattagagcatcatcctcttccctgctcctttacagggtgaaatgatgtctttgtgaagaaaaagatacaatttttgctatgcccctctatctttacagcacctatgatccagttatgggctcaactagttactagttgctacagcagtttgcattgttctgtacatacatattaaaattgtgtaaacaatatttctctagcatccttctagcaaaggtgcaattatatattttttttctgaaaggtatgaggtgcaaatcacaccagcaatagatggatcttgatcttcccctcaattttctgctactatgctgctagcctgctacacattccacgctcacaccagcaagctactcctagctaggagcccccatctatttgccctttcactatttttcttctccaaaagcgctataccactaaaccaactgtcactttgatattggtgcgaacttgtaaattcctctggaaattttagtattccgtgctgcgccct

SEQ ID NO: 9742 - DNA, 1271 bp, Oryza sativa
  ref <308>: DATABASE ACCESSION NUMBER: AK107090
  ref <309>: DATABASE ENTRY DATE: 2002-08-28
atctccacctcacctcgtccatcgtctccagtaaaaatcaagatcggcaagccaagtgcagaggcaaccaccaccaccacctggagcagagcgagcgagcgagcgagcagagcacactgtcatcaatggcggcggcagtggctgtggctgggccgtccatggaggtggagcaggacctcccgggcttccgtttccaccccacggaggaggagctcctcgacttctacctctcccgcgtcgtcctaggcaagaagctccacttcaacatcatcggcaccctcaacatctaccgccatgatccctgggacctcccaggcatggcgaagatcggggagagggagtggtacttcttcgtgccgcgggacaggaaggccgggaacggcgggcggccgaaccggacgacggagcgcgggttctggaaggcgacggggtcggacagggcgatccggagctccggcgacccgaagcgggtgatcgggctcaagaagacgctcgtcttctaccagggtcgcgccccgcgcggcaccaagacggactgggtcatgaatgagtaccgcctccccgactacggcgccgcccgcgccgccgcgccgcctcccaaggaggacatggtgctctgcaagatataccggaaggcgacgccactgaaggagctggagcagagagcctcggcaatggaagagatgcagagaggatcaagtcacggagactacacggcgacgagagcatccctcgtccacgacgcctccgcctccaccggcgacgactacttctcgtcggacgacgtccacgacagcggcttcctgatccagtcctcatcctcgtcggcggcgccgtccggcagcagcagcaagaacggcggcgctggcgcaccaagggaagccaagaaggaagaagcagacgtcacggtcacggtggcgtcggcgacgagcctacagctcccggcggtgagccagctgccgagcccgcagcttccggcgatggactggctgcaggacccgttcctgacgcagctgcgcagcccgtggcaggaccagcactgcctgtctccctacgcccatctgctctactactaagcaaggggcagagaattacattgtgcatcgaagcaagaggagtcgatcacgatctccagatgcatgtgcaagagcaagagatcaaatcacccgtcgacgaagaacaagtagcgtagaatggctagctgtggattcgattgtacatatagtagtagcaccgagatatcaatcaatcttttggtcttctctcaagat

SEQ ID NO: 9743 - DNA, 2265 bp, Oryza sativa
  ref <308>: DATABASE ACCESSION NUMBER: AK107091
  ref <309>: DATABASE ENTRY DATE: 2002-08-28
aaaattaatatccatatccatagatagatagaagaagaatcgaggaggagaaggaggaggatggagcagctccggcaggtcggcgaggccatcggcggcgtcaacgccctcatggccttccacgacgacctccgctgcatcaaccctcgccaatgcgccctcctcgcccacgcctacgccctcgccttccgcgccgtcgccggcgagctccgcgcccgcctccgcttccacgaccgcctcaccaaatggaagcccctcgacgatcccctccgcgagctccaccgcgtcgtccgcgacggcgaggcctacatccgccactgcctcctcctcgacccggcccactggtgggcgcgcgccgccgccgccacgcacggcacggaatgcgtcgagcaccacctccacaacctcctttggtgcgtctccgtcgtcgtcgaggcggtcgagaacgtcggcgaggtcaccggctccgaccccgacgagctcgcccggcggcggctggcgctggccagggactacgacaaggacctgctcgatccaaagctcttccgggagaggctcggcgagacgttcctcgccacgcgtgagctcgccgcccggatggacatggcgtggaaggaggacaggtggctgctgtcccagcttctcgacgagaggaagggcccgacatcgtcgccggagccgccattgacgcggcaggagcaccggctcgccgacctcctcgccgcgccgcgcgggaagctgcacccggcgagcgtgctcctgatgagcgacttccacatgcggaggcgcctcggggggaacgggaacctcaaggaggtgcagtggttgggggaggcgttcgctgtgaagcacgtcgtcggcgtcgacgccgaggcggcggccgcggaggtggcggcgctggcgtcggtgtcgccgcacccgaacgtggcgcactgccgctactgcttccacgacgaggagaagagggagctgtacatggtgatggaccagctgatgagcaaggacctcggcagctacgtcaaggaggtgaactccgccaagcgccgggcgccgctcccgctcgtcgtcgtcgtcgacaccatgctgcagatcgcgtgcggcatggcgcacctgcactccaacaagatgtaccacggcaacctcaacccatccaacgtgatcgtcaagccgcgccatggcgacgcctacctgcatgtcaaggtcgccggcttcgtctccggctccggcacggcgaacgcggccaacccatgcatctggtgcgcgccggaggtggtggggaacgaggcggcggcgacggagaagggcgacgtgtacagcttcgggatgatctgcttcgagctgatcaccgggaagatcccgttcgaggacaaccacctgcagggggagaacatgagcaagaacatccgcgccggcgagcggccgctgttcccgttccagtcgcccaagtacctgaccagcctgacgcggcggtgctggcacggcgaggcggcgcagcggccgccgttccactccatctgccgcgtgctccgctacgtgaagcgcttcctggtgatgaataacccggagcaggcggcggcggacgcggctggagccgggccggcggtggactacctggacatggaggcgcagctgctgaggaggttcccggagtgggaggggaacggtgtcgccgacgtgccgttcgagatgtacgcgtacagggtgatggagagggacaagatgagcaacgcgtgcagggacaggagctccgactccggcagcgacggcaactcgctgtggggagatgacagcgccagcggcgggtccagcacgacggcgacggacgcgtcggcgtcgagccggccgctgcttgaccggagcggcagcacgaggtcgtcgccgccgcgcaaggtggccatcgccgccgccaaggcaggcaagtgtcgcagcggcattgttactcgtctaaagccttcctccaagattacagctagctccatgtccgtgacgtgtgcagggccgccgcagaagtcgaggtcgatgggcacggtgaggccgccgccggtcgtggcccgccgaacgccgaggattaagtccgacggccacctcaatagggcggcaattccgcctacccgacggcgtaaatccggcgggaacgcttcagactcggagttagcttagcaaaatgttgggtagccttctttctcatatgatgagaggttttcacttgtttcagaaatacagtatcaaaacgtcaacaatgaaaaaaatttcactcttgtaaat

SEQ ID NO: 9744 - DNA, 2091 bp, Oryza sativa
  ref <308>: DATABASE ACCESSION NUMBER: AK107092
  ref <309>: DATABASE ENTRY DATE: 2002-08-28
ctaacatttacaagtaatcgtgacattgagtgttctttggggagccaattaatcagcgaggaatgaattaacaaacttttgccattgaaaaatacactatgctgtgtacttgccgcacaagtcatggaacacccgcctcctgctaaaataatactcctccagagaagagtagagtataggcagatggcggcgaacgcgcgctggtggatgcggcggtggtggcagccgcgggtggatccagcggcggcggctccctccgctccctctcgtctccctcccacggcagatccggcgccagtggcgctgttatcagtagccgcaagtggatccggcagcggtggtggagactacgggctgatccggcggcggcagctccctctgtcccttctcgcttccctcccacaacagatccggcggtggtggcaacgtcagcggcagccacaggtggatccggcggcggtggctccctctgtctcttctcgcctccctcccacagcagattcggtggtggcggcaatgtcagcggcagccacgagtggatctggtggcggccgagggtggatccagtggcggccgcgggggtggatccgttgtgggagggaggtgagagggagaggaggagggggcgagggaggagagagaggaggcgtgggagaacgagagatttgtggtgggggaggcaagtacggataagggcgggagatgtcgcgctcggctcggtttttgaaagaactaataatctatggtatactgatacctacagtatattataggtgtcggttaattaaaagccgacaccaataatatattgtaggtacctttaaaaaaagatacatgtagtataggtgccggtttttctctaaaaccagcacctttgtttaaaggttcctattttttttaattttcagcccgtagagatgggagaaacactatatgtgtcggttttggctgttccggcacttatatagtgtcaatatgcatgtgtgtttctatagtagtgtaacgacaacagctagtgaaaatattgagcaatctaatctaatccagacgtacatttgtccgagcaagctagccagccggagacacgtacgtagccacgcctgtttaacttaactaattcagtcgtttgcggcggtggcggcattccgtgcgtaccgcaccttggtgtgctccaccgccctgtcgacgtcctgcagcaccgccttggcggcgtcgagctcgccgaagcgctccaaccacgccgccagcagcggcgtcctcgcagcgtcgaagagctttccaccggtgatcatgtcgttggcgtgcacgaaggagacggcaccccccagcacgacgtcgacgtacccgacgctgtcgccgccgaagaagcatcccttccccttggagcactccttcaggcctccctccagaacgtccaccgcgacgaacatctgcttcatccacgcggccctctcctcctccgtcttggccctgaataccttcttccatggcgccagtagctgcacgcacgagagcacacacatctcgtcaacgattcgatcatcatcaccatggcagtgcagagattcacacaaattcagaagattcgatcatcatcaccatggcagtgcagagattcacacaaattcagaagagctcaaaccttgtcgtcgatgtatgcggcccagaagcgagcaacggcgcgttcatatgggtcggcggggaggatggagtcgccggcgccggagaagacctcgtcgatgtactgcacgatgatctgcgactcgcggatggggttcccgttgtggatgagcacgggcaccgtcttgtgcaccgggttggaggcgagcaagaggtcgctcttgttgcggagatcctcctcgacgtactcgtagctcacgcccttgaggtggagcgcgagcttcactctggtgacgtaggcgctcgaccagtggccgagcagcttcagctcgtcgtgtccggccatctctcctgtgctccgatggacacgatgtgtcgatgtgtgtgtcttgcgttaatgggttcctcttggtcagaacgagaggaaaaatgcgtatgctcatttcaatgtagtgcgtggtgttctgtgtt

SEQ ID NO: 9745 - DNA, 1130 bp, Oryza sativa
  ref <308>: DATABASE ACCESSION NUMBER: AK107093
  ref <309>: DATABASE ENTRY DATE: 2002-08-28
atgcatgggctgatccaatggccagcaagcagatgaacagggcaacagtaacgtgactgcgtagcaagacaagcagcgcagctgccgtacttcaccaaaaactataatttttatagatctgttgccagagggtcaaaaagaagaggccccgagtacagcttccagaagccgtccattgtgaattcttcggctggattcacttctagaagacctgatcccgtctccccatatcgccttcctcgagatccccccgcttccacatccctcctcccccatttcctcctcctcttcctcctcctccgtgcccaccacctgttcgacggatcgacggactcgccaccgcagccatgatccagctgctcttcacgctgctggccgcggaggcggcgctggtgctcgtgctgctcttccgcacgccgttccgacgcctcgcgctgctcgccatcgaccgcgccaagcgcgggcgcggccccgtcatggtcaagacggtcgccgccaccatgctcgtcgtgctgggctccagcggctacagcatcgccaagatccggcgccgggtcggggatctcggccagctcacgcccaccgaccaggtgctcgccagccgccacctcctcgaggcatccctcatgggatactctctgtttcttgggttaattattgaccggctacatcactatatcagggagttacggaccatgaagaaaaacatggaggctgtaacaaagcagagcaggaccttagaagaagcaaaacatgggagtgtagaggagattcaacaatatcagaaagagatttccaggttgaatgagcaagtgcaagaattcaagcgtctgtcagaaacgaaaactgaggaactaaaaacagctgaagcgaataccttggctttacagaagcaatctgaaggtttgcttaccgagtatgagcgtctcatcgcagagaatgaggaattcaggaaccaactgcagtcaatggacctccgcttgtcgcattctgataacaaaaagaatacataactacacaactgtgatgctggcatgtaatatcaaatgttgttgatgtatcatgctgtatttaatatataggtaatataacatatggatgaaatatatcgctgtgtgtggataagcaat

SEQ ID NO: 9746 - DNA, 1555 bp, Oryza sativa
  ref <308>: DATABASE ACCESSION NUMBER: AK107094
  ref <309>: DATABASE ENTRY DATE: 2002-08-28
gttcgatctcacaatcactgctgctgcaccattcgtccattcctttcctcctccgttctccgacgatcgctgctgcacaattcctttcctcctccgttctccgacgatccagctcgaggaacgatccatggcggtgttctacaggtacaggagcggggtggacaccttctccgtgcccatgcaggagccttccgtctccgtcgccgagctcaagcgcctcatcatggccaccgcgcgccacggccattgacgttcgcgcggccgcggccccagggagagcgtcgcgctgtacagcgacaacaccggcgaggagtacgcggacgaggccgagctgatcccgagcggctgcacggtcgtcgtgcggcgccgagtcgcggggccacctgcagagacgatcgtcgagttgacaacaaagaagccaatgtcgcagggcggtggtggttcttcgtcggactctggagcgacgtcgacgggagctgaagtcgacgacgaggagaaagctatcagcgccgtgatcgacgccgcacagctcaagtgggaggccccgacgtcacaaggaggccactgttacggtcaccgcggcgcacacgcgggcagggcgccgccggccgggtacgtgtgccaccggtgccgcgtcccgggacacttcatccagcactgccccaccaacggcgatccaagattcgacatcccgagggtggcgccaactccagcgtcctcaccggcgccggctgagtccggggaatctggcggcgtcatcccggcggagctctactgcaagatttgccggaacgtgatggccaacgcggtgctggcgagcaagtgctgcttcgacagcttctgcgacaggtgcatccgggaccacatcgccgccaagtccaggtgcgcgtgcggggcgcaggcgcgcgccggcgacctgatccccaacacgacgctccgcaccaccatcgccaacctgctcgccaccaccaccggcgccgcagcaagcgcctcaagtggaaccgacaagacgaggagctccgccggcagcaacgcgccacagccggcggcgccgcagagcccggccgcttcgcaggcgagccgcagcaacgtgtcttccaagaagagcgccacgatctcatcgggtgtcctcggaccaagaaaggcgcgggagatggtggtgccgggcgaccactcagcacaatccggggctctcgccgtcgacggcgatcgccacggcagctacggcttcccgttcggcccggcgccaggctacgtcgaccccttcttcgccgtcggcgtgccattcggagccgatccttacatgtactacggcggcgcgccttacggctgtggcggcgctgcttacggctactacggcggcgaggatcgccgtgacacgaagaggacgcgcctgcgatgatcgcacgtcaccggtcaattgttgcctgctggctgcgctcaacgctagcttggagatattttcttctctcctttttgtgttctccgatgattcggaagacaagtagcgagtcaaaacatgtatgattcttgtatagttgtatgtgtaaatgct

SEQ ID NO: 9747 - DNA, 1888 bp, Oryza sativa
  ref <308>: DATABASE ACCESSION NUMBER: AK107095
  ref <309>: DATABASE ENTRY DATE: 2002-08-28
gaccaccaccaccaccaccaccctccggccggcgagcggcgagctcgacgcagatggccgcggcggcgcggtcggcattggcgtcggccggccgtgcggcgaacgaggcggtgagcttcgtggtgttcatggtgctcgacgtggtggaggtgctattgtgcgtggtgtacaaggtggcggactacatgctggagggggcgtggcggccgtgctactgctcgtcgtcgtcgacggcggcgggggcggcggcgtcggggaagatcgtcgtgtcggagcgcggcgggtccaaggtggtcagcatgctgtcgtcgaccaagctgcacctggaggacatctccgacacgctctacacgcgcccgtccgtgctcgccggcgccgcgtcggcgacgacacggtcgccctcctcccggcgcggcggcggcggcgtcagggcgccgccagccaccacggtcacggtgcactccgccatcgtgcagatgctgcgtggcaagatcggcgccgacggcgacggcaagcagcacaagccgtacccgtcgccgaggtggtccgactgccactgcaccaactgcaacccggccgacgccggccgcctcttcgtccacgtcgaggcgccgcccggcggcgcggcgacggaggaggacgtgctgttcatccacgggttcatctcgtcgtcggggttctggacggagacggtgctcccgaacgtgagccccgaggcccgcgcgcggcggcggctgttcgccgtcgacctcctcggcttcggccggagccccaagccggccgactcgctgtacacgctccgggagcacgtggagatgatcgagcgctccgtcatcgagcggcacggcgtcaagtcgttccacattgtcgcccactccctcggctccatcctcgcgctcgccctcgccgtcaagtaccccgccgccgtccgctccctcacgctcgtcgcgccgccatatttcccggtgccgagaggggaggtcgggacgcagtacgtgctacggacggtggcgccgcggcgggtgtggccgccgatcgcgttcggcgcgtcggtggcgtgctggtatgagcacctcagccgcaccgtcagcatcgtgctctgcaagcaccaccgcctctgggagctcgccttccgcgtcttcaccttgtacagggtcagaacatacctgatggatggtttcttctgccacactcacatcgcttcatggcatacccttcacaacatcatctgtggcagcgccggcaagatcgacaaatgccttgagatcgtcagggatcagctcacctgcgatgtcaccatctaccatggtagggatgatgagctccttcctgtgcaatgcagttatgcagtgaaggcgaaaatacctcgtgcccgtgttaaggttgtcgacggcaaggatcatgtcaccattgttgtcagaaggcagaaagaactagccatggagctggaggagatctggaacagaaaacggtgacatgatcacaatgagtaaataggagaaatcacaaagtgtgttaaaaggggcacctcaccagatgagagaagttgggtcttccagagaagagcaagactgcaacgaacaaacacatttctgaattcaataggaaactgaagagcaaacaaggctcgacagaaatgtgaagaaggttacctgattacttttactttttttttcaccttttttttccttctcaagtattcatattgaagattgggaaaattcttaccgggtcctgtgtataattatgataaatggtgagtggctccaggctttcagctgtaaacctgtggaacagaatgtgatatgattaacttgtggggattcttagaaaattcctacttctgttatcagtccattctcattttttaatacaattcttgttctat

SEQ ID NO: 9748 - DNA, 1903 bp, Oryza sativa
  ref <308>: DATABASE ACCESSION NUMBER: AK107096
  ref <309>: DATABASE ENTRY DATE: 2002-08-28
atctctatctggcatgaacacgatgataggcccagctccgtctccggcagcggccgccgccgcagccgtgtcgccgtcgtgttacgcgtcgccggcggcttcgtccgtgcgaagacgcggcgtcgtcggcgtcgtccggtgcgcgccggatagcgggcgaggtggagacggcggcggcggcggcgggaaaggcaagctcagggtcgggtctcccatcgtcatcgtggaggcaccggtgatgctcaagaccgccgcgtcggtgccgtcgctcaggcacaacgccggccaggtcaaggccggcgacgtcgggaggtagaactacgattccatccgatgcttattgtgatatgctcttctatgcattggaatttggaagtataatttcggaccaccgcttcgtccctgcttgggcggctcggggtgcgaaacctagccgccggagcgagcctccggccaaccgtgaggcgagacgggatggcggcggcgagttgtctcgggcgcggaaaaggtcgtcacaaggaaatcgtggtgacggttggtcaaatactttggctgatcagccaaagctacctccaattctgccaaaattcaatgcaaattggttagcttattttgcttaaatggctgatcagcgaaagcatttgccatccgatggaagtaggaaatccaatgcagtagtagtgatttatttcttgaagcttgaaaataggaattttgggcgaatatcaagagagtttcacaaaaatttgaacaaaacgaagaacatgacacagaaattcaatgcttagtgatactccctccattttcaactcctaaatgacaacggtgactttgttatttaaactttgaccactaattgctcttaaatagttgaactaaagcgaacaaatgtttcatgattatgactaggacataacacattttaatactataacatctcttctagtgtttgcaaatatttttaaaaacgaatggtaaaagtttgaaagcgaatagtgtcagttgtcagttatttaaaaatgaatgtagtttttttttgtttttttaaacattgaaaataggaatttgcagcgaacattaagagaattccagagaaatttaaacaaaacgaagaacgttactacaggaatttgaattacactgacatccatgtgcaattgtgcatacgtcgagcagggtgatggcgcggaagccgaaggacgtctgggccgtgcggctcgccatcggaacctacctgttggacggcaagtatttcaagacactggacgtcgacgacgacgatactgcatcaccagatgagtgagctgcaaatgcagcagcattacagctacggcatagcatgcaagattgtttgttagacagaggcacagctgcaatgttgtaaaagatccaggaattcacaatttttgttgagactgatgggaccattgtttcacacataacccctggcgtggtagattgcacaggaaatctggtatgaagatgaatcaacctgcgcctaagggcaaacgaatctcaatctcatcatgttgttttgttaagcatacgtacaggggtaggagggaatcggagacacaactacacatattgcacaaacagggaaaaaaatatatcccacgatcttctttttccaagttacaatcaagcacccttcttccatggctggatgacggcgacgacaatgatcaccactatgatgagcaggaggatgatggcgtagcacatccacttcctggagttcttctggagcttcttcgcgttctgtagagcactgacgccttgttgtatgtggttggtagcatttgaaaccttgaagcagagaaaacgaaaataaggtgaattcttggtgatatacagtttgtcttgcttccaagaacatgtataacttggtgcaagagtgggc

SEQ ID NO: 9749 - DNA, 1828 bp, Oryza sativa
  ref <308>: DATABASE ACCESSION NUMBER: AK107097
  ref <309>: DATABASE ENTRY DATE: 2002-08-28
gcacactgttcgcctcacacgatgagctcgagaggccgaccacgagctccggcggcggcggaaagcgcagcggttcccggtcgtcggccggccaggtcttatagagagaaaggcttggcagccaggtttcgcgcgggggccgacgtttcctgcacagatctggctcaggtggtagccgtcggccggtcagatcaggcgtggggagtcaggcgggacggcggtgactcggagggagggcgaaacgtcgattcacgcttcagttcttgttccgttcgctgggtgtgatggtgtgaagaactgaagatctgcagcccctgggccgttggagtgattgttggaaggtcacgcattgagagagtggcaaatggccaaacgctcaatccatccatgctcacatcactcaaggtatcaagctgcgaaatcacataatctttgcgtagtatttgtttcatattgccatattgatgatactttgtacacttgtacattcattgagtcagtacaaactcttgtccagaccaaaaaaaaaaaaaccctccgatgctcaaacctcagcgcagtttctctcttctttttttttgttctaataccagaatgattaaccaggatgtgcacatatatatatggctacaaatatgcatgtttaaattaactatatatatatattctcgtggcctggaaaaatgtttgtgtgccggtgacaaatggaggactggggactcaagtgaaacctggatgcttttggacaggcgctgagactcaagtggctagtcaaaagtatagaacagaaaaaccgtccttgggccatggcaggatatcgcctgggattagatgtggagcgaattttcagttctgccgccgagttttgtgttggcaatggcaaagacacaaaattctggacagcaaactggttgaatggacacagcatttcttggagatggccgaccctttacacttatgtgggccggtcccaaattacaatatctcaggcgctgagcaacaatagatgggtgcgagacctgcgaggtgcactctcaaatgaagctatagcgcagttctttcagctatgggacgagattcaggaggtggttctcaatcgggaagatgataccattcggtggaagttctctgccgatggccagctctcagcctcttcggcatatgagctcttctacatggcaaggaagatctgcccattcagtgaacttatctggcatatcaaggctccctcctgggtgtgattctccctgtggctggcggccaaaggtcgttgtttaacagctgataatcttgagaagagagggtggttgcacgacgattcttgccacttatgtcagcgagaggaggagagctgtttgcatcttttcctaacctgcgatttatccaggagagtctggactttgatgcaaagatggattggcatcggctttgcgccaccaacaatcaacgatacaagcctaactgaatggtggatggcggcgagactgaatttttggacgggctatagggacattttcgacggcgtcttcgcactaacctgctggttcctgtggaaggagcgtaatgcgcgagtgttcgagcagaaattttgaagcacagagcagctagtgagcgacatcaaggaggagatcctcatttggaagtcggcaggaattttcaccacttgtaatggcgataatgattaatttgtaatccctgtagcatacaactatagcttacatggttggggttttttccccaatcatttcgtcgttgtaagcttctattgtaatgatcctttctcccaatcttaatgaaattggtcgaccgaactttcggccaacccggc

SEQ ID NO: 9750 - DNA, 1686 bp, Oryza sativa
  ref <308>: DATABASE ACCESSION NUMBER: AK107098
  ref <309>: DATABASE ENTRY DATE: 2002-08-28
attctagcctcgccgccgccgccgcctcgtccctcccctagacggcggcgacggcgacctcgccgccgtcggaatcgctcgcattccgtacaccatcgccggggcaccagatgggtgaggattccgtggctcgacaccgcccccactcctgctctccggaaacctcaccgccgccgccgccgcgatcgcctgctgatgacgacgatctcctctccgagatcctcctccgcctcccaccgcagccgtcgtccctcctccgcgcctccctcgtctgcaagcgctggcgccgcctcgtcgccggcccggtcttcctccgccgcttccgcgcccaccaccaccggagccccccgctgctcggcttcttcatcgacgactacggcgacgccctgttcactcccacgcttgatccacccaaccgcatcaccgccgagcgcctctctctcaggcagggccccggcgagcggttgtccttcctcggctgccgccacgccctcgccctcctcctcaaccggccgcggctcgaggccctcgtgtgggaccccgtcaccggccgccgccgcgccgtggcgttcccaccggaattcgccatcaaccaaggtgatttcgtccgcggcggccgatgatggccatgtccatgtgcacggcaattgccccttcaagctggcattggtgttcattgacaatggacgaacacaaatttctgtctgtctctacgattcggagtccggtacatggggcgatatcgcctcaacaacattggttacacaatggacttcttcagtgggtactagcaccatggttgggaatgttctttgctggttgattcatcgccctatttgcatccttgagttcaatttggacaagcagatcctgtctgtaatcggagggctggcgcatgttccggataatagccgcccttcgagcagcttcatattcccgatggaagatagcaagcttgggattgggattttgagtggacagcgcatccggttgtgggagaggatggccaattctgaatggttgctgcggagagcaatgcagtttttgtgctgacggctattggcgtgtttatgattcagctcgattcgctgcagttcaggaatctttttggaagcaatttcgtcacttcattctatccctacacgagcttctatactgcagggctccagagtttgatctacacctagaagatgaagaaatttcaatttgatgcaataaatctcatatcaaacaacatctcaactcacttttctcgaagattttcacttcaaggcttgaatttggagataataagaccatctctcatatcaaacaacatcgcaacaaacaacatctcaactcacttttctcgaagattttcacgttaaggctcaactcacttttctcgaagatattcacgttaaggcttcaatttggagatgccaagactgtctctcatatcaaacaacatcgcaactcacggctagtcttgcgttttgtttaataatcttctaatatcgtttttttcagtaatcctctaatatctcatctcttatgctagtctagagacgacataagcacaaaaacacacgttatgttactcatgtacatttcctcaaataaactttattagcttagtgttgtgtactactacatcaatagaacgagaatacaacatcaaaatttataggtctgatgtgctatctc

SEQ ID NO: 9751 - DNA, 2087 bp, Oryza sativa
  ref <308>: DATABASE ACCESSION NUMBER: AK107099
  ref <309>: DATABASE ENTRY DATE: 2002-08-28
gcagctaagcaaaccatgtcggcgcactcggattcatccttgaattccacatcgctgaagcagaatgttcttgctaagctctgcacgagctgatcatggatcacctcgtcgggagggagctccaccgccgcctctcgccgcagagaggtgacctccttgtcggcgataccgcagggcacaatgtgctcgaagaaacccaaatcaggatcgatgttgaaggccagaccatggcaagtaaaccctgacgagatcctgaccccgatggcgccaatcttcctgtccccgacccacacgccggtctcgccggcggcacccgggcacgcctggacgccgtacagcgccgccacctcgatcatggcggactcgagcccctccacgtacctccgcgcgccgaggccgatggcccggagcgagaggatcgggtagagcacggcctgccgcggcccgtggaaggtgacgtcgccgccgcgctccgtgcggtggatgtcggcgccgagcgccctgaggtcggcctccggcaggagcaggttgtggtcggtgcgccgcttgccgagggtgtaggtcggcgggtgctgcagcgacagcacgaggtcggggacccggccggccctccggtcggtgacgagcctctcctggagcccgagggcgtcgccgtacctcaccaccccgagcctccacgcctcgagcaccctcctcgcgccgccgctcatctcctccgcagccgcgaggagaagaggacacggcggcgggctgcctcctccggctaccgtcagagactggacaggatgaagcgaaactaaacttgcgaggtaaataaatgggccacaagtctctcggcccacggcctgaaaaggagaaggaaaagaaacctaacccacctcgacctgaacccgatcgcgccgccgctcgcctgaacccgccgccgctcgctgcaccccagtgcactcaccacgcacgccggaagttcccttaccagaccgggcgatggcggcggcggcggcggagtttatggagctcgcgctcgagcaggccaagtttgcgttggacaaccttgaggtccctgtagggtatacccctgcttcgtttcatacataggagttcatccttggttcttgctgtgctaactgctagtaactcctaactgctgctggctctacttttttttgttattctgtcttggtagatgtgtgattgtggaggatgggaaggtgatttcatccggtagcaacaagacaaatgccacccggaatgctacaaggcatgctgagatggaagcaattgatatcctgcttagggagtggcagggtatgggacttgatcagccacaggtcgcggagaagtttgcaagatgcgacctttatgtcacatgtgagccttgcataatgaataagggaggtgtactttggttgtgctaacgataaatttggaggatgtggatcaatcatgtcattgcatcagagttcttctgctgaactgtcaggggaggaaattcccgggccaaaaggttacaaatgtactggtgggatcatggcggaggaggcagtggctctttttagaaatttctacgagcaagggaatccaaatgcgccaaagcctcacagacctgtccgtatagctccccagtgactggtttctttagttactctacaagcatgatgaggaagatctcaggaaggcagatctatagattggatggagatcctaatttaaggcccatcacatgatttagagttgagcattgctgttactaaacagccttatgtattctgaaatagctgccacatgcgttcatgtgattgttattattatttgcagccaggtatcctacaggcttgatgattctgggagatttccacagtttacaagcctgtgtttcaagccatatatgcaattgttgtaggccttaactgtagccttcaaaacaacattggtttgtgatttttttttttgaagcctaagccagcttctgctggttttatattaagagagagaaagactgtagaaatggtttgtgatatacgtgcatgtatggtccaatgccaccatgtgttttttttccctgaaaaatatcgcactaccattttgtt

SEQ ID NO: 9752 - DNA, 922 bp, Oryza sativa
  ref <308>: DATABASE ACCESSION NUMBER: AK107100
  ref <309>: DATABASE ENTRY DATE: 2002-08-28
agccatcaccaaaccttttagcttctcagccttttgcctctctttctactctctttcttggccgtctctcttatatccctcaatttaaccatcgagggcggccaaaaaaaagagagaaaggaagagcaaaataacacattacaccatggcgcgattcgtcatcatctccgtcgtcgtcgtcgccgccttcgccgctgccgctgtcgttgaggcccgggttggacctatcgacgtcgctccgaccaacctgatcatcaacccactcggtgccatcatcgacaatggccgcaagatcaccggcgccgtcgtcgacgagtgcgcctggacctgcgatcatgtcgcggcgggtaacacgaagatgtgcaacacgctgaggaagctgccgggggtgagctcgccgaaggagctcctgacggcggcggtgaagctgtcgatgaggaaggcgaaggcggcgagggcgaggttcgaggcggcggcgagggcggcggagaaggggacgccgatggagtccatcctggacacctgcaaggaagggtacgacagcacggtgtcggcgctgcaggaggtgcagcgctgcatcgacgccaacgacagcaaggcgagcctcatcaccaagatgtcggcggcgaccaccttcaccggcgactgcggcaacgcctacgaggagcgggagctggagcccagcctcgcgctcaaggccaccaagaacaacgtcaaccgcgtcgtcaccggcgccctcgccatcgccgccaagctcaagctataattagccaactgatcatcaatcgatatgaatgattgatcaactataaaattacacctagctcatgcatgcgtccgcgcgttatgtgtgtacgcacgcatgcatatgtgtaagatcgatcaacagatcacagaagtggtggcgtatctcgcacttgtg

SEQ ID NO: 9753 - DNA, 1007 bp, Oryza sativa
  ref <308>: DATABASE ACCESSION NUMBER: AK107101
  ref <309>: DATABASE ENTRY DATE: 2002-08-28
atatagaagtatggaacttagtatggttcaggttttgtaaaccaattgttgctgataaatcatcagaatctcccaagaattcatcgaaatctcccgagaaatcatccatccatcctctacgttcccgatccaccgatggacctggacctggaccgcaagcaaatcaagcgttgcgtcgtcgccttcctgccgccgccggaggaggaggatgccggtgaggagatccgtgtggtgccgtgccctgccgctgctgcggaggaggagaggcggcgatcttccaagaggaaggggaagaggtgcgcctccaatggaagcaagcctgcggggacgctggtgccggccgacggcgaggagatgatcctcgtcccgcccgggaagctcgcgctgtccaagaatctggtcgacaagatcctctccctggagaggatggagctgccccacgtcgccgacatcgtcgacgacggcaacccgaacccgtcagaggcggacaaggcgctcaggaggtgcgtgctcgacctggacagggacaacaagaggcaccaggacaagctcgccgcgtgccaggcgatcatacggagcgttcgccatggcaagggctacgccgtcgtcgacaaccgcctcgacttcagggtcgccgtgtgcagggccgagggcgtcttcctgctcccctgccatatcgccgatcttatccccgtgggatttgatcttgtctccaattgagtactccctccatcataaaatttttatagcaatcttataacggatgttctactacaacaaatcctagtatattcagattcgttgtactggatggatacattctaggacaataaatcggttgccatattttgagacggagagataaaggtattttgggtgaacgtgacatattctaagacaataaagctagacaaattctcttaccagatttattgtactaatgtgacatatgcacctaaaatttcttataattttcacaatgaatgcaactaaatgtatttccattt

SEQ ID NO: 9754 - DNA, 1803 bp, Oryza sativa
  ref <308>: DATABASE ACCESSION NUMBER: AK107102
  ref <309>: DATABASE ENTRY DATE: 2002-08-28
cggcgctcacccacctcgacctcggcctcgccgccgccaccgacggcttcaaatcctccgagcttgggccaatcgcggcctcctgccccaacctccgcaagctcgtggcgccatgcttgttcaacccacggttcagcgattgcgtcggcgacgacgcgctgctctcgctggccaccagctgcccgcggctgaccgtcttgcggctcagcgagccgttcgaggctgcggccaacatccagagggaggaggcggccatcaccgttgcggggctagtcgccttcttcgcggcgctccccgcgctggaggatttcaccatggatctccagcacaatgtgctggaggccgcgcccgcgatggaggcgcttgcccgaaggtgcccgcggatcaagttcttgaccctgggttccttccaggggctgtgtaaggcctcttggttgcatcttgatggtgttgcggtgtgcggtgggctggagtcactttacatgaagaattgccaggatctcacggatgccagccttgcggcaattggccgtgggtgccggaggcttgctaagttcggcatccatggctgtgaccttgtcacttcggctgggatcaggaggcttgcattcacgcttcggcctactctcaaggaagtcactgtcttgcactgccggcttctgcacactgcagaatgtctcactgctctaagtccgatccgtgatcgcattgaaagtcttgagatcaactgtgtctggaacacaaccgaacaaccctgcagtgttgcaaatggcaccaccaccgaatgcgatcctgaggatgatgagcttggtgaagtgtacgagtctgcagccaagaaatgtaggtacatggaatttgatgatcttggaagctgggagatgctcaggtcactctccctatggttctctgctggccagcttctctctccgctcatttctgctggtctcgatagctgtcccgtgcttgaggagatctcaattaaggtggagggtgattgccggacatgcccacgacctgctccaagaacaatttttggcttaagtgatcttgcaggcttcccagtattagccaagatgaaattggacctcagtgaagctgtgggttatgcacttactgcaccaacagggcagatggatctttcactatgggagcgattttatttgcatggtatcgaatcactgcagactttgtatgaattggactactggccgccccaagacaaggatgtgcaccaccggagcctgacattgccagccgtgggattgatccaacgctgcgttggactcaggaagcttttcatccatggcaccacacatgagcacttcatgaccttcttcctttcaattccaaacttgcgggacatgcagttgcgggaggactattatccagccccagagaatgatctgatgttcacagagatgcgggctgaatcttggcttaggtttgaggtgcaactgaacagccggcaaattgatgattagttatgtgggcacaaaatggtttgaagctgaatacagagatttatctggatggtgccattgctccactgtgcaatggcaggggattcctggtgagttggttatgattatgggtggagtcgtgtgtattgctgcagtgccattgaggagagtagtatactggcagcacttggatctgtcagcaaagtaaccttctccagttgcttttttaccccctttttgatgtaataagagagttgggtcggaaatgagatatttgcaggagataagattataaattaggcttcatggaaaattttccaagaaaaaaaaacattttgttttt

SEQ ID NO: 9755 - DNA, 1534 bp, Oryza sativa
  ref <308>: DATABASE ACCESSION NUMBER: AK107103
  ref <309>: DATABASE ENTRY DATE: 2002-08-28
acccccacggggcatcaaaaccacggcgaggccacgagttcgcggagaggaagccgacgcaatcgaactccggcgaaactgtggtctccggccgccatggacggaagaaactcaggagacgcgctgccgcgggagcggtggaacgacatcccggcggacatgctgggcctcgtgctccgcgtcatcccgtgcgccgctgaccgcgccagggtgcgctccgtctgccgctcgtggcgcgccgccgcggccatccagcgcccgcccccgccactcccggtgctcgtgttctcccggttcagcttcgcaagcctctccagattatcgcccgccatggcgttcaccaaaccccgccgctttttttttcacaaggacgtgaccatccgctgggtgggatcgttcgacgagtggctcgtcgggacgaaacccagcagggaatgcaaggatgccgacggccattgtttcttgctgaatctcatgtcccggaagaagattcaactaccgaggccatgtgccttgcatttcttcgattacttctgcaagactctccccatcgtcaacacctcaggttgggtcgacattattatccatgaccgggagtactcgatgtgcttcagaaaggtggtcttatctgcttcacctgcctctgactcaatgtgcatcgtggctgccatttctagtcgcacccttgctctctggcaccctgggatgagatcatggtgcgtttgcagaagctttggcatcgatggttcagctgatattgccttctaccaggggaggatctacatggcgatggtctccacatactttccacatatcctgtccatcctgttctttcagcttgaagaggtcaatggcagagttatggtttcgtatgttgagcagtgtgttacagagacgctgcccccagtcgagggttgtgtagtgaatgaattctacattgttgaatggcgtgggaaactattgctgatcgttatgtatgctgaacatgtctggctagacactgagaaaattgggatatatgctctggacttcagcacaaaccctcacagcttgactgagataaacaacttggatggtgattgtctcttcattagtttgcgcagcagcaagtcctttcctgcttgtcagtatgatggagccaaaggtgattttgtctacttcgttagcggctattggcaacatgctactggtgtccatcattcttttgatgtacttgtgtacaatgtgagagatgctacaacgacacgattatctgtttctgcacctgaggacaactctggcccgttcacgaacaacctcttgtggttatttcctccgagatgaatgctactgagaagatccaatcagatcatatcatatcaatagtatgacagtgctaatgtggcctccattgaccgaaatgtaaaccagtgatggtgttcttttcctcttcatgaccgaaatattgtgttgttggttgttctcaaataaccctgagtacatgtcacagatctactttgattgcaatatacttatcatgccctgtttgacactg

SEQ ID NO: 9756 - DNA, 1762 bp, Oryza sativa
  ref <308>: DATABASE ACCESSION NUMBER: AK107104
  ref <309>: DATABASE ENTRY DATE: 2002-08-28
tgccacatacacagtacagagcgccgccacagctcacaattaaccttggcaaccatggatgagctcttgtacagagctctcctcctctccgtgctcgccgtcgcgctgctccagatcatcaaggcgttcctcatcatcatcagggcaaagccggcggcgccgcccctgccgccggggccatggaggctgccggtgatcggcagcatgcaccacctcgccgggaagctgccgcaccgcgcgctcagggacctcgccgcggcacacggcccgctgatgatgctccggctcggcgagacgccgctggtggtggcgtcgtcgagggagatggcgcgggaggtgctcaggacgcacgacgccaacttcgccacccgccccaggctgctcgccggcgaggtcgtgctctacggcggcgccgacatcctcttctcgccgtccggcgagtactggcgcaggctccggcagctctgcgccgccgaggtgctggggccgaagcgtgtcctctccttccgtcacatcagggaacaagagatggagagtcaagtggaagagatccgtgcagcaggaccatcgacgccagtggacctcaccgcaatgttctccttcctggtgatcagcaacgtctcccgtgcatcctttgggagcaagcatagaaatgccaagaagttcctttcagctgtgaagaccggggtcactctggctagcggtttcaagatccccgacctcttcccgacatggcgaaaagtgctcgccgcggtgactggcatgcggcgtgccctagaggacatccacagggttgtggattccaccttggaagaggtcatagaggagagaagaagcgcaagagaagacaaggccaggtgcggcatggtgggcaccgaggaaaacctcgtcgacgtgctcatcggcttgcatgagcaaggtggttgcctgagtagaaatagtatcaagtcagtgatattcgatatgttcacggctggaacaggcacattgtcatcaacattgggttggggtatgtcagaactgatgcggagcccgatggtaatgagcaaattacagggtgagatccgagaagcgttctatggaaaggcaacggtgggagaggaggacattcaggcgagtcgcctcacctacctaggattgttcatcaaggagactcttcgcttgcacccgccggttcctctcctagtgccccgagagagcattgacacgtgtgagatcaaaggctacatgatcccagcgaggtcccgcatcattgtaaatgcatgggctatcgggagggatccacgatactgggacgatgctgaggagttcaaacctaagcgcttcgagaaaaacatggtcgactttacagggagttgctacgagtacttgccttttggtgcaggaagaaggatgtgccctggcgtagcctacgggatccccattttggagatggcgcttgtgcagctcctctatcacttcgattggtcgctgccgaagggtgtcgtagatgtggacatggaggagtcatctggcctcggtgcacgacgcaagacgcctttgttactctgtgcgacgccatttgttgttccagtattatgaggcacattcaagatgtgctagttgattggtgtagaagtcctttttctttttaattgtgtgaaattttcttttccatgcatgatcctcagatgcctttgggcttgccctccaaatcatgaaaggggtgttttattttgtaataatgttattatgctgcatcaaagacaacaacaaattaagg

SEQ ID NO: 9757 - DNA, 892 bp, Oryza sativa
  ref <308>: DATABASE ACCESSION NUMBER: AK107105
  ref <309>: DATABASE ENTRY DATE: 2002-08-28
gtgcagccgctgctcctcttcggttgctccacggagccgtcgccaactgaggggatgatggccggacggcgaactcaccgaggcacggctgttggagcgaactaatccggagggggtcaggactattttgcgccgccgcggaggcggcggcgctagaggcaggtcgagcggaggcgacagcgtcgggcgacggggtggtgcaaacggtgggggccgcccggctcgagcgacagtggcgccgaaggcggtttgagcggaggcgacgacgccgggtgacgaggcagcccaaacggcggcggcgccagaggtgggtcaaacggaggcgacggcgctgggcgccgcggaggcccgagtggagggcggcgacgacaatgcgtggcgggccttcctccgcgctgccccccctcgctggctgccggctcccgaagctccgccttcaccgctctgttcctccccagctccgccgctctccctccccatctgcagctcgacggcaccggcggcggcttgacgacggccgctccgtgcccctcctcgccagatccggccttaaggtcgccggatctggccttgggaggcggtggcggcggtggcggcttgaaggcggcagcagcagatcgaaggctgcggcagcggctcgactgcgggagcagcagctcgaaggcggcggcggcggctcgactgcaggaacggctcgacgacagccagcccgcgccccctctacagtgcagtagaggtcccatcgatcggtaacatcgattcactgattcttccacatctctcccttgcgccgcttcgtcgcccacattcactgattcttggaagcacaaacgaaaggatcacatatgtacgttactaccttttcctgcaaatacatatacaccacttggat

SEQ ID NO: 9758 - DNA, 1788 bp, Oryza sativa
  ref <308>: DATABASE ACCESSION NUMBER: AK107106
  ref <309>: DATABASE ENTRY DATE: 2002-08-28
agatgccgcacgacggcaagtggttcttgttcgcatctttttcccctttccttctctcctctcggtgaactggtgtggacacctccggccatgagtttcgccaccggagtggttcatcttctggctgtgcccaagaccgtctctctcgctagctgccacgccatttaattccacccatgtttctttcccttcaagatcttgagcgcaacaggtgatttaagtatactcaggttggctgatgatttgagtgtatatgatattaacttctttcgctatattttgaacggcgaggaggattcatcggctgcttcgtcgttgatccaagcgaacttctccaagaacgggctgggcttgctctccggtgggtacgcgtcgatgcagtcggcccacgcgcccttgtcggccatgtcgccggccacctcccacacgcagctgttgcacttgaaccccggcccgaacgtcaccatcagcaccttgtcgcctcgcctcaacctccccttcgcctccatgtacgacagcacgtaccacacgctgctcgccgacgtgttcccccacctgtgcaacgtcatcctcaacggctcgacgtctcgctcctccagcccgaaactcttcttcaccgcgtcgatcaccgccaccccgccggcgtggaggcagatgtggtccacccctgccttgaggttgatcttcagcttggtctgccctcggtggcggcggcgctgcaacagattctgccatgccaggtcggcggcgagccgggcgatttccatggccgggaggacgcgcggcaggaggcgctgcaggttggcggcgaacgcgcggagcgcggccttggggagggccttgctgatgctgaccccgcggaggccatcgtcgtcctcgcgctgcatgatgcaggagtaggcgtcgtcgctggccgcggtggtggagcgcacaaggcggcggagctccatcttggcgcggccgcggtgggccgggtcgttgctgagcagcacggctgcgccgccgcaccggaacaggcactgtgccagcatcaaggtcctctccttcccggcgtaccagtgcggcgccagcgactccgtcgataccaccagcgccaccacgggccgcggcgaccgagcgcgcatggcgttccggccgacgtccaccgcgaccagcgtggcgctgcaccccatcccggagaggttgtacgccgcgacgtcctcgcgcatgccgtaccggcgcaccaccctggacgcgaggcagggctccgggaagaagccattgacgttgacgacgagcacgtcgacgtcgcgggcccggagccccgtcctggcgaggagctccgggacggcgccgtcgaagcaggcgtccatctcgtcgaccgaatccctctgggcggcgagctcctcgcggccgtcgaggaggttccgcggcgcgtaggtccggtcgccgagtcccgtgcgggagatgaggcggacgaggaagcgaaactccggtatcccaagccgctcgttgcgctggacaatcgcgcatgccagctccgtcgtcagcgtgaggtcatccgccggcttgtagcagacgtagtccaggaggtagcaccgcatgccgcggcggcgggaggcggccgtccatgccatgtgcgccaccgcgagtggcggcgggaggaagagcacgacggcgagcaaaggcgtgagctccatagtgttcgcatgcatgcatgagctagagagaccacaggctggtaatatataccagcgaccgtcgcagcaacgaaattaattacagtttctaacttaattttcttgtttc

SEQ ID NO: 9759 - DNA, 1826 bp, Oryza sativa
  ref <308>: DATABASE ACCESSION NUMBER: AK107107
  ref <309>: DATABASE ENTRY DATE: 2002-08-28
agctccggaggagcgccaggattggagaggagacgagagaaaacgaagccgcaccagcagctcgaagcagcagagtggcagccagaggagaggcctcgtctgagtgaaaggaagtccaggaagtcctggaagctgcttcccctgtacattttggggtggtgttcatcgacgagctcttcggcgcagtggacctcttcatccatcgagagaccatggatgctggcaatagaaatccttgactcgtttgggttgagaacggctcgatggacaagggacttgagctggccattgctcaacacttccaggtggtctcctacatggacatggagagccccagggatagcagggacagatgtccaggcatcatcctcatggtgcatcacctcaagccctggggagctctgcaacaggatggtgaggaagccataatcagagtgaggagccaagccgatcttgtcggctttcttcgccgatgactgcgggtagttgttcaaggccacgaactgcacccctccttcaagcttttcttgcaggttacctgtaagttggtggctgcgtcggccagaacttgatccagtcgtccaggggattggcatagtgcttcagaaatgacctggacatgctgatcccgtccctcgagctcgtgtcgtacctgatgggctgccggatgtcgtccgacgcgaactcctccttgcgctccgtcgatagctggaagaactcggaggcggcttcgagggcgccattcatgcaagacctgctgatgccatggttcaccacctgcaggtaagtcgagcacaatggtctatcagctgtctctggtatatctggcgttcgtcagtttcgcatgcagatgcagttttgttactcattttcatgagttggcagcagcttccttttcacgtactacgtgtaagcaaaacattcatgtcacatccggtactagattcgttttttatgagaaagagagagtacgtgtaagcaaaacattcttgtgtctggtatcacatgcatgtgtaataacaactgacaggtgttggaggacaggacaagcagaggaggatgcagggtggtgacaagtaagcagcactaacctcaaagcagccacgttcacggcacgccagcacgatatcccgcacggcgagcgcccgcgaggcactgtccatggtgagccggcccaggttgatcaccggcaatggccgcggcggcggcggcagcggcggaggcactcccttgtgctggctcgccatgtacaagctcccggccacggcgggcatgccacccttctatcttctccggcgagcttgagagcaaacaacacagaggacaggtctctacactgcactgcactgcactactacctcctgagaacacaggatgcctccagcacagcacagatgcccaagtatttataagctctgatgaatctgcagcatcagagagactgaaagcggcatggcatagagccaactgggcagcgggtaaatcccctgcacgtagaccatcttgtatcggccaaatcaatattggggcttttcagggcgattctgtccaggagcaggcaattggctcacctcctcatcttgcgttgcgtttgcgtatgcacacacaacacaactactactaccactacttacttcgtagtagtgcatgcttagtaagtccagatgagcagctacaggtgcaggccatttcgatccaagatagtggccaccagctgtgtcgccgtcgatctgtgactgtgatgagtgaccctgctgcctgccgaacattttgttattcctccctcagcctgcgagttgccgctgggtgcatcccgctttgctttc

SEQ ID NO: 9760 - DNA, 791 bp, Oryza sativa
  ref <308>: DATABASE ACCESSION NUMBER: AK107108
  ref <309>: DATABASE ENTRY DATE: 2002-08-28
aggagcacggggaggagcactgctatggcaggtgaagacggtgcccgccccgccgctcgccgcagcctgccatagcatcatcctctggccgccctgccgccgcagccgccggcctccgctcgctacagcccgccgcctccgctcaccgcagccgttaccccgcctccgcccgccccgccactcgctgcaacctgtcacctcgcagcctgacgacggtgtcgaggtgggagaagggagacaaggcggcgtgaagggagtggtggcgctagcgagataggaaatgaggcggcagtggggccggcttcccctttcgccgtcgccgtagtcttcgtcatccctcgccgtcgccgtcgactcgcatgtgcacggatttgccgccgcctgcttctcccctttcatcgtcgtcgtctacttgctgcacgagcccacctcgcgcacacggatttctcccacccccttcccccttgccgcctccgatgcctttgcctcgcgtgcgcacagttccaccttcgccgtcgccgaagaggcgctcggtgatacctgcgggagaaagaggaaggaggggagaggaggaagaagaagcagcgactgacatgtggggacccactgtgatagacttaaaatagagtgggtagatggagaggctgttggagcgagtaagtagtttgactagccaaataagatggagagttggctatatgggtgtttggagagtccgatttggagaggctattggagatgctcttataactgatgagaattaattacagaatgataaaggtttagttgtc

SEQ ID NO: 9761 - DNA, 1838 bp, Oryza sativa
  ref <308>: DATABASE ACCESSION NUMBER: AK107109
  ref <309>: DATABASE ENTRY DATE: 2002-08-28
ccgcccgcgcgatgactccgccgctcgaatccctccgcctcctcactcctcctcgctccgcggctccgcccaaatccccgctaccgccgccggtacgcccttgcccctcgctcatcgccacgatctgctccgccggtgccgccacactcacgcgccccttctcttgcgaatattctcacgcaccccctcgcccatcgcccatcgccgcggtccccaatcccccgatgctgcctctgccctcctctgtctcgaactcacccgacgctgccgatcagctaatgctccaccgccgatgcccgacgccgtcgccgcactccactgccggaccagcgccctcgctgccgcgccttgcctcgccaaaccttctccccgacgcccccctcaatccctcataccgcacccccagcttcgccgcggtccaaaccgccggttcacccacgccaccggccgcactccaccccacgttctacccgcccctcgcctcacccactgccgtcggtcgcactccaatccgccgagtgcactcaacctcgcatccatgcctccccacctagcctcatgttcgcacgccatcaccgctgccgggcgccagccctcaatccccttgcatccgccggagaccgagacttctacgactgcacgagcctccaagccgccaccactaaaagcaggaagccagcgccggagtcaccaccactaaaagcatgaagatgaggccggagcacgtggcagcattgaggaagacagctgttagggaaagtgtatgttcatgcttgtgaagcaatcatgaaattcacaaaatgagcaccgatcatttgaaaggacttcatgaccaccttcagatggtttcagctaaagcactacacaaacagtctcgatggtcccatgccatggataaggatgattcagaccgcccgcggcacggcgaaggggcttgacttcctccactacactcacccgctggtcatctagcaacttcaaggcatctaacatcctcctcgactcgcttcggaatgattattcgctactgaagacaacctacaacaaggtctctaacacctgacaccactgctgccagtccgggcaccccaatgaggccggtgccctcgaatgacaccatagcaagtgatagagtcggccaagataactcctctgtcaattcacgagtatattggcgtgctttggattaggaaggcagtctcatcctattggacagtcaaggagaatctaattggcagtataaatataagagaattatgtgatgatcaagttcaacatcacagatttagagattctcccacttactttctgtgttctttaactggtggcacaatgagtgctatcagtataattaaaatatagattttttttatatgcattactctttggtcaacgagttcttaatagacccttttttaaaaaaaaattctttgcatgcaagaggaggcaacctacttgggatggcagcacctctagccacaagatttggagggcaacaagcagacgcaccaaagggagctctgaggaatgatgtggcaaaatgagcttgctggtaagatatgacatgagttcatagagttaatcgctactgcaaccatctctggtgagtttttcttcttctttttttttttgagaaagaccacataagaaagggatgagatgagcacttctagctgcaaatgcttaggcgaagttgggattccatacaaaagaaatggtatttaacttctcaagaatacattgataaatatagtggtgtttaacttctgatgtatgaattgtacatgcactaaaaagcatattaatctgctctcttatgtgtgcatcccaagtttgag

SEQ ID NO: 9762 - DNA, 827 bp, Oryza sativa
  ref <308>: DATABASE ACCESSION NUMBER: AK107110
  ref <309>: DATABASE ENTRY DATE: 2002-08-28
atgctcacagatagaaagaaaaaggaggagagcaagaatgagaatgagcaaggccctcgccgccgtggtggccatctccgtgagcctgagcgcggccgctatgggcgtggacgcgacggtggagagcacctgcagtgacgcggccgccagcgacaagcgcgtccacttggcgatgtgcctgtcgcagctggggcaccaccgcgacgcggacgcgtgggggcttgcgaaggcggcaaccctggtgggcgtggacaaggcggacctcgccgccgatgacataaaggagctagaggccggggcaagcacggcgggcatcaagccagcgctggcggagtgcgcgaagcagtaccggggcgtgggcttcgcctttgccagcgcgcacgacgtgatcaacaatcgcgcctacgacgtcggggagaagaagctggacgaggccctgtccctgacgcagaagtgcaacgccgccttcgccaagatcggcgtcccgctgcagcagccgctggcccagctcaccgccgacaccatccagatcgccatcatagctaaggctatcacctgcctcgtcaacgtcaacaataatccagctctggttgcggctgcggctgcggctgctgcagccaaggctccccaacagagccaatacccataaatttaatatcatatcatccctttttatttgttttttggttttgggcacaaattctgccggtgcctttgctttgaaagactactaaatattttataaattcaaaacaacaactactccgtagtagtgtactactccacaagcgattgaaagccaaaaaaaagatactactaattgattg

SEQ ID NO: 9763 - DNA, 2858 bp, Oryza sativa
  ref <308>: DATABASE ACCESSION NUMBER: AK107111
  ref <309>: DATABASE ENTRY DATE: 2002-08-28
aaacttattacatttttttaaaaaaagaagaagagcagagtccagatttgacctgttatctgaacaactccacaaaccataccaaatgtcaagaatggattcaaaaaattaaaaaaaccagagttattcagataaagggatgatggtctggataaaggaaatgcccttcattttctcatcattttatcaattttaggtcatgttctccaggcaactacacaacattgtagtgcttctatcccgttagaatggctaacggattaatagtctgaaacccctctaacaaccaaaccatgataaattctgaagcatgatatcttaatagataaagatttgtgatgaacgggagcaattgtttttattctaaattccagcatatgcaaaaaacagaaaaaataatatcttctcatatcaatcactcaaggaaaacagggaaaaaaagagagaatagtcccgcagtagttcatcattaataatttactgcccctttttgagatcatgcataatcacagttgttatgcatgccaatgatcctgaagacgcagatgaagttattactatgctttgcctgagagcctgacagctaatctctaggtacgctgttgaaaaatcatcacaatgcccagatatgcatggtgaaaaatcatcacaatccaatcagctcacatccctccccaattcatctatacgcacgctgttaaaaaatcatcacaatccaatctgctcacatccctccccctttcatcacacatggaattcagcggtttgatgcactcaccgatgcacacgaccttactcaaccgccaaaaacgcaaggatttttcattcagttaaagaagaggaagggggaagcaatggatgagtacctgcttggccgccattgccggtgaagcatagaacatgtagcacggcctgcccgctgacccgaacatgatggaggagcgggaggcctcggcggcggccgtccaggcgacctcgttctgcgccggcgcggtggagaagccgtccgcagggggaggtggaatgcgggcgctgggggatgggggatggggaggaaggaggatgaaggcggcggcgtctggacgatggatcggtgaccgctgttgatacggagggtatcgaggaggaagaaggatcaaaggcaccgctcgggagagaggggaacgcgtgcgcgtctgcactcggcaggatcagagcattgcggaagcgatctgagccattggatttcacgatcctacgtttagtattacgcgtgtctatcaggattggagtcaccgctaccactacggaatttttaagtagcagagattacgaatctcaactctaattgcgattgccactaaatattaggggtataaacggagcggatattatccgatccgctccgaatccgtccgatgtaaggatatggtaagggtttttagtatccggccggatacggatgcggattttgtcaggcggatatggtatcaatgatatccgatggatgcggattatccgatattttaatcggattatccgatgtactgtttggcggataattcacaactttcaggccacacaacaactttcagacccatctagcccatctattataaccctaacctaattcactcctcccccagatccctctctctctctgccgtcagccctcagccgtcacgaggtcgaggagtctgagagtggcggcgcgacggtgacccagcatggcggccgctcctcctcagtcttttgctctccccaacacgcgtcggccgctcctgtatgcctatggaactaccgaactattgtaatgtgtcctgtgtggcagtgtgcctatatgcctgtgtgcagtgtgtgctgtatgcctgtgtggcagtgatgacttatatttttaaattttaagcaacgcagtgaccattgaactactgaactgaacacttatattattgataatttattggatgtgttatattaagcaaaattatattattgatgggttttggttggtttttcctaaagagctgagatcatgttcagatgttgttttgctatcgtattgcggctaattgtaatgctgccctcttattatatggactgaatacaaacttgacatccgataactttttatcctttttcgaattgagtccgcaccgattccgcaccgaatccaacgtccgaaataatccactccacatccgcacgtcatccgtacccgctccgtatccacttaagaaatagtttaggatatgatagagctattatccgtctaaatccgctccattttcatcctctccttccctcccattctctgatctagtcacaacttgctgagttgcttcttttcatatgtgcgacgggagagattggatcgattttttcttcttttctttttcatgccacagaattggatgattttttttcttcttttctttttattttttgggacaaaaaccgtgatgacgtgcatgcttggtgagcacatttttaccattatttcttaattatgtgcacgtgaaattttttgtcctttccaaaaaaaatattatcaacattgttttgcaagataaaaagataatatttcttgcataaaaaatacaacatttcagaggtttttaggtgacaaaggaaaacaaccttcacaaacaaaatgactaaaccatcagtgcttctcaaattgtcacaaagtcattaaagatgcgaaagggcctgtagcctagtggttacaagagtctaagtatcacttgaggttctgggcaagacgcctgtgatgactttgtcaatctgaaggatagcggctattgtaagtgtttgtattgtactgtttaattctaaaaaaagtcatctatctatctatctatctatctatctatctatct

SEQ ID NO: 9764 - DNA, 2287 bp, Oryza sativa
  ref <308>: DATABASE ACCESSION NUMBER: AK107112
  ref <309>: DATABASE ENTRY DATE: 2002-08-28
ccacccaaaccctctcgtgtcgcgcggctcgcctgcccccgctccgccgaccacgggcgcaccatggcgctgccgccaccgacgccggaggtcatggacgacctcaccgcctcgctcgcgccggagctcctctccgagatcctcctccgcctcccgccggacgagcccgagcaactcttccgcgctgccctagtctgcaaggaatggctccgcgccatctgcgaccccggcttcctccgccgctaccgcgccttccaccgatcccctcccctgctcggcctcctttacgccgccaagttctacagggagcccccgccccccacctcgcccgcaccaccgcagtgcccctctcgcccgatcccacctttcgccgggccctcgattgccgccatggccgtgccctcctccacgcttcggacgatgattggtatctcattgtctgggaccccgtcaccggcgaacagcaccgcgtgccagagcccggcatcccgtggctgatctactccagcgctgtgttctgtgccgtgagcggctgtgaccacctcgactgccacggcggtcccttccgagtggtctttgtggccaccgatgacggggcggatccaacacctacacccacaaaactcatggataccccggagcacccccttcgattttttcactatgaatgaactaaaagtccctaaatggctggaggttgaaaaaactgtgtaattgagcctccctaattttttgtttctgatccacccgtgatgagtacaaagatctcgttaaggcgagcatgtactcatcggagaccggggcgtggagcaccccggtagttcttgatgatggtcttgattcctgggaacagcgatggcgagatgcacagagtagaggtgaattctaccgcgtaccttatgtcatgcctaggcgagttgcccttgtcggagatgaaatctacttcacacttcgggaggataatgccatcatcaagtacaactggggcatgcactgcttatctgaaattgactcgccgtcgccagacgtgtatggcattgccctcatggagatggagaacggttcactgggttttgcctgcattgaggattccagcctttatgtgtggtcacggaaggtgaattcagaaggggcagcagaatgggtacaatgcagggtgatcaagctggacaaaatgatacctgttgccaatctcagtgatgaagcatttgtggttggctctggggagggtatgggtgccatattcgtgagcacaggtgttggcttgttcacgatcgagctcaagtcaaggagggtgaagaaggttgcagagcctgaggtctactttagcatcttaccctacatgagcttctacactcctgatcgtggcacattgttatcgctagcaaggactcactgatctttgatgtcatgctcaagagtaacttgttgcaaaatggacaaatccattgtcttgactcttgaatctgctgccactgacttcttccagaactactactactactaagctgtttattttttgttgggcagtacaagtacgaacaatgccaagtctgatgttcaaatgtggttgttgtgtcaaattcatcctaccgaccatgaactagatcagcaagtcgtgctaagctgaatagctggctccctattctttattgttcgttttgagagcatggtttgcgctttggccttacaggaatgggccaactatcggaataagcatcaacacgctgatgaggccatgaaggctcaggtgatagtgaagggtaagcagccatgagaaggggaaaagttaagatcaagcccattgcaaatagaaaggctcgtgatgtatgcttctccaagcgccgccaggttgtaatcaagaaggctaacgaactcagcatattatgtggtgtcaatgttgctgttgctgtgctctcacctgctggtaagccctttttctttggctgccctactgttcaagctgtcactcgtcgcttacttggtgtgggtcctagtaaccctaccatgggtgatgggggcaatggtgatgagactgacatagtgcatgagctcaatctgaagtaccagaagttgcaacaagagaatgaagtggagaagaagaaaaaccagcgtggtcaggatgtgaggctagctagtgatgtaaatgcattggggctgcatgagttggaggcattcgacagtaacctcaatgtaatagatgacattgtcgattcaaatgatgtggttaagaatgccaagcaaacagctgagccccagactcagatgagcgtggcatcaaccttgc

SEQ ID NO: 9765 - DNA, 663 bp, Oryza sativa
  ref <308>: DATABASE ACCESSION NUMBER: AK107113
  ref <309>: DATABASE ENTRY DATE: 2002-08-28
atctccctctcactctccagccctctccctcctccctctccccctctacccactcccggcgatggtggcagcctcggctagggcggcggtggcggcagcatcggtgagagcggtggcggcattgatggtggcggcatcggctagggtggtggcggcggagcggatccgtcgtctgccaccgtggggagggcggatctgtcaccggccaccgcggggagggcaggtccgtcgcctgccactacgggaagggcggatccgtcaccggtcaccgcgccgcgggaagggcagatctgtcgctggcgaccgtggggacgatggcgcgggcctcaggcagggcggcgatgacgacggcggtggcagcagtggtctcccagcctcgggcgtttggatccgtcgtgggcgactgcggggatgacggcggcgggcctcgtgctggctggcaacggcggcggtagttggattagggttccagccttccagggcgtcttttgattttcttttttttgattttttattttctcgtgcacgtgattttcgtgtgcgggtgtgtcaactgcacgaagaaaattggattttctcagacactttgtttcagacgggtggaagatccacacctgaaaatcgctttcggctgcacggaaaaatcgttatcgtactagtgat

SEQ ID NO: 9766 - DNA, 1585 bp, Oryza sativa
  ref <308>: DATABASE ACCESSION NUMBER: AK107114
  ref <309>: DATABASE ENTRY DATE: 2002-08-28
accattcctccattcttcccaaccatctccaccttccccgcatccgcagtcgccgccgatctccctctccgctgtcggagacgacgcggccaccaaaccctagccgcagcagcagcagcagccgcccatggcgagctcacgcgcggatccccgcccgctggcatgaccgcagcggccgccgatggagccggggccttcgtcgccgtcgccgtcgtccgcgtgcgcggatcaccccacgccggcgccggaggaggacgaggagggggggagggggtgggtggtcgtgccggcgagcgaggtcccgggagccgacgcgcccaaggtcatcgactgggaggacctgcagcaggagctcgcacgcgtctggagcctctccgccgcgctcgccaccgccagggaacgcaaggcgctgctcgccgcgcgcctccagtccgcgctcgaggcaaggaaggcttccgttcagcaggataatgagttggcggaaatcagggaaagagtgcaagcacgtgctgatttcatgtgggatttgaaaatgcacactaagaaaatgaccgaggatgtggatgatcgaagagaggaactccgcatcaagatccgaaccttgtcaacaacaagcaatactcttagcacagcgcgaaataaacttaaggaagctgataaattgctgtcaggggaaaatggtctccatgtccgtcttaaaactgtggaaaggatgttgcgcacaagacagcaatatatgacagcacaagtagcacatttatatcctgtgagacccttgattgagcgatctccagctaacaagcctagcttcttgaactccagtattctcaaaaccagagatgcggaatcaatggctccgaatggtcctcaaaatggacaggcacctttggcaattttgggtctccaactatcgaagcttacgatgaaaaagactggctactttagtgacaagactgagattcagaattctgccaccgcattgggttatgttgcacatgcagtgtcccttattgcatcatatcttgatgttcctcttcgatatccgctgcggttgggaggttcacggtcatatgttcttgatcgcgcgccctcagttgagtcatcgtccttagcttctgctataagttctgctcctctgagtacaaccatgcgaacaatggaattccctctgttttttgaaagccaggagacaacaagatcagcatatgcaatatttttgctaaacaaggatattgaacaacttctgaatcacattggtgctgaaagtcttggcccgaggcatgtattagctaacctcaagcagctgactactattgtccagtcacagcagtacatttctaattaatttagtcccagaaacatatttgaagttctgtgagagttttgcttacggctaaatccagaagcggttggtgctatttttagcaagcacctttgttttccagaacacagatgagttaaggtttttctttgctgatatgttcactgtaaaatggataaatggatttgtcactgtaaaatgtgctcacttggtgtacaggaaatagatgagtaataaatgagaaatagtttgcatgttcaactt

SEQ ID NO: 9767 - DNA, 1930 bp, Oryza sativa
  ref <308>: DATABASE ACCESSION NUMBER: AK107115
  ref <309>: DATABASE ENTRY DATE: 2002-08-28
catcatcattctcacccgttgaatttaaatggtatatttcagtgagggacagaaggctccttcgctcgctaaatgatacaaaatatcccttggatgcaccatgcatcgagatctcatcccctcctgctagtgttgctactgctactactgatggttctgaattaggcggaacaataagcaagagaaggcccattgccattagcagggctgaacaacgttggttgatgtcgaccaaaagccgacgaccagctgctgacaacaagaagttatatgcggatgtcgactccacgatccagcacttgcaactacaagcaaccatgaacggcaactggatgtagccttataaacaggagggcagcacctctcactacattagcttacaagatgataagaggatgcagacgaaaccattgtcgtcgccatctttgccaggttccatctgtgaaagagcttcaggcctgcacgtgcatgacagcttgtctatcgcaagtatcacaagccattcaaatgaggcacggagatggtataacctaaagtggtgcagagtggagagatgccctaacattgaaggcgttgtattcactccacctagtactggtagtaacataattttctgttacctgaagacattctgggcatcccaactaacaagggcgcgccacatctaggactggagcacaaggggccagctccattttgagcctgcaaaagagtcattctggttgaaagtgctacacctagattgctgccccaggttgatatatgtgcttcccttatatgacaacagacttcctatgcatactgtgtgttggaaacccttgagatcgtgtgttgtggtgacctcaaggatgtcttccgagtgtatgataataatcaagagcttctggtggcaactaaagaattctcagagctgaagcacatccacctgcacgagctgccctctctgcaacgcatctgcgggcataggattgtggcgcccaagctcgagaccatcaaaatccgaggctgctggagcctcacccgcctaccggctgttggtcttgacagtacccgcaagcccaaggtggattgcgagaaggaatggtgggatggcctgcagtgggacgggttggagaagggacaccatccttccctctatgagctcacccactcacgctactacaagaagaaactgcccagaggctccatgctcaggtgatcgatatatacgtccatacactacatatttgatacagtaatcatctacgtgtcattccctttccatcatccaatggctcaaaatcttcagatcgatctatctctattatatatgtccttacttgggctggtgttcaatgtgctcgctcatttcatcgtatcatttgcaacggcagcaatatctaatgcatgatgagtaagtacatctccggccggcatccagacgctcgtcatctgcttgttactagcttggattctgttcattcctgcttcttggtttttgtgtgaaattttttttaaaaaaatggatgctcaactggtgtgtgagctctgcatctatgtgctcagttattttctccatacatgcttgctttccatttggccggttggtcgatctgattgttcgaccgatccatccatcagagtacgtactttgtacgcatcatcttaatttctagatagatgatcacacatacatatgaaaactttgatctctagcaccgtttctggtgtggtgtgctaattagagatcgacgaataaatcatcagcttcagaggcatgagaagatccattgggtgatactcatgcagtcgagttgttgttgtgcacttgtttgtgggtgtgtgtgtgttcgtgtgatttgtcagcatatatggactgacctaagtttgtactcctaattacttcacttgtatgaatggaagcaatgatgctaaggattgtgagtgtgac

SEQ ID NO: 9768 - DNA, 1269 bp, Oryza sativa
  ref <308>: DATABASE ACCESSION NUMBER: AK107116
  ref <309>: DATABASE ENTRY DATE: 2002-08-28
ctggctcttgaggcgccgaagtgacctcttccaccgcgccgccgcctccggtaacgacgatggccgagacggtggacttcgcgagcggcgacgcggcggagtggcgagcggcgctggcggcgtacgaccgccggctcgcggccctgggcaagcccgacctcgtcgaggtcgactccttctaccgccgcgacctccccgatctcctgcgccgccgcgacccggagcccttcctcgccaagcccgagctggtgcgcctcctccaatggaagctctcccgcggcaagtggaggtcgtctcatcccgctcttagattttctttcctgttcctctttagagcacttgaacttctggttcccaggggcgtgtgatgttgtagtagtatttctcgctcaaatctccctagaaatcgtgccgaaatgtgtggatcaattggatgatgctagtatcttaagggtgcttggactgatttgatccattgatttagggactcgttttcttggcaaatcaatcattaccctagttggttagttgatgatactcctacactaccctgttattatcaaactcgttgggggaaaaaataatcatattgttgctctgttcttttgtgcaggccgagactgatggatttcgtcaagggcttggaggatgcagtggtagaatcagcatcgtgcaaggcgttcgcagcgctgcctgacctccgcaaggccatcaccgagctcaccgtgctgaagggcgttggccctgccacggcatccgctgttctcgctgcctacgcgcctgatgttgcaccgttcatgtctgatgaggctatggtggcagccttaggcaatgcaaaggagtacactctgaagcagtatcttgcttttgctgaaaagttgcaaactaaatcgaaggaattgagctcaggagaagaagttttcactacttctgatgttgagagagcgctgtggagctcagcagttgcatccaagtctcttaaggcgccaccaggaaatgaccttgagaacaagtcaaagactcatggcaagagaaaacgatgactcttgctgccaatgttctagttgagctaggagttactgatggtaggtcttagaacttagattgttcattgtatgaagttaagcaatgcttctgcatctgcaaaaagaatgtggactgcgtgctcccgatgagcaggttaaaccctttggaaatgtcttccgctgtgagtctgtacatcagtacatggcactgaatgagctgggggtgatgggtgtgtttttctcc

SEQ ID NO: 9769 - DNA, 1422 bp, Oryza sativa
  ref <308>: DATABASE ACCESSION NUMBER: AK107117
  ref <309>: DATABASE ENTRY DATE: 2002-08-28
gcacaaagcaaacagctaatttgtgtagcgatccagctacagacagacgacaccacaaacatagctaagtagcttaggcttaggcttagctaagtacaagtgcacttgcgcttcaaattttgccggaaaagcgaccactaattaagctactggctagaatggcgatcgttgacttggtcaatgccggagagcagcagcagatgggcagcaagagagcggcggcggaggatggcgacggcggcgtggacgacagccgcgagtactactgccggcgaggcgtccggcacctgtgcgacagcggcattaccaggcttcccggcaactacgtcctcccggcctccgaccgccctggccaagccgccggcgccgccgccgccgccggggggtcagtgaagctccccgtggtggacctgtcgcgcctccgcgtcccttcggagcgcggcgcggtgctccggacgctggacgcggcgtgccgggagtacgggttcttccaggtggtgaaccacggcgtgggcggcgaggtggtgggcggcatgctcgacgtggcgcgccgcttcttcgagctgccgcagccggagcgggagcggtacatgtccgccgacgtgcgggcgccggtgaggtacggcaccagcttcaaccaggtgagggacgccgtgctgtgctggcgcgacttcctcaagctcgcctgcatgccgctcgccgccgtcgtcgagtcatggcccacctcgccggccgacctgcgggaggtggcgtcgaggtacgcggaggcgaaccagcgcgtgttcatggaggtgatggaggcggcgctggaggcgctgggcgtgggcggcggcggcgtgatggaggacctggcggcggggacacagatgatgacggtgaactgctacccggagtgcccgcagccggagctgacgttggggatgccgccgcactcggactacggcttcctcacgctggtgctccaggacgaggtggccggactccaggtgatgcacgccggcgagtggctcaccgtcgacccgctcccgggctccttcgtcgtcaacgtcggcgaccacttggagatattgagcaatggacggtacaggagcgtgctgcacagggtgaaggtgaactcgaggaggcttcgggtgtcggtggcgtcgttccacagcgtggcgccggagagggtggtgtcgccggcgccggagctcatcgacgaccgccacccgcgccgctacatggacaccgacctcgccaccttcctcgcctacctcgcctccgccgccggcaaccacaagtccttcctccactccaggaggctctactgatcgatccattcttaattggatcatctctacactataattaactggatcggagtactcctgtaattataattataattatattagctactactactcatgatccacccccggt

SEQ ID NO: 9770 - DNA, 1367 bp, Oryza sativa
  ref <308>: DATABASE ACCESSION NUMBER: AK107118
  ref <309>: DATABASE ENTRY DATE: 2002-08-28
ctctctctctctccggcgtctgtcctgaccacctcgcacgtccgccgtctcctccttcctctcttcgcaatcacaatcctgaagaaattccggaacacatcgagatcgatcgaggagagaacgacgagcggtctcgtccagcaagctgtgcaagattgattcggacgcccgcctcgaggagcagccgatggtgccgcacggccgcgtccacccggcggcggcggcgagcagctccgacttctccggcgagatgaaccagtccgccgcctcctccgacccctcctccagcccgccctacagcttccacttcgagaagcccctcccgccgacggcggcggcgccgccgcccgccgacgcgcggcggtaccagcagctgctgccggcgccgcagcccggcacgtacgtggtgcagatgcccaaggacaaggtgttccgcgtcccgccgccggagaacgcgcgcctcttccagcactacacccgccgcgccaggcgccgcgcccgctgctcctgcgcccgcgtctgctcgtggctcctcctcgcgctcgtcctcctcgccgccgcgctcgcggcctccgccgccgtcgtctacctcgtgttcaagcccaggcagccggactacacgctcctgtccctcgccgtgtccggcctcggcggcatcctcggcaacgcctcctccaccgctgcccctgcccccgtctcgttctcgccggagttcgacgccaccgtgcgcgcggacaacccgaacggcaagatcggcgtgcactacgagggcggcgggagccacgtcgccgtgtcgtacggcggcgtgaggctcgccgacggcgcgtggccggcgttctaccagggcccccgcaacgtgacggtgctggtggcgacggcgaaggggttggggatacggttctcggggcgcctgctcggcgacatcgcggcggcggggcggctccggtcggtgccgttcgacgtggacgtcaaggtgcccgtgcgcctgcaggtcggcggcgtgaggacgtgggccgtgccggtgagggtgcggtgcgcggtggtcgtggacaggctcgccgccgacgccaaggtggtgtccaagtcgtgccgcgtgaaggcgcggttcctcttctggaaggactgatgaggaagcaagaacagtggagtaatcggttgattaaattaggagaagaagaacatgcagttttttggcaccaatggattcttgctgtgctttttcaatgatgttttactgtaatcatcatctgttcgtgggtttgatagagtaatgttgatcatcctaatgccaaaatcgtgttgtagttgtgatgttcatgagttgcacctatgtgttctttacaaatgagaagaaaaaagtttttggc

SEQ ID NO: 9771 - DNA, 1136 bp, Oryza sativa
  ref <308>: DATABASE ACCESSION NUMBER: AK107119
  ref <309>: DATABASE ENTRY DATE: 2002-08-28
gcagaccgcacttccatcgatctctctcctcgccacgggccacggccttctcctaacgggagccatggaagcagacgcgagccatacacccaccacctcctcctccgtctccgtctccttctcctcctcgtcgctgtccacttcctcctccacctcctccctcgtcgacaatggcgcgcaagaccggcccaagagctccaagcccaaacacgccgccaagaagcgcaagagagcggccgcggaggaacctgccaatgccgcccacggcgcaggggaggataccagcagctgcagcaccgacgacaacgcggcggcgagcggcaaggcgcaggcgggcggcggcggcggcggcgtcgacagcagcagcacctgcaccgccgcctcggcgccgaggagcggcttcaagcacccgtcgtaccgcggcgtgcgccgccggagctgggggaagtgggtgtcggagatccgggagccccgcaagaagtcgcgcatctggctgggtaccttccccaccgcggagatggcggcgcgcgcccacgacgtggccgcgctcgccatcaagggccggaacgcgcacctcaacttcccggacagcgcccacgagctgccccgcccggagtccacctccccggcagacatccaggccgccgccgccaaggctgccgccgaggtgcggtgcgaggaggagtcgtcgccgtcgtcgtcgcccaccgccgagcaacccgaggaggaagccgcctgccctgacacggtgcacgccgacggcggccaggacaatgctctcttcgacctacccgaccttcttctcgacctacgggacgggctctggtggtcgccggtgtggccggcggcactggcggccgaggagtacgacggcggcgacgccgtcgtgctcaatgagccactcttgtgggccgagtagccattttacctttctgggctcatgaataggctacaacgacaactctcaagaaagaaagaaaaaaaagggaaaaatgttattaccgctatatttagtagttactgctattgacaaagtttagtctatgttgtgcttgattaggccatgaagcctgtgtgctttgtgtaccaacaatcaaaaagatctctctactaatagaagttaattaattcgaagc

SEQ ID NO: 9772 - DNA, 1509 bp, Oryza sativa
  ref <308>: DATABASE ACCESSION NUMBER: AK107120
  ref <309>: DATABASE ENTRY DATE: 2002-08-28
gacgagcactaatctcattctcatctaagcaagtgccattctcttctcttctcgcactcgcgctgcaccaccaccaccaccacgcttgggcggccaaatttagccgcgcaactctctccggcggtcggcggcgagcaatgccacccccacctccgccggccgcggccatcgggaggaggtcgtccatcctcagcttcgcggcggcgcgggaccgctgcttcagccgccgcttcctcagggccggcctccgcccgctcgccatcccgctccccaccggagtcgacgacgacgcgggcaccaccgtgcacgtctgggtccccgccaacccgccgcggaacccgctcctcctcctccacggcttcggcgcctccgccacgtggcagtgggcgccctacctccgccccctcatcgccgcgggctacgaccccatcgtccccgacctcctcttcttcggcgcctcctacacccgcctcgccgaccgctccgaagccttccaggcgcgctcgatcaaggcggccatggacgcgatcggggtcgccaggttcggcctggtcggggtcagctatgggggattcgtgggctacaggatggcggccatgtacccggacgcggtggagagggtggtgctggtgtgcgcgggggtttgcctggaggagaaggacctggccggtgggctgttcccggtggccggcgtcggggaggcggcggacctgctcgtgccgcggcggccggaggaggtgcggcgcctcgtcaggctcacattcgtgcggccaccctgcattatgccctcctgcttcctctgggattacattaaggtaatgggctcggattatatccaagaaaaaactgagttattatatgctttgattagtgaaaggcagctttcagatcttccaataattagccagccagcgctcatagtttggggggagcgggataaggtattccccatggagttggctcatagactgaagagacatctaggtgagagttctcgattagtagtgataagaaatgctgggcatgcggtcaaccttgagaagcccaaggatgtgtgcaggaacatcattgagtttttccaagagggagtcaccgaacctttgaacgatgagaaggtgtagcttccgtcgacggcagataggtctctcctcgtgagcatcttcgtgtggtactggtacacaaactggtaaaggcttgcaccatccaacaaatccatcctcgactatctggtgtatcttctggcacggtgcaaccccgagcggtgtgaagaagaatcgagtttcggaaagcaaacggctgccagtcaatcgtgcctgtgccatctctctctctctctcttaccgtgtaaaattaacttaattaggtatttcggccagtttgtgatcctcttgttcacgcaagcatgcatgatgcaacagaggatcacccagttaggcaggccgagatgtggaagccgttaaattgattgattttggcaataaagtgaaacagcccgaagcgtctgcaagt

SEQ ID NO: 9773 - DNA, 1650 bp, Oryza sativa
  ref <308>: DATABASE ACCESSION NUMBER: AK107121
  ref <309>: DATABASE ENTRY DATE: 2002-08-28
tgacatccttcaatgtgtcctacaataacctgtcagggcctgtgcctgtagctctttccagcaagttcaatgccagctcgttcgcgggaaacatccagctctgtgggtacaatggctccgccatttgcacctccatttcctctccagcgaccatggcgtcgccgccggtgcctttgtcgcagcggccaacacggaaactcaacaagagggagctcatctttgcagtcggtggcatctgcttgctgttcctgctcctcttctgctgcgtcctcctcttctggaggaaagacaagcaggagagcgagtcgcccaagaagggcgccaaggacgccaccgccaaggcggcggccgggaagtccggaggcggcggtggcggctcgggcggcgccggtggtgacggcggcggcaagcttgtccacttcgacgggccgctctcgttcacggcggacgacctgctgtgcgcgacggcggagatcctggggaagagcacgtacgggacggtgtacaaggcgaccatggagaatggcaccttcgtcgcggtgaagcggctccgggagaagatcgccaagaaccagaaggagttcgaggcggaggtgaacgcgctcggcaagctccgccaccccaacctcctcgccctcagggcctactacctcggccccaagggcgagaagctcctcgtcttcgacttcatgaccaagggcaactcacctccttcctccatgctcgcgccccggtcagcccggtggactggccgacgaggatgaacatcgcgttgggcgtggcccgtgggctgcaccacctgcacgcggaggcgagcatcgtgcacggcaacctgacgagcaacaacatcctgctcgacgaggggaacgacgccaggatcgccgactgcggcctgtcgcgcctcatgaacgccacggccaactccaacgtcatcgccgcggcgggcgcgctgggctaccgcgcgccggagctctccaagctgaagaaggccaacgccaagacggacatctacagcctcggcatgatcatgctcgagctcctcaccggcaagtcgcccggcgacacgaccaacggcctcgacctgccgcagtgggtggcctctgtcgtggaggaggagtggaccaacgaggtgttcgaccttgagctcatgaaggacgcggccgccgcgggctcggagaccggcgaggagctcgtgaagacgctcaagctggcgctgcactgcgtcgatccttcaccggcggcgaggccagaggcccagcaggttctcagacagctcgagcagatcaagccctcggtggcagtatcggcctcctcgtccttcaccggcgagccgagccaaaccaccgcgacggcgacgacgatcaccgacgacacaaaatcgactattacagagtagtcagcctcttgcagactgaaaagtttcggttcttagttacttcagatcatcaataagtagactccatagtctatttttcggtctgtatataaggcttttaggggggttaggagaattttggtgctcatgccattctttgattcctgaattcttttgtatctgccagaagcactccttgttatcagaagatgatatgggagtgctggcttctcattaagtttcaggcaaacttgtagtgcttcagcacttaatgc

SEQ ID NO: 9774 - DNA, 1947 bp, Oryza sativa
  ref <308>: DATABASE ACCESSION NUMBER: AK107122
  ref <309>: DATABASE ENTRY DATE: 2002-08-28
aaagcgtagcttataccagtagcagtaggaagaaggcgccatggccaggcacaagagctcgccgccggcgatccgccgccgcggggtcggcatgctccggtgggcggtgcgcgtcgcctcgagcatcgtgctctggacggccctcctccatttatccagcctcctcggcctcccccgcccgccgctcctcgccgcccggccctcctgcctaggcggcggcggcggcagcaactccagcgcctcctctgctgtaaccgtcgctgccgccgacgaggtcgggcgcctcgcgcccccggctgtgcctcgcaggagggtttataagagtaatggttatcttcttatttcatgcaatggtggtctgaaccaaatgcgagctgcgatatgtgacatggtaactgtagcacgctatatgaacctgactatggtggtacctgaacttgataagcagtccttctgggctgatcctagtgattttggagatatttttgatgtaaactacttcatcaattctttacaagatgaagtaaagatcatcagggaactgccacagaaattcagcaggaaagttccattctcaatgcagccaatcagctggtctagcgagaagtactatttgagacagatcttgcctctagtacggaagcataaggtggtacgttttagcaggacagattctcgccttgcaaataatggccttcctttaaagctccaaaagcttcgttgccgtgttaactacaatgcactacaatttgcaccatcaattgaggctcttggcaaaaagatgatatcagctcttaggaaaactggatcttttattgtgcttcatctgagatacgagatggatatgcttgcattctctggttgtacacatggatgttctgacgaagaaacagcagagctcacgagaatgaggtatgcgtacccttggtggaaagaaaaagaaatagattctgaaaagaaaaggctcgaaggattatgccccctaacacccggagaaacaacattagtactcaaagctcttggtttccccagggacactcggatatatattgcctcgggtgaaatctatggtggtgaaaaaagattaactgaactgaagacagaattccctaacattattcggaaggagatgcttttatctgctgatgagttacgccccttccagaagcattcgactcaaatggcagccctggactatcttgtgtctattgctagtgatgtttttatccccagtaatgacggaaacatggctaaggttgtagaaggacatcgcaggtttatgggctttcacaaaaccatacagcttgataggaaaaagctagttgagcttatagatcttcttgaagatcaggagctgtcctgggacgaattctctactgctgtgaaggagctacacgagggccgaatgagcgaacccaccagaaggaaagctattgccgggcagccaaaggaagaggactacttctatgctaatccacatgaatgtcttggagctgcgagaaagcgaagggagaagctaaaacatactgagatatgaaagctgcctggtaggctgcaggaaatgcaaaacaaacttcctcatttaactgtcaaggctcatatttttgctgagccacaccccagttagtgtgaataagtagtagcacttgtctgccttcgaaagctgatcgttctgacgcaaatcgaagcaaacattcttctgaagatccacgtggttatagtgtcagatgccatgttgtgtcggttgtatttgctgttgaagacttgaagtacgtatttagtgtggaaaatgcaatgttaaactgttgatggacctattgtattgatgtagactaatagtatatacattgacctggtaatctccccatgcattgcatgaaacatcgttgagcactggtacattatatgaccatcattgattttttgtattttcaagcaatattttcc

SEQ ID NO: 9775 - DNA, 1920 bp, Oryza sativa
  ref <308>: DATABASE ACCESSION NUMBER: AK107123
  ref <309>: DATABASE ENTRY DATE: 2002-08-28
acagcaaagcccgaaaacagaggaagaagaagtatactcctccactaggaggggttcacagaatctccagccgcaaaggatacttccaactccgccgcccattcaaaatctccgccacctcccaatccaaacccctcctcctcgacgattccaaaaccatcgatccgctcgccccgccgcgccgccgaccatcgccatcgccattgccatctcgccagattcacctcctttccttgccgcctccgggagggactccaagaaaccgcgagaagaaagccatggtgcagaggaagcaagcgcgcaagaagcccaaagattctcaacttggttccaacgacgggttgccggcggatcacgcgcgcggtggcgccattgtgcggacggcgctcccgaactacatgagggcgacgagcagctcggacgcgaggggtggagggcgggaggcggcggcggccaccggcgcgccgccgcggagggagcggggcgcggcgagagggaaggcgatggtgctcgccgacgggggtggtccgttcgtgagcagggcgacgtgctcctccgccatgagggggctcgggcgcgggctcgggctccgcggcggggcggcgcacgcctgcccgtactcctactgctcgttcaaatgccacgccgccgacgcggacgtggttcccctcagaaccctcgtggcatcgcggaggcggctgatcaagacgcagcagagcatgaagctcaagggcgcgtccccgttccgcaagcccagcaacggcggcggcgccgccgatggcttcttcgtcgagatatactccggcgccgccgccgcagccgcaccgacggtgagctcgggcgcgagctgcagtgatctctccacggaagacaatgacgccgcggtcagggagggggagtatgccgtgttcgatcatcggagtcgcggggatgacgaggacaaggcgcgggattcggatggttcagtggacggttcttgcggatccagtgatgtgatctcgggtggttcggtcgatttgttcgtgacgaaatctcgcggcggcaaacaagaaatcgatggagggaaggggatttacctggatcaagaagcagaggactttgatgcctgcaagtcagacatttcagaggagctggatgcaaaatatgaagatggtggtgtcgatgcttcaaatggatcttcaattgatgacatatcctccgcattcggtggaatgaacttcaaagatgcatgtcctgatcccactggtgcagcaagcagtcagagaaaaaggtggaacattgctaagaggacaacatctgagcagggggagaaaatgcgcctctttaatcccagggctcccaatttcctcccggtggagcctgatccagaggctgaaaaggttgatctcaggcatcagatgatgggtgatcggaagaatgccgaggaatggatggttgattatgcgcttaggagggcagtgaacaaattagcccgcgctcagaagaggaaagttgagatgcttgtccaggcctttgaaactgttcaacaggatgatgataagaaaagcatcacacttacaaagtcttcgcaaccatgcagatgactactcttagaggccttgcactttagctggaactaatcaccatctcgaggttctaactcagtggtcactgcaatattagtgccagagacctgctcgacaaggatagagctgcttaatatcactgaggtgatgagatctcgatctggtagttgagctttatggagcacaatgagttgattagtgtagtacattagggcatgtacatttaagtctcgtgtgctcttgtcgatatattagtagtgatcaataatagtaagtgtacgagacttgcgaagtggcaagagtgttgggatgtattccttgggcaaagatcaataaaactcttattgacagcgtt

SEQ ID NO: 9776 - DNA, 1604 bp, Oryza sativa
  ref <308>: DATABASE ACCESSION NUMBER: AK107124
  ref <309>: DATABASE ENTRY DATE: 2002-08-28
aacaccgccactccgtctcccctgctcccctctgccggcctgccgccgacgtacgccggggcgccgcggcttccttgcgccgccgaggtttggatcgcgccatcgactcactgcggctagccggggcagtcgccctcgccgtctggcccgcggaggcgtggccgccttccacgcgcggtcggagaggcaccactactcgagcggcgaggcaggcaaggcttcacgcgtcaaggctgccgccgtcgcggttcaccggccaacagcacgtcgtcctcgggcgcggctcgcctcctctcttcctgcgccccagccagccaggagggccagagttcggcgagcccgtcggtgcccgtgctgaagaaaaggttcgcccgtggggtgtttgtcgaaatgtcgctccgacagctgcttctccaagcgcggcgcttcgcgtctcggccgccgccgccgctctcgaatatgctcgttctctgccgaggcatttctgaccgcggacacaaagccttgccttcggcgccgcctcgccactccaccgggcaaatccagatgccgcaaactttccattgctcaaatgccaacccccttggcaatcgcttccaaattgacgtggtcgactccgacctctggcccgcatccttcgacctgtccatggaccatgcaccgaaaactgggtgccctgatgattttcaagaacatgaggatggagaaatgcatgactctgaagatgagatagatgacatgaggcaccgtaagaagctgttttacaagttggacaggggttccaaggagtttgaggagaacaatgtgtccttgcgccacaggcggaagagagaaaaaggcaatgtaaagaatccaaaggaatccaagaaggtggatcctgatgaatccgcttctgtgaagctcccaaagctgaaaacgaagtatacagtgcgtgaggaggatgtggttgaggcaaagagggatcgggtgccaacatttaaccagatgacggatccttaccaccaccctttctgtctggacatacatgtcaccaaggggtccgttcgtgcttgctttgtgcaccgagtgagcagcagggttgtcacagtcgcgcactccatatcaaaggacatgaagtttgatgtcggttcaaggaaaggtatgaaggcgtgtgcagcggttggggcattgcttgcaaaacgtgcaatagaggatgatattcacaatgcgatttatacaccaaggaaaggagataggattgaagggaagattgaggttgtgctgcgtgcaattattgataatggggttgaagttaaggtgaaactcaagcaaaggaagccaacaaagaatgcactggctatgcagcattctcaatctcactgatggctaaactattcatccgcatgactcctactagaaatgctcagaagtcatgagagtttctgttactacatggactggaagtctggaagagctggtgctgctggggcaccaccctctgtgtgcaaactttgggtcaacacttttttgtcataagaaggtagaaccagctctaccttatagccatttcatttgatataaatggacggttacaaaattacatgagtagaagaagagagggagag

SEQ ID NO: 9777 - DNA, 1521 bp, Oryza sativa
  ref <308>: DATABASE ACCESSION NUMBER: AK107125
  ref <309>: DATABASE ENTRY DATE: 2002-08-28
aacggaagcttagctgagttgggtttggtctcgccgctggccggagtagagcggtccatgtgctgtaccggcgacgaggtggcgggacccggagagcagcggcggcggccgctcgacgccgacgccggcggcgacaagggcgcggtggcgacgacgtcgtcgtcgttgttggcggcgccgatgctgtcgcggcggaggcaggcggaggagatggcggcgatggtgtcggcgctggcgagtgtcgtggccggcggcggcggcacgtcgttgccggcgaagaggccagccgagagagagcccgaggagggcgccgccgtggagggggtgtggtggtcgtactgcagtgagctcgccgccgccgccgccgcgccgtcgccggcggctccatttccggccggtacgctacgtgccatcgccggggcaacactcgcctgcgtcggcggcggccggcgacgaggaggagctcccgtcgccgtcctcggccgactccagcggcggcacggcgaggaagcggtacagaggggtgcggcagcggccgtgggggaagtgggcggcggagatccgggacccgcacaaggcggcgcgcgtgtggctcggcaccttcgacaccgccgaggacgccgcccgcgcctacgacggcgccgccctccgcttccgcggcagccgcgccaagctcaacttccccgagcacgccaccctcccaccgccgccgacgacgacgacggccgccgctcaccggtgcccgccaccgccgcggacggacgcgctgctggagtcgcaggagctctctcccggcgccggcggcggtgacccgtactctcagtacgcgaggttcttgcagggctccggcggcgacggtggcgaggcggcggcgcggcccggcggtggcgcctcgcaaagaacgccacccgccactacactgctctacagcttcgagggagacgctgcttccgccgcctgcctctggcagccggagagcggcggcggcgggatggggtggccggcgacttcgccggcggcgtggttggagtacggtttctacccgccgccggagcggcgcgacacggacacgtagggttaatcacgatgtgatcctgagcggaataggcggtgacgctgacaggtggggcctacttttgccaggtgcggtcaacggtcaacctgaagttgacgtggcatgccacgtaatgcggcggtcaacgggttcagacggaagtgggtcatggacggcacgagacgccgtcagaaataaatgctcgaaactgacacgatggattacattgttcgtcaaattctcagagggccacatagttgcaggagggggaattattattcagcattgtttttttcgtaaaattcatcgctccaaaaacatcacacatctcaagcttgtacgaatgaaactagtgcagtctgaagattttctttttctggttttatagaacaaaagatttttgaagaaacccaatcctatgaaaaaaaatttcttatatgaaaggaatgggcatccaaaattcctgt

SEQ ID NO: 9778 - DNA, 2486 bp, Oryza sativa
  ref <308>: DATABASE ACCESSION NUMBER: AK107126
  ref <309>: DATABASE ENTRY DATE: 2002-08-28
accaccctctcctctctctcctcctcttctctctctagcctagctcagctctctcaactctctctctccagctccaccttctccgaggccgccattcccaaggttgccaccaccaccaccaccacgcagcagcggcctaggagtacttgcggcggctgcttgatcggttttcttggctcgtcagttgcagtattccctcctcaaaatatataaaaaggaaggagctccctgaggctagttggattggatgacgtctcgtgaaagttgcaagtgatggtgctctgactggtcttttgcctttgatgtctctgctggtgatgggataagttggcgcactatctatcttggctgtgtgttctgttgaatcttgtctagttgtgggtgtgtgtgtgatggggtcgtctggttgcagctctgagatagttgagttcaccgaagaattcgacgataatgcgccggttagttgccccaatttgatgcatattagagtgaagcctgaggagaaagatgggaggtgttaccctgtggaggatgaccttgaacagcttctcaaggcgatcgacagcaggaccttccgtcggacgcttagccctggtcaggctgcgccgacgctctgcggaagaatggtcagaagaaatcgtctaggtctgggccggctcaagctgcggggatcgggatttcgtccaagcctgttaatatgaagcaggcgttgaggaggctgtgcatttcgcaggcgtcggagatggccgcgatgaagaggctgtcgatgtcgcctggatcatcgagttcgtcggaagtggggactatccacaggctttatgcctccttgatggtccagagcaacggtgagagccatctgcatgatgatgagaagatgaacttgattgagatatcgatcactccagaaaagtttagtaagaactcgtccagagcaacaagcgagttcagtgaagactgtgatttcgagacagccgacgggagtgcagtcacctccctgcattctgcatcatctacctcggctgagatacagaagatcaggatccaagatgtcatcagtgatgagagccaatttggattgtgtagctacaacaacagaccacacatggcaaaggatctgcgttggataaccatccgtgagttggcattgcaacaaggatccttaggtcttgacaatttcaagcttctgaagaggcttggttgcggcgatatagggactgtgtacctagctgagttggttgattcagagtgcttgtttgctttgaaggttatggacatagagtacctgatcaatagaaagaagatgctgcgtgcacaggctgagagggagattctagaaatgctggatcacccattccttccgactctttatgcccattttaccacagacaatctttcgtgcttggtcatggagtactgtccaggaggtgatttgcatgttcttcgtcaaagacaacctgggagaagctttccggaaccagctgcaaggttttatgttgcagaggttctccttgcacttgaatatcttcacatgttgggggtcatataccgtgatcttaagcctgagaacatcctagtccgtgaagatggtcacattatgctatcggactttgacttgtccttaaggtgctcagtgaaccccgtactcctccgatcatcctctgtagcagcaaaccatcaaccaaggaagcttgcaggaccttgtgcagaaagcagctgcatcagttcatcatgccagccttcttgtgcccaaacatcttgtttcatggcacgtcctccattgccaaagcctcggaagcctaaatcttcacacagaaagctccctcagcttgttgttgaacctatagatgcaaggtccaattcctttgtaggaacacacgagtacctcgcaccagaaatcatcaaaggggatggtcatggtagtgctgtggactggtggacctttggcgtcttcctttatgaactgttgtacggtaagacacctttcagaggtcctgggaatgatgaaacattggcaaatgtggtttcgcagaatctcaagttcccagaaaatccatctgtcagcagtaatgccaaagatcttatcaaaggtttgctagtgaaggagccagagaacagacttggatcattgagaggagcagctgaaatcaagcaacaccctttctttgaaggcttaaattgggccttgatacgatctgccgctcctccagagacgcgaccctgtgacgttgtgaccctcacgacagcgaagaagaagaaagtaggcaagtgcctggagttcaggagtaactctgaggacctggaatttgaagttttttagcaagtgtctttggtacagtttagcactcttctgccaaatagagtctacatttttcttttgggtagccaaaggctgggggtgtacattgtacaagtagatgtatttctggttactgctatgtacctgttaatagatcactaaattcaaaggaatgatggaagttgaagcc

SEQ ID NO: 9779 - DNA, 1160 bp, Oryza sativa
  ref <308>: DATABASE ACCESSION NUMBER: AK107127
  ref <309>: DATABASE ENTRY DATE: 2002-08-28
atggccttgtcctcctcttcgcacctcctccccttctcccggcctcccgcgaccttcccacgagcacgccacgccggcggcgggaggggccgagccggcgccacggggaggttcatagcgtgctcctcgccccctcctcccgacgtcgtggtcacccgcgagcgcgggaagaacgccaagctcatcgccgcgctggaaaaacataatgtacaaagtcttgagcttcctcttattaaacatgttgaagggccagatacagataggctttctgctgtcctgcgcgatgaaaagtttgactggatcactataacatctcctgaggcagctgctgtgttccttgagggatggaaggctgctggaaatcctaaggtacgaatagcggttgttggagcaggtactgaaagagtttttgacgaagtaattcaatacaatgatggatcccttgaggttgcattttctccttctaaagctatgggtaaatttttggcctcagagcttccaaggaccactgaaactacttgtaaagtgttatatcctgcatctgcaaaggctggccatgaaatccagaatgggctatcaaatcgaggatttgaggtgacaagactgaacacatatacaactgtatctgtacaggatgtcgatccgctaatattaaagcctgctctttcagctccagttgttgcagtagcttctccttctgctctccgagcttggctaaatcttgcttcacaagttgacaactggggcaacgccattgcctgcataggcgagacgactgcctcagcagctaagaaatttggcctgaagagcatatattatcctaccaccccgggacttgacgggtgggttgaaagcatccttgaagcgctcagagcccatgggcaatcgaaagaggccccagggtgttgaacttgaagacgggcaatttacttgtaccagatgctggaggttggtggacatttgtggcggctgcatattgaactctgtgcttccttgactaaccgatcacacactttttgttgtttttctaatataattgagaggagaaaccaagtcggcaactactgtagtagaactacttgtaaattgtgagctgtttattgtagctactgaacacggtgcggtatattaccagtgttgtaccaattgttgcttagttt

SEQ ID NO: 9780 - DNA, 1468 bp, Oryza sativa
  ref <308>: DATABASE ACCESSION NUMBER: AK107128
  ref <309>: DATABASE ENTRY DATE: 2002-08-28
gtattcaccgacaactcactctgggcatgggcatggcggattcacatctggatggggtgccggcgatgaggaagacgacggtctccagctccagcagcctcaacatcgccttcctactctccatggttgccaccaacctgctgtccctctaccacctctccacccgcgcatccaccgcaccgccgctcctcttgccggcggcgcaccaggcccaggcccaggacgagcagctcctccgccagctgaccgccatccgcgccaccgtctcccaactcaaccacctccgctcctccacgcccccgcctccgccgccgccaccggagctcctcctctactcccgcctggcgcccctcgcctccgcctgctcagcccacccggacctcctccaccgattcatgtcctacacgcccttctccccctgccccgacgacgccctctccctcgccgagcccctcctcctccgcggctgccacccgctgcccaggcgaaggtgcttctcatcatcttcgatctcgtcttctcacaacctgaataatctgcccaccgatcccttctccccgctcccggactccgccgtccgctggcctccgggggccaaatgcacctccttctcctgcctcccgccctcgctcggcttcgacctcgcgcgcacggaggccgcgcgcttcctgcgggcggaggggcccctcgacctcacggtgccgcagctgctgcgcctggcatcgctcagccgcgcggggcccatccggctggggctggacgtgggcggcgggacggggacgctggcggcgcgcctcaagcgggcggccaacgccaccgtgctcaccaccactatgaacctcggggcgccctactcggaggcggcggcggcgcgcggggtggtgccgctgcacgcgccgctgcagcagcgcttcccggtgggggacgccaccatggacctggtgcgggcggggcacgccgtgaaccgctggatcccggaggcggcgctggagttcctgtggtacgacgcggacagggtgctgcgcccccgcggcctgctctgggtcgaccacttctggtgccgccgccctgacctcgccgccgtctaccaacccatgctgcgccgcctcggctacaagaccctcaagtgggccgtcgccgacaagaccacacccacgcccacggcgccacccggagccaagcatgaccacgtctacctcaccgccctgctgcagaagccctgatcgattcattgccattgccattgtaggtgggatcctggaacaaggctgtcactgaggtgatcaatttaattgtgcaataagctcaaagaggaatgccaatgccaaggctcaacaatgaggatgatgcactgatttgatttgggggtcttttttttaccaaggactgtacgtaacttctctgtggaatcatcattttataaggaaagcctcgcatctgcaaaagaatgcaaatccccttctcactc

SEQ ID NO: 9781 - DNA, 1555 bp, Oryza sativa
  ref <308>: DATABASE ACCESSION NUMBER: AK107129
  ref <309>: DATABASE ENTRY DATE: 2002-08-28
aagatgcaaactgcagatcattctgttcctataggagtgagattgctcaaattgcagttatcaaccattgaggcttctattccaccagaagcaattcaaccattttggactgatggttatcgaaaatcttggggtgtgaagttgcactctacaacttcgttggaggaaatatttcagatgttgacactgctggaagccgcaataaaacgggaccacctatcttcagaatttgaaacaacatctgagttgcttaacttgaacacacaagataatccatcccagaatcatgttggattgtctggatctgctgctgtacttccatgggttcctgacactactgctgcgattgcactacgaatgttagacctagactcagcagtatcatacatgcaaaatcaaaagatggagagaaatggtggagatttcatgaagcctccatcaaggtttgtggctgttaagaatgcacaagaattagatccactggaaacaaccggtttagacctttttgatggaaggtgggctactggtagtggccgtaggggtcgtggacgaggaagtagagggggtagcaggggaggcagaggccgaagtcgaggtggaagggtcccaagaggtattagcatctcatctaggattggatttaaggatgaaaatgaagcctcaaggaagaacactcgtcgagggcgtactcgtggccgtggtcgtgggcgaggacgtcgaactgttaggtcacggcaaccatctgagggcaaaggcagatcaattcccaaggaaaatttgttggggagctttagcatgcttagcaatgcaaaggctgccactgttgaggagtctccaaggagctcaggtgctgatgaatggggcttggagaacagaaggccatatattgatggtgatgagaacagttctggatctcagttagatcaatcagaagataatgaggaaaatggccaacccatggatgaggaatatgatgagcaggttccagattattctagaggctattctggtggctccaggccccatggcatgatagatgatgatgtgagcgaagaagaggatgaagatgtggagggcgatgatgatggggaggaagatgatgcggaccgtgcagttgatgatgttgatgctgagatggacgaggatgatgatataggtgatgatggtgaggatggtggtgacggtggtgacggtgtggaggcgaatgctgatgaagatgaaggcggttcctcgtattcatcggagtacagcgactaagattggccagtagaggccttagcgtcctatgccgttatccctaaatttccaatagatgtctgaatcaagtactgttagtgggcattacttacccttgtggttaaaatgctagacgcggaccagaggtctgtgtgatagataggcatgtagtactgatgttcagtactgcatgcttcttttgattttcggcgtagccgagctgcccaaacaaccgggtagtgtgaagctgtactttgctggtttaaggtgttgggattgatgcgtacaatgtgccaaggcaaagtaccaagtttacctg

SEQ ID NO: 9782 - DNA, 3008 bp, Oryza sativa
  ref <308>: DATABASE ACCESSION NUMBER: AK107130
  ref <309>: DATABASE ENTRY DATE: 2002-08-28
cttctctctccctcacacgcttcacactcctctcgctgttcttctctcctcctcctgtggctggctgcttgctctactgcaattatttattgccacctccaattcttagtactgcgagattaattactcattcctccccgcagtgccatgttcttgagtttctttcggtttttttttaatccattttgcaacactctctgtcctgcagccagagctgcatttgctggggatttatactagtaggcggcttcagctttactctctcccctttctgcttctgctgcttctccctttccctctcaacttctcaagtggcagtggtgggagggtagcatctggcccaagcaaagcgccgggttcttggctctgctcgctttttttcgtggtaaatctgtgtgcaagatctggggtacaaaaggaggggacagcagcacaagggaggaggaggagttcttgcgttgggattctctcttcggcaatgaggcccgacgcgaggctggatgcggccgtgttccagctcaccccgacccggaccaggatcagattgcaaagggaggatactcaattacgcttgagccgagctcaggggttggcgcgccatggtttacaagaggcaccgtggagagattcgtgcgcttcgtgagtactccggaggtgcttgagcgagtgacgacgatagaatccgagatcttgcagctcgaggacgccatctctattcagagcaacgataatcttgggctaagatctgtaagtcgacgattgtcgtttatgagtttattcttgttatttgcagaaaggtgacgcattcttgtttgctatctggaaggtagaagatcatggaggaaaattgactgaaagcaacgaaggtacacgagcgaatcacagccctgatgcagataaggctattgttatataccagcctggatcacagcctacaccagcagtgcatgatgagactacaacacatgaagagaattcaaaagtccaactgctgagagtgcttgaaacccgaaaaaatgtcttaaggaaagagcaggccatggcttttgcacgtgctgtggcagctgggtttgacatcgacaatctgggttacttgattgcgtttgcagagcgctttggtgcttcacgtttgatgagggcatgttcgcagttcatcgaactgtggaagcgaaagcatgaaactggacaatggattgaagttgaaccagaagcaatgtctacacactctgaatttcctccttttaatccatcgggtattgtttttgttggagacaacatgaagcaaaacacggaaactatgtctgtttccaatggagaggcaaatggcgaggatgcttctaaagctgagcataagtctggtcaacagatggggtatcaggctgcatatcctccatgggcaatgcatcctccaccttaccatatgcaaggaatgccttactatcctgggccgtactaccctccatatcctccagtggatgaccccaggtatcactactcgggaaggaaatcatcgaggaagcactcttcagacagtaaagagtcagaagtacttgacgaaggaagtgatggtagcagttctgaaagagggagttctcatggtcacaagtcacataaaaagggtaagcgatcagggaaaaagaaacctagtgtagttgtcataaaaaatgtaaatgtaacatccaaaaagcatggctcgtcggaaagtgagtcgcagtcaagttctgaagatgggtctcaagacagtgatgacacacactacaaaaagagacatgggaagcataagagctcaggttcaaagaaaaaggagggtgcaaaaactaactttgactctggagacgactataataacaaggatgaatcatcttatgggcaagatgctgaccaagggaactggaatgcattccagagtttcctgatgagagcagaagaaaaaacaagatctaatgatgcagatatgttttctggtgaaaaagcacctccatcaaggaaaaagaacaatgtaaacactgctgatcctattcttttggctgggggagattctggtgatgtatatgaacagagaggagcaggctttgatccagtcaatgggaggagtagagctattcggctgcaatccaatgatgaactgatgatgtctggggaagggggaagatatatggatggtgaaattaaggagatagaagctggtggtggaagatacaggagagggacaagtgaggacttcatgctctatggccaggaaaggtccatggataggaggagtgctttggatcctcttgcagaggcccggtacaggaatcctaatcaggtggacaagaatggatatgccgcggctgatgagtcctttataattcctcttagatctggttcacaagataatgttgggccggaataccgagccacgattgacattgatgttgagcttcctacaaacactaagaaaacttcagatgggaaggctggaactcaactcttctatgagccggatgaattgatgccagagcgtggatctgaagatgcttcatttggatatgatccggcaatggattacgaaagcaacatgatggtcagagccgtcaaggttgaagacagtaatgacgaggatgtctcacatagtaatgacggcgatgtaaagaaaccagagaaggagaagataaggggtacaaaggatggttcggataaaagaaagaaggatgcaatactcaggaggctctctgctccaaagaccccactcaatgatgcacagaaacgtgcacagaacatgcgagcatataaagctgatctccagaaactgaagaaagagcaggtattgtttctattttcccctttcttgtctccaagcagtttgaaacttagttcttctgcatggtgtaaatttaggtacattagttgacaattttttttaatccttatcatcactccaaaagcaccaagtctgaacacaatactgaataacggcaactttctgttattttacctatacagtaatgcatcaacagattaaaatg

SEQ ID NO: 9783 - DNA, 1495 bp, Oryza sativa
  ref <308>: DATABASE ACCESSION NUMBER: AK107131
  ref <309>: DATABASE ENTRY DATE: 2002-08-28
aacaaccacatatatatatacacacaaacacacatatttcagattagctttgtagctagctagccattgatcagctagatagagatcgatcgatcctgaatcgatatgggtagctgcaatagttggaagccaacattgacaatggttggggttgtggtggtgttcgcggtgatgaacaccctcatcaagatggccctgaacgaggggatgcacgccaccgtcctcatcacgcttcgtcagctcatcgccaccctcttcctcgccccgatcgcctacttccgggagaggaagacaagaccaaagctaacagctgaaatcttggtgtatctcttcttcagtgcggtgctcggagcgtcccttacccagtggctcttcttcctggggctgcagtacaccaccgcaacattcgcctgcgccttcatcaacatgactcccatcttcaccttccttgtagctctgccttatgggctggagaaagttaacctgaacatagctggcatagctaaagtgggaggtacggtgttaggattcagcggagcaatggtccttgctctctaccagggcccatcgctcaccaagctatcatcttcatcttcttcatcatcatcttcttcctctccgatggcatcggcggcggtgatcgccgccggtcatgtcggcggcgcgcacagatgggcgatcgggtcggtggcgttgctgggtgggtcggcctgctggtcgctgtggttcatcctgcagtcgaggatcgccaggaagtacccggctctctactcggggacggccctgatgttcttcctcagcttcctccagatggccgtggtcgccttggccatcgacagggttagcttgcccccatggatcttaaggaccaagcttcagatcatcaccgtgctctttgtggggatagttgggtcaggaatagggttcttggcaatgtcatggtgtgtggagcagagagggccggtgttcacgactgcattcacgcctctaatccagatcattgcagctgctatcaacgtcatcgttctccgtgagcaacttcaccttggaactgtgataggttctgctttggttatcatgggcctgtatttcgttctctggggaaagagtaaggaggcatcaccatcatcatcatcatctcatccagccaaggaagctgtgcctgtgctgcaacaacaacacggccatgatgatcaagaaaccactaatgtacagatgcaaactgtctagtaatgtcgtaacaataattaacaagctatacgcaacgcatgctcgccggtgaaggacgtcgcactcgaccgtggattaaaagaaaaaatgaattcatatgcatcaagtagtgaaattagtcctcacggcagaaaaaagatttcctgccctatatatatatatgcatttcgaccaattaggaaggaagttggtcaagatgattaattttgtatgcttgtaagttgtaacggatcaagagaatgatatttacatatagtttgaagtg

SEQ ID NO: 9784 - DNA, 1560 bp, Oryza sativa
  ref <308>: DATABASE ACCESSION NUMBER: AK107132
  ref <309>: DATABASE ENTRY DATE: 2002-08-28
cagctgtcgatacagattgcttttacttgcatggtttacccatccttgatccttgcatacatggggcaagctgcttatctgtgtaagcatcacatcattgaaagtgactacaggatcgggttctatgtgtctgtgcctgagaaaattaggtggccagttctggcaattgccattcttgcagcagttgtcgggagccaagctgttatcactggcacattctcaatgatcaagcagtgcaccgctctcggctgctttcctcgggtgaagatagttcacacatctgacaaagtacacgggcaaatttacatccctgagatcaattggatcctgatgatactgtgcttagctattaccattggtttcagagacacaaaacacctgggcaatgcgtcaggattggcggttataaccgttatgctggtcacgacatgtctgatgtccctggtgatagttctgtgttggcacaagagcatcttcctcgcattcggcttcatcatcttcttcggcaccattgaggcactctacttctcagcatcactcatcaagttcagagaaggagcctgggtcccaattgtgctggccttcatcttcatggcgataatgtgcatctggcactatggcaccatcaagaagtatgagttcgatctccagaacaaggtctccatcaactggctccttggcctcagccccaacctcggcattgtccgagtccgcggcatcggcctcatccacaccgagctcgactctgggatcccggcaatcttctcgcatttcgtcaccaacctacctgcatttcatcaagtgctcatcttcctctgcatcaagaacgtcccgataccgcatgtctcgccggaggagaggttcctcgtcggaagaattggccccaaggagtacagaatctaccggtgcattgtcaggtacggctaccacgacgtgcacaaggacgatcaggagttcgagaaggagctcgtctgcagcgtcgcggagttcatccgctccggcgccgccgccgcggccgacgccgcggcctcttccaagcccaagaacgtctgcggcggcggcgcggaggagtcggagaaagaggaggaggagcggatgtccgtcatcccctccggcagcattcggatgatggaggaggacggcggcgcgggggcgccgtcgtcggaggacaccgtcggcggcagcggcagcggcagcggcagaggcagctcgtgcggcggcggcggcgcaagggagatcatgtcgccgtcgccgtcgccgccgccggtggtggtggcgccgaggaagagggtgcggttcgtgctgccggcggcgagcccgcggccggacgccggcgtgcgggaggagctgcaggagctgatggacgcgcgcgaggccggcatggcgttcatcctcggccactcctacgtcaaggccaagagcggctccagcttcttccggcggctggtcatcaacttctgctacgacttcctccgccgcaacagccgcggccccaactacgccgtcaccatccctcacgcctccaccctcgaggtcggcatgatttactatgtctaatac

SEQ ID NO: 9785 - DNA, 1861 bp, Oryza sativa
  ref <308>: DATABASE ACCESSION NUMBER: AK107133
  ref <309>: DATABASE ENTRY DATE: 2002-08-28
tgaatcattcagctttgcttcaagagaaggaaacaaagctaaaatctcatctatctccttggctggttgctcgagcttggtgaacttcacattacgtgggccattgcaaaaccttaggggattggacctctctggcacaatgataaaaatgcttgaccttcgagatgtacaagactcatgtattggacaaataattctgctacggtgtgagaagctatgcaccatattatggccagagaaaggattcccaaacctaagcatgctacacattgattcattggtttgccatgtagaaacagagcagcagcaagcatatgcaaccgtgatggatttaagatttgttcaatccttggtgttaagaagcaataacaagttctgttggaactgcaataagacccatataaatatatgcatctcttctaccccaaaagatgcaacaccaaaaaagaagacaatgagctattacagcgctcaaaaagtagttggctcacctctacacatgccaatagtcaccaccattcaacctgttgtttgctacaaggatgtcaacttggccatgatatctgctattgagctggaaggcagcagtgcaccacggcatgagccactagacatccatgtggagatcggagagggaataagctatgctaatgttgtcagtgaacaagcattgagtgcagtatcatttatgatgaacaaggccaagtctttgcacgtacatgacaatttttcaatcaccagtgttaaccctaaacacgtgattttgacagaggataaggaaattacatggtattgtctaaagaggtgccacattgagagatgtcacaagttgaacactgtcttctctaccgattatatcaaataccgctttcaaacactggaggcattttcagcagctgagctcatgatggcaaattgtatttggagcagaggaaggacattccctggttggaacagtaatatgtttgcaaaactgaggagtatacacttacactactgtccgaggctcacgtttgtgcttccactatcatggcctactccatactcacacttgcccagcttggagactctccacatcgtctactgcagtgaactcagacagatcttccccgtggaggcagttgctctaagggaacaaccaagaggtgtgctgagattcccaaagctgaagcacatccacctgcatgatgtccccaagctgcatcagatatgcgaaatcagcaggatggttgctcctgtgctcgagacaatcagggtgaggggatgctgggctctcaagcgcatccccgccatcaacggtcgcccaatcgtggactgcgagaaggactggtgggagaagctggaatgggaggggatgaatgttggccatgacccctccctctttgagcctcgccactcgatgtactacaagaaggctctacccagatgctctcttctccggtgaggcgacatgcagacgctgtatcaactgctgctcacttgttaagatttactgatggatcaaccaagttgtctgcatgctttcttccgtctcgctgcagtggtttcgagtgtttgcttgttttctgaagaataaattggtgcatcatgtgcttgcagcaagcacctctgagttgtatatattgttgtgtgcttgcatactaagttaattaattcgcgtgtgtgtctctcaggggagtgacgcagaaccatctgtgtgtgtggatttgttgatgatgtatgtgcttgaaataagagggtctgatgggcctctgtggtgtgcctaccactagttcccagaagttcatggtgtgacagtgtgtaattgcaaacgaatggacataaattaaatattgatgctgcatcgtggtgatgctgcaac

SEQ ID NO: 9786 - DNA, 930 bp, Oryza sativa
  ref <308>: DATABASE ACCESSION NUMBER: AK107134
  ref <309>: DATABASE ENTRY DATE: 2002-08-28
agatccaaggctatctaagcaccggcatttgcatacagccgcctaagcaaagagcacagcaagtatacgcgaatctgagtgtgtgagagagactagtagcacagacgaaggtatggcgttctacctcggcagcatgggtggctcgccatcgtcatggggggtggcggaggtgccggtgccgagcagcaggccgtggagcaaggcggaggacaaggtgttcgagagcgcgctcgtggcgttcccggagcacacgcacaaccggtgggcgctcgtcgcgtcgcggctcccggggcgctcggcgcacgaggtttgggaacactaccaggtgctcgtggacgatgtcgacctcatcgagcgtggcatggttgcgtccccgggctgctgggacgacgacaacaacagcgccggccacggccgtggcagtggtggggatgagcgtcgtcgcggcgtgccctggactgaggaggagcacaggctatttcttgaagggctagagaaatatgggcgtggcgactggcgcaacatctcgcgctggtcggtgaagacgcggactccgacgcaagtggcgagccatgcgcagaagttcttcatccgacaggccaacgccagcagccgtggcgactccaagcgtaagagcatccacgacatcactgccccatgatgtgtggtccgatcgaggatatgcattatgatccggtccagtctaggtttagttgtatttccatcaattccaactagctttcaaccccatttcaaagaggagagaacgaagggagtttagtcgtcggccctccctgttagttcctctctctgtgttgtgtaaaatatagctaggcaatagctaaaactaagcttggctggaacctgagatcaattgttgtgatactagtttgtgtacttgtcaaataatatttgtatccgtttaatttc

SEQ ID NO: 9787 - DNA, 1309 bp, Oryza sativa
  ref <308>: DATABASE ACCESSION NUMBER: AK107135
  ref <309>: DATABASE ENTRY DATE: 2002-08-28
gcagaccgacacaacagtgcaggccgcaaagcaatcacggccgtccaagcaagccgcctcctcctcctccttaccaagccaaagtcttcttctgctttcttttcccctcgtgctgctcgcggtttggcattgtctctctagagtctagactctagagtctcctcttgctctcttctcgtccgccattgatggggtgcaaggcgtgccagaagcccaaggtgcactaccggaagggcctgtggtcgccggaggaggaccagaagctccgcgacttcatcctccgctacggccacggctgctggagcgccgtccccgtgaaggccgggctgcagcgtaacggcaagagttgcaggctgagatggatcaattacctgaggccggggctgaagcacggcatgttttcccgagaggaagaagaaaccgtcatgaacctgcacgctacaatgggcaacaagtggtcacagatagcgcggcatctgcctggccggacggacaacgaggtgaagaactactggaactcgtacctcaagaagcgagtcgaaggcgcggaggctgcggccagaaaatccgccgagccggccgacgtcgtcaccggcagcccgaaccgcagcgagaccggccaagaacgcgtcgccgctgaccggccggcgagctccgagtcttccgggccggtcgagtcgtcgtcggccgacgactcgagcagcctcaccgagcccgcggcggggctcgccgccgtccggccgcacgcgcccgtgatccccaaggtcatgttcgccgactggttcgacatggactacgggactagcctcgccgggacggcgccgggcctgagctaccagggctcgtcgtcggtgcaggtcgacgtcccgtgcggcggcgccgtggactccctgcacgggctgggcgacggcggcttctgctgggacttcgacgacgcggccgatcacatgcagggaggaggagggctctgcgacctgctctccatgagcgagttcctcggcatcaactaggcgggagcgtacgctctttcttccgtacagttcgtcgccgaagtgtaaattcgtcagtttcttttttttccccctctttttcagaggtgtaaatcgtgccgtgcatgtgtagtagttaaacttactggcttgtagtgttgagtttggacttcgaagccatgagttgtgcgtcgaagtacagtcttagctttctcttcataaggttcgtgacttcgtgtatacagctctggttttccggaaaacggttcagaaagaataacagaaacagagcgtcacaattgcacggttttcaggctttc

SEQ ID NO: 9788 - DNA, 1328 bp, Oryza sativa
  ref <308>: DATABASE ACCESSION NUMBER: AK107136
  ref <309>: DATABASE ENTRY DATE: 2002-08-28
tggccggtagtggagccgaggagtcgattacagcatgagtcaaactgagctgcctgagtccacttcgccaagcgagagctcgccggccatggcgtccaccacgccggcgccgtacgtcgtcgaggactgcggccctaacctccagctcttcagcgacggcacggtgatccgcttcgaggactacaacatcctccctccgccggtcttgcctcccgcgctgtccaccgtccagtggaaggacgtcgtctacgacgccggccgcggcctcaagctgcgggtgtacaggccaccggcggctaccgtcgccggcgagaagctcccggtgctcgtctacttccacggcggcgggtacttcatcggcagcttcgagatggataacttccacgcgtgctgcctccgcctcgcccacgagcttcccgccgtcgtcctctccgccgactaccgcctcgcccccgagcaccgcctccccgccgcccacgacgacgcggcgaccgccatgtcctgggtgcgcgaccaggccgtggcgagcggggacgccgccgacccatggctcgcggagtcggcggatttcggccgggtgttcgtctccggcgactcggccggcgcgggcatcgtccaccacgtcgccctccgcctcgggtcgggccagatcgccgtcgacccggcgcgcgtcgcggggtgcgcgctgctgttcccgtacttcggcggcgaggagaggacgaggtcggaggcggagtacccgccggggccgttcctgacgctgcccttctccgaccaggggtggcgcctcgcgctgccgcggggcgccacgagggaccacccgctggccaacccgttcgggccggagagcccggcgatggacgccgtcgcgctgccgccgctgctcgtggtggtcgcccagctcgacctgctgcgcgaccgcgacgtggactacgccgcgaggctgagggcgatggggaagcaggtggagatggtggagttcgaggggcagcaccacgggttcttcgccgtcgagccgttaggcgacgccgggagcgagctggtccgggtcgtgaggcgcttcgtctacggcaacggcggtgacgccgccgccgccgccgccgccgcgtccaagtaaatccagccgaccagacaccgatcgctttctgtggcattgcgtcagctgccacgtgacagcatgagacacgccccagttcccaccatgtgatacacgcccacggcccaccttggaagcctattggacattggattttaactaggcccactcatatacgacttgtaccaaaccaatcttctcaaaaagaaaaggaataagttcactcttggtc

SEQ ID NO: 9789 - DNA, 1777 bp, Oryza sativa
  ref <308>: DATABASE ACCESSION NUMBER: AK107137
  ref <309>: DATABASE ENTRY DATE: 2002-08-28
acgcccttcctccaactccccccaaagccgccaccaaaccttctcttctcctctcctctcgcgagtgtcgaactccgccaccgcgcgcgcgcgcgccggagacggcggccctcccatccgcggcgggcgccggcaatgcggatggggaagtacgagatggggcgggcgctgggagaggggcacttcggcaaggtgaagctggcgcgccacgccgacaccggcgccgccttcgccatcaagatcctcgaccgccaacgcatcctcgccatgaagatcgacgaacagataaagagggagatcgccacgttgaagctgctcaagcaccccaatgtcgtccgcctccacgaggtttcagctagcaaaaccaagatatacatggttcttgaatatgtaaatggaggagagctattcgacaaaattgcattaaagggtaagttgtcagagaaggaaggaagaaaactcttccagcagctgatggatgctgtaagctattgccatgagaagggagtttatcatagggaccttaagccggagaatgtcctagttgatgcaaaaggaaacaaaaggtttcggattttggactaagtgcccttccacaaaatcaacggaaagatggattgttgcataccacatgtggcagccctaactacatcgcccctgaggtccttctcaacagaggttatgatggctctttgtccgacatatggtcttgtggggttatcctatatgttatgcttacagggaatcttccatttgatgaccaaaatacggttgtcctttatcagaagattctgaagggggatgctcgtattcctaaatggctttccccaggtgcccaagatatactgcgaaaaatcttggatcctaacccaattacacgcttagatataactggaataagggcacatgagtggttcaggcaagattatactcctgctatgcctttcgatgatgatgacgacaacaatatcagtgatggcaacctacatatgactgagaatcaagatattgaaaccagcccagcaatcagccaaatcaatgcattccagctcattgggatgtcctcatgccttgatctatctggattttttgagaaagaagatgtttctgaaaggaaaatcagatttgtatcaaattattcccctacttctctatttgagaagattgagagcactgtcacagaaaagggtttccaggtacagaagaacagtggcaagctaaaagtgatccaagtttgtaaagaaccagcaaatccaagaggacatggaaatttattgatttctgctgaggtgtttgagatcaatgaatctctttatgttgttgagctaaaaaggtcatctggggattgttccctttacagacagctatgtgcgtcactttctgaagacttgggcatatgcaaaaggcaacagcttttgaagaaagattctatgagacaagacctttgtcgatataacagtagcttttgataaaagggtctctctagcttttagttgtgaaggctctagcatttttaacaagagcccccaatacaacgacgtatgacacagttttgtaaaattaaactgtaaatacaaaacaatccaattgtacaccgaaaagagtataccgatcatccaagtatttcctttaggagttcattagtttgtgttctttttgcctttactggtaaatcgctacctcctgggcaaattggctactgacagtgtataaaagtatgatgtagacaatctaagtgtacataaatagttacctcatcttgtgttcctttgaagtt

SEQ ID NO: 9790 - DNA, 1575 bp, Oryza sativa
  ref <308>: DATABASE ACCESSION NUMBER: AK107138
  ref <309>: DATABASE ENTRY DATE: 2002-08-28
agcactgagctcgatcgtgcgcgcgcgcgcacgacgcagcagcggctagtggcactcagagcgcgccacggcgggcgccagcatgagcaccgcgtgtcacggcgttcgcggcttcttctcgatctcggcggcggcgatgacgatcgtcgtcaccaccgccgtcgtcctcctgtccggcccgcagctcgccgccggggcgcgcgtcctgatcaaccacgctgaactccggcggcgcgacattgccaccgccggcggcggcggcggcggcggcgacggcgcgtgcgcgacggccgtggcgccgttcggctacccctgcgaagagcacgaggtgacgacgcaggatggctacatcctgggcttgcaaaggatcccgaggggacgcatcggcggcgtcaccggcggcggcgcggcggcggcgcggcagccggtgctactgcagcacggtgtactcgtggatggcatgacatggctgctggggtcgccggaggagtcgctgccgtacatcttggccgaccagggcttcgacgtctggatcgccaacaacagggggacccgctggagcagccgccacgtctcactcgatcccaaaagccggagctactggaactggtcatgggacgacatcgtggtcaacgacatgcctgcaatcgttgactacgtttgcagccacaccggccagaagccacactacgttggccattcaatggggacgctggtggcgcttgcagctttctccgaaggcaggatggttgacaagctgaaatcagctgcgctgctcagccctgtcgcgtatctgtctcacattaccactcccattggcgttgtgttagctaaagcattcgctggagagctcatctctgatctccttggcatcgccgagttcaacccagcatcgcctcaagtgtccaacttggttagaacgttctgtcgtaagcccgggatgaactgctacgatctcctcacatctttcactggaaaaaactattgtctgaacaattcagcagccgacatcttcctcaagtacgagccccagccaacgtccacaaaaaccttgatccatctcgctcaaacggtgagagacggggttctgaccaagtacgactacgtgatgccggacgcgaacgtggccaggtacgggcaggccgacccgccggcgtacgacatggcggcgatcccggcgtggttccccatcttcctcagctacggcggccgggactcgctgtccgaccccgccgacgtcgccctcctcctcgacgacctccgccgcggcggccacgccggcgaccggctcaccgtgcagtaccttccccagctcgcccacgccgacttcgtcatcggcgtctgcgccaaggaccttgtctacaacgacgtcatctccttcttccgtcgatttcactaaaaaaagggaaagaactgaataaatcaaaacaaaatatagctggcatatattcactagtagtgattaagtagctaattaatttggaggtctgagaaaattatatatactagtatagttgatatacagttacatgaaagatgataaatggaaatgggaccaaaattttacaatagaat

SEQ ID NO: 9791 - DNA, 2023 bp, Oryza sativa
  ref <308>: DATABASE ACCESSION NUMBER: AK107139
  ref <309>: DATABASE ENTRY DATE: 2002-08-28
aatctcccttctgcatatacagcaccctcctccttgcctcctcttcgccattgtcctaattcccatctccttgtccctttctccccgggagaaaaaccactcatacgcagtcggccaagcacttgatgcttactatgcctctgcgttagatgcttctcctgcccgtagaagctcgcggagttgggctacaagagaagcgccaagaagtgcaaggagaagtttgagaacgtccacaagtactacaagcgcaccaaggaagggcgcgccgggaggcaggacggcaagagctaccgcttcttcactgagctggaggcgttgcatgccgctgcgccgcagacgccccagccgcagcagcagcagcagcagcagttgccgccggttacaagcagcgcacccgcgatgcacgccttcgcgccgccggttcccgcgccaccgccgatgagcgcaatgccaccgccgccggggccgatccagccggccccgatatcttctgcggctcccgcggtgcccctggagctgccgccgcagccgcccatcaacctgcaaggcttaagcttctcgtccatgtcggggtccgagtcggacgatgagtctgaagacgacgagatgacggcggagaccggcggcagccaggaccgcctcggcaagcgcaagcgaggcgccggcggcaaaaggccggcgactttcttcgaggggctcatcaagcaagtcgtcgacaggcaggaggagatgcagcggcggtttctggagactatggagaagcgagaggcggagcgcacggcgcgggaggaggcgtggcgcaggcaggaggtggcccgcctcaaccgcgagcaggagcagctcgcccaggagcgcgccgcggcggcctcccgcgacgccgccatcatctccttcctccaacgcatcggcggtcagtccgtacaggtcccacccgccgccaccgtcatccagatgcccacaccggtgcagctccagacccctccgccggtcaagcaacctgccaggcagcaccagccacagccaacgccgccgccgccgcaggcggcgccaatcccagccgcgcccctccagcagcaaccgccgcagccgcagcacaaggagacgattcaccacgaggcagtgacgccgcgcagggcgccaccgacgtccggctcatcactcgagctggtgcccgcggcggagcagcacgtcgagagcgggctaggaggaggggagggcgggtcggcgtcgtcgtcgcggtggcccaagacggaggtgcaggcactcatacagctgcgcatggagctcgatatgcgctaccaggagaccgggccgaagggcccgctctgggaggagatctcgtcggggatgcggcggctggggtacaaccggagctcgaagcggtgcaaggagaagtgggagaacatcaacaagtacttcaagaaggtgaaggagagcaacaagaagcggcccgaggactccaagacatgcccgtacttccaccagctcgacgtcatctaccgcaggaagcacctcaccggcggtggcggcggcggcgcttccgcggccaatgtcgccgccacggcaatcgagcaccagaacccgaaccggcacgagatagaggggaagaacataaacgacaacgacaagaggaagaacggcggaggcggcggcgcgcaggtgcccaccagcaatggcgacacggcaccgaccacggccacgttcgacgtcgatagcggcatgaagaagccagaagacattgtgagggagctgagcgagcagccgccccgggagttcacaacggacgagaccgacagtgacgacatgggcgatgactacaccgacgacggcgaggaaggcgaggacgacggcaaaatgcagtacaggatacagttccagaggccgaacccgggcggcgccaacaccgcacctccgccggcaacaaccccggcgtccgcggtgccaacctcgactccgacgagcaccttcctcgccatggttcaataggcgcgcgaacgatgcatcaccaagtacgtacttgttc

SEQ ID NO: 9792 - DNA, 1369 bp, Oryza sativa
  ref <308>: DATABASE ACCESSION NUMBER: AK107140
  ref <309>: DATABASE ENTRY DATE: 2002-08-28
attttttctctctctctctcccatcattctctctctacgtacacatgcacctcgctagctaggctagctcaagctcagccacagtgtctcgtcgatccaatggccaagaagaagggcttcacctccatcttctccaggctcctcgtcgtcaccggcggcggcgatgacgaacgcggcggcggtgcagcagcgacgacctcgccgtcaccgccgccgtggccgtggccgtcatgcgggaacagaccccggaccgtgtcatccaggcgcgacggcggctgcagtacgagcgccgcggcggcggcgtcggcggctgccgcgagaaggattgccggcgagatgtacaagacggtcaactccgtctacttcgactactccgccgccgacggctactcctgcttcgacgacgacgacggcagggtggtggacgacgacgacgacggcgacagcttctccacgacgaccgcgtcggaggagtggtcggaggcggtcatccgcagcctcggccgcacctccaccgaccgcttcttcttcgaccccggcccgccgaccaactccatcctcgccgccgccgccgtgccggagacgaagcccgtggcagcggcggcagtgttccacgacgaggagaaggagaagctgccggagccgccggcgtcgctggtggaggagagcgtggcggtggcggtggagtcggaggacccgtacagcgacttccgatcgtccatggaggagatggtggcggcgcacggcctccgccgctgggacgccctcgaggagctcctcgtctggtacctccgcgtcaacggcaagcacaaccacgccctcatcgtcgccgccttcgtcgacctcctcgtcggcctcgccgccgccgcaacaaccaccggcaccactccaacgacgacgacgacgaccagcagcggccgcagcaccgccagcacgagcaccgcctgcgacatcaccaccaccaccaccatcaccacctcctccgcaacggcaacaatggagccatgtccatgcggcggtggatcatccgatgatctcgaggaagaagaagaagaagcaagagtgatgatctcactgggagctagcagctgcagcttagcaccaagtacatttgctaattcttgattaattctgctaattaatttgatcttggtgattaatccagcagatatcctggaattagatctgaaaaatgtacgtttttttttggaatttttttagtttggttttatgtttttttttgtcttgatagtatagtatttacaacctggtgcacatatataggttggagggatccaatgtaccatatagaattaattagggagctccatactgtattatgaaaatgagatactagctttgacttttc

SEQ ID NO: 9793 - DNA, 1519 bp, Oryza sativa
  ref <308>: DATABASE ACCESSION NUMBER: AK107141
  ref <309>: DATABASE ENTRY DATE: 2002-08-28
gcatgcgtgtcttcttcctaccatcacttctctcgttttgctatcgatctcatggatgtggcgtcgttggaatcttcggtggaggcaacgttggatgccctcagaggagatcaatggagggcgcggcagccatttaccatcttccgcgttcccgccaacgtccgcgagagcaatcgcacctcgtacgagccgcgcgtggtgtccatcggcccctattaccacggcggcgccccactgcgcaccatggaggaccacaagtggcactacctacagggcctgctgtcccgccacgccggcgacggcagtgtcgcggcggtcagcgcgtccactttggtcgcagagatgagaaccctggaggcccaggcgcgcgcctgctacagcgagcgccccgccggcctcgcctccgacgacttcatcgtgatgctcctgctcgatggctgcttcatcctcgagttcctcttaaagtggcacgccaaggagcccgacgcgctctgcgacgctggaaggggcctcacgcttgtccccgcggccgccgacctgctcctcatggagaaccagatcccgttcttcgtcctcgagaggctctatggcgcagtcaccggcggcggcgcccagcacggcagggagtccctccttcaccttttcgtcaagtacctcggcagtgaggacgaagagccaatgagatggccttccggcgactgggaggtccaccacctcctccatctgtactaccagagcttcattcccaaccgaacaccgccgcgaagccgccgaggcccacggtctgaccgacggacgatcaccaggacgccacgggtgataccatgcgcaaccgagatgagagaggcgggggtacagttcgtcgccgcgcagagcccagcggccgccgcaggggggacgaggtacgacgtggcgttcgacgcccgctggggcgtaatggagatacccacagtcctgatcgacgacgcgaggcggccgctgctcgcgaacctgctcgcgttcgagcagagccagcgcggcgaggaggaggggctcctgagcagctacgtggcactgatgagccagctcatcgtgacagcacgcgacgtggagctgctccgccggcgcggcgtcgtggtgaacctgttggacaacgacgaggaggcggcccggttcttcaaccgcctcgacgactgccacccggcgggctacgactcgcaggccttctccggactgtacgacgacgtgacgcgctactgtgggacatggtggcacagccacatggctgggctccggcgcaattattttcccagcccgtggtcggccatctccgttgccgtcgccacattcgtcatcgctctagccgctacacagacatacttcacggtgttcccacccaacaagtgatctctcgtggattagatatcaattttgctatatatttatcgacagatgtaattacagtacaattatagtgtgattacactgtaacttacatgtaattacactgtaactataatataacttgtatgtaactttc

SEQ ID NO: 9794 - DNA, 1421 bp, Oryza sativa
  ref <308>: DATABASE ACCESSION NUMBER: AK107142
  ref <309>: DATABASE ENTRY DATE: 2002-08-28
atcccagcagcattcgtcgacgcgcgctctgcggtagccagaagctagcttagcatacgtgcaactgcgtgtgcgacgcgtacacggctgtacagacacagataagcctctcgcctacgtagacgtcttcccgaccatgccggccttcgccgacatcgccatcgacccgcctctggccgacagctaccgcgcgctggcgctgctccgccgcgaccgcgacggtggcattgcgccgccggctgtgcagatggtcggctcgggcggcgccgtgctggagcgcgacctgccgatggtggacctggagcggctgacgaggggcggcgcgggggagaggaaggcgtgcgcgggcgccatggcgagggcggcgtcggagtgggggttcttccagctgaccaaccacggcgtgggccgggagctgatggaggagatgaggcgggagcaggcaaggctgttccgtctgccgttcgaaaccaaggagaaggccggcctgctcaacggctcgtaccggtggggcaaccccaccgccacgtcgctccgccacctctcgtggtcggaggcgttccacgtcccgctcgccagcatctccggggcggattgcgactttggagacctcacctccttaaggggcgtgatgcaggaggtggccgaagcgatgtcgcgggtggcgaacacggtggcagcggcgctggcggaggagctgaccgggcgcggaggcggcggggcatcggcggcgccgtggttccctgcggggtgcgacgagacgacgtgcttcctgcggctcaaccggtacccggcgtgccctttcgcggcggacacgttcgggctggtgccgcacacggacagcgacttcctcaccgtcctgtgccaggaccaggtcgggggcctgcacctgatgaaggactcccggtgggtggccgtcaggccacgccccgacgccctcgtcgtcaacatcggcgatctgtttcaggcgtggagcaacaacaggtacaagagcgtggagcataaagtggtggccaacgccaagacgggccggctatcggtggcctacttcctgtgcccgtcctacgactcgcttgtcgggacatgcggcgagccatcgccatacagggccttcaccttcggggagtacaggaagaaggtgcaggaagacgtcaggacaaccgggaaaaagattggcctcccaaactttttcaagcattcttcagtacaataatgatcgcatcaatgacagcaaccgcttgttctatatatgttcgttataatttatggtcgatgtgaactcgaccgtaccatcaatccatctcactgtacaattgtgtgtgcggtgttcggggttggaggttctttccttatcatttccgtggccttttttggtttgtagattgtaattggcaaggtagtactatacaagtgattaaacc

SEQ ID NO: 9795 - DNA, 1720 bp, Oryza sativa
  ref <308>: DATABASE ACCESSION NUMBER: AK107143
  ref <309>: DATABASE ENTRY DATE: 2002-08-28
caagcaagaaagaggcagccagtggcgatacaagtgtaggttcatcatcaagaaaagtgcttcatggcgaccaagcagttgttaactttgatttctacatttcattgaggaatgcaagattcattcggtcacttttgcacgacagacttggcaaccgtgtatctgttgagatttcatctactgctaatatttctgcaacttatggttttaaagaagctagccgagaaatgcatactggcatttgtggctgcaaacaaccagtgccaactgtaaacctgcagaagccaatcgataacttatacatggatgacattaacacccacttcgaagacatcttgaaagttgatgatggtgatagagatgctagtgatggtggagatgccccatctttcatttatatgtggccttgtccttctaattgtttgaaaccatatagtgcccactgctacatcagcgtacaggatgagatgcaaactaatttacatcagggtactactactattataaaagaagctagtggcattactttgccagatttcgtgcatgacagtgcattgagcctgcacttgcacgattgcttgtctatcaccagtatccaaggccatgcatctgctgcaatagatttgagttggaggatcctatggtggtgccgaattgagaggtgtcctaacttagaaggcactatttttactgcgccttgcactcgagacaatattttccggagtctcgaaacattctgggcatctcaactcttaaaggttttctacatctgggactgggacacgtcattgtttcagcctagctacaattcattcgagaacctgaagttcttacatctagatcggtgccccagtattccgaaggctaaagcgcatccacctgcacgagctacccaagctgcagcgcatctgcggccgcaagatgtccacgccccagctcgagaccgtgaagatcaggggctgttggagcctcaaacggctgccatctgttggtcgccacgatagcacaccacctatagtggactgcgagaaggaatggtgggatggccttgagtgggaaggcatggaagccaaccaccatccttccctctacaagcccatccactcgcactactacaagaaagccctgcggagaacctccctactcaggtagccagtaatccctactatctcaaatgattacggcttggcatgtcatgggagaagagatgcttactctgctttcttcaagtcaatgataagttatgtatgtccttgtactctttgcatcattgcatgacactgtgacgtctcgcttgcaaggaagagatgccttgtctacagacagatctgctgcttattttgcatctgcatgattttgcccgtcatggatgcgatctgcatccgcattgtccgtgatttctgtttggtttttgttgcctttgctggacttccatggagaaacgatgcatcatctttatggacagatgatgatccaatttgagttgctcaatttggtggcctagcttcatagcttgggtagaataaacaagagcacgagatcaatcatcagcttcagcattaacagaataatctagtggctgaactactgaactcttcatcctgtattgctgcttggtgtaataatgtgtggtgtgctgctacccgtttgtgtgtgatttgtcactatgtgtggactgttgtacctttcttactttttactaccattctatttggctggc

SEQ ID NO: 9796 - DNA, 1321 bp, Oryza sativa
  ref <308>: DATABASE ACCESSION NUMBER: AK107144
  ref <309>: DATABASE ENTRY DATE: 2002-08-28
agccgctttaccaactctcccaagaacacactcaagacacaaactgagatgctcacctgtcgctgcgatccatttgccgctgcattttgatcatgccgtctccaacctcgtcggcgtcggcagcggccagggggagcgctggcgccggcgataccctacgcaactcctgccacgacttcgcgcgcagcctggcgcggctgccggccagcatcatggacggcctctccaggtccatggctcgccggagccgccgcccccgcgacacccagcctcaccctcctcttcctccgccgctgctgccggaggagctcttcttcgccgagttcgagcggcggtacggcggccgccacccgttcttctacgggtgccggctagccgaggcgctggggatcgcgcggcgggaggggaggctggtgttcgtctacctccacgacgccggcggcggcggaaacccctacgccgaccagttctgcacggggacgatgtgctccgacgtggtggtggagttcctcgacgccaatttcgtgtcgtggggcgccgtcgccgggagaggggaaggtgcggccatggtggcggcgctgcggcccggcagcttccccttctgcgccgtcgtctctcccgtctccgacgagagcatcgtcatcctgcaacaggtagaaggcccggtttcgccttcagagctggtggacattcttcagagaacaatcgatgagcaacgtgcatcctccagacagtcttggcctgatgagcagctagctgcagcagtgagagcctcaagagctgatgaagaagagaggatgagatcagtagctctaaggctaagacaggagcaagatgcagcttatctcgaatcacttcgaaaggatcaggagaaagaaaggtccaggaagagtgttcaggagggatctgcgaaaccaaaggcgagcaatgtgcttcgtccaagataccctggtcaatctgcaagggagcctaacaaggcagctcaggccagagctcctgctcagaatcagaatggaactgtggcttcacacagagcagaagcaaataccaagataatgataagatttcccaatggagagagaaggcagcaggcgttccatcatacagataccatcagggaaatctacaggtatgttgattccctaggcataccaggcatcggaaattatcagctcgtgagaagctatccaaggaaaacttatggtcgccagcagctggagatgagtctccaagatgcaggcttctatccaagtgtaacactgtacattgaacagcttcagtaaacatgctgtaatcatgaagatgactgcaaatttcgtgt

SEQ ID NO: 9797 - DNA, 1497 bp, Oryza sativa
  ref <308>: DATABASE ACCESSION NUMBER: AK107145
  ref <309>: DATABASE ENTRY DATE: 2002-08-28
acaaactctcatggatattcccttgcaatagcacagccaaatagcaacggtaccatcaccatcatttatcatgggcacaacttgctagatctcatccaatcttggtgatagagaagaagggaatgtcagctgccattttaaacatccctgtgcttgttgttcatagcaacttcaattcgatcacagagataaggtcaggtcatagataaatagagagattgtctctgtcactggttgtgtgtgtgtgtgggagaggcagtggatgacgagggcaatgaggaggaggaggctacgcattggcaaggtgctggactgcttctccttctccatgtgttgcgcgagaagcagcggctgcctctgcttgcgcgcgtcggaggaagacggcgacgaggaggcggccatggagaggaagtccctggtgagcagtagtagccaggtcgaccaggtgatcaggcttcgcgatcttgttgatggcacgaggacactcgggttccatctagaaccaaagactgtggagctcaaggtgtccatgcactgcaatgggtgtgctaagaaagttcagaagcacatctcaaggatggaaggcgtgacgtggttcgaggtggatttggagaagatgaaggtggtggtgacgggggacgtgacgccattggaggtgttgcagagcatctccaaggtgaagttcgcgcagctgtggccccttcccccccaacctgctgcaccagccaccgtctcctccgcctagatctcgatccgttcccatctcaaaatggcgggggccaagccaagccaaccgcgcgtcgtgtgccaccgtaatattatcgcgctcacgcggggaaattgcagattcagcgatgcattggcattgttaccgagaccaaccaggcaaccatcgtttttactgcaccctcttgccggcttctctctgtgtttggaaataaaccaacctaaaataagttgaaacggcacaagttcaaaattgttatactaaggtaatgtctcattttattttaggttggtttaatttagaacgaagagaatagctccatatgcatacatgccacggtaatctaaggctgacgcgttagtcaatcaagctacgtttgaattttcacggcgatctatattggcactaggaataatgaagagggaattataactactagaggctgtttggtatgtactccctctgtcccttaaaaaatcaatctagtatcggatgtaacacatcctaatactacaaatctactatcagattcgtagtactagaatatgttacatccgatactagatttgttttctgtgcaacggagagagtatgtggatatactactttatagcttgtgtggaaaatgaattgtttcatggggaaggtgaaggtttctgcagaattttacgagattttctgtgctccaaataggcttgtaaacattgtactactcgtgttctgaaaaaaaaacattgtactgtttgctttgcaatgagattggtcgatct

SEQ ID NO: 9798 - DNA, 911 bp, Oryza sativa
  ref <308>: DATABASE ACCESSION NUMBER: AK107146
  ref <309>: DATABASE ENTRY DATE: 2002-08-28
agccatcagcagcagcgcccggatcacgatagcgcgccaacttttgcgtgacaccgaccgaactcgccgaggtttgtttggttcagccatggtgccgagggtggagcgcggcggcggcgggttccatctccccaacagcgagcgggaggactcgctgttcatccgcgcgctcatctccgtcgtgtccggtgacaccacggtgccgacgctgctgccggagccgacgatggcgaccgtggttgccggtgcggctacgtgcgccaggtgcggggtggacgggtgcatcggcgtggactgcgaggtggtggtgttggcggcggcggctggctcgagctgcagcgacgaggaggatgagggggagtgcaccacgggcgcggtggccagcggcggcgtgacgggcggcgtgggcaagaggaggccgcggaggcggagcggcggcgaggggagcaggtacaggggcgtgcggcgtcggccgtgggggaagtgggcggcggagatccgcgacccgcgccgcgccgtctgcaagtggctcggcacgttcgacaccgccgaggacgccgcgcgcgcctacgacgtcgccgcgctcgagttccgcggccagcgcgccaagctcaacttcccggcgtccacggccgcgcagcagccacgtccactcctccatcacaacctccgtgagaactgcggctcgaacgcgtcgtcgccggtgcacgcgccagagcacgcgaggacggcggcggcggcgaaggaccaggagatctgggacggcctacgggagatcatgatgctcgacgacggcagcttctggtccatgccatgatcgatgatctgtcacccatttcattgctcgatcgttgcttcatttcttgttccattcttaataggattcttaaacctttactactgttccccgc

SEQ ID NO: 9799 - DNA, 1286 bp, Oryza sativa
  ref <308>: DATABASE ACCESSION NUMBER: AK107147
  ref <309>: DATABASE ENTRY DATE: 2002-08-28
agatgaatgaaggaagggatgagctgcttctcgtggaaccccagtctgcggtgctggcatggcagcaatgacggcggcagcccgtgcagccaggccgcgcaggcggcgtcggcgggggcgggcggtgcgaagaagttcacgctggcgcagctgtcggcggccacggacgggttccacgagtccaacgttgtcggcgagggcgggttcggcagggtgtacagggggcgtctcgaggaaggcggccaagggctcgtggccgtgaagcagctctgccacggtggcgcgcagggaacccgcgagttcctggtggaatgcatgatgctcatgatgctgcaccaccccaacctcgtctccctcgtcggctactgcgccgacgccggcgagcgcctcctcgtctacgagttcctgccacgcggcagcctcgacgcgcacctcttcggcaggaggccgcaggagcccccgctggcgctggggtgggcggcgcgcgtcaggatcgcggtcggcgcggccagggggcttcgctacctgcacgaggtggtgacgccgccggtgatctaccgcgacctcaaggcgtccaacatcctgctcgacgacgacctcaaccccaggctgtcggactttggcctcgccaagctgggccccgtcggcgacgacacccacgtgtccacgcgcgtcatgggcacctacggctactgcgcgcccgactacgccatgagcggcaagctcaacgtcaagtccgacgtctacagcttcggcgtcgtgctcctcgagctcatcactggacgcagggccttcgacgccgcctcctccgactcggagtcggaggaccaccagcgcttcctcctcctccgggactgggcgcgcccctacctcgccggcgaccgcaagaggtgcttcgccctggccgacccggcgttgcagggccgctacccccgccgcgccttctaccagctcgccgtcgtcgcctcgctctgcctccgcgacaaccccaacctccgcccctccatgacagacgtcacccgagccctcgaccacgtcgcctcccagtcccagccatgggaagacaagcaaagagccaccaccaccacgcctcctcccaactcccaaccttaattcctccatctgctcattctagctactagttgcctagctctctctctctctctctctcttggttggattcccatgttatgttcccccttaatttggaaggccatgggtgatttcactgattgattttcatcattttcttagttgctcttcatgtatatatattaacctttaac

SEQ ID NO: 9800 - DNA, 1076 bp, Oryza sativa
  ref <308>: DATABASE ACCESSION NUMBER: AK107148
  ref <309>: DATABASE ENTRY DATE: 2002-08-28
gacttttgccctcccttgggcatccatctcctctccctccctcccctcccctcccatccctacccccaaaatcgccgaccgaccgcccccaaatcccatccaagagccgtcgcctcctccaaagatcggatttcgagaccccccagatcggggggagagatccccgtgtcgtctggtgtggtgggtcggcctccgccccccggccgccgcgcttctcttgatctttctttcttttttttgatttttttgcgtttcccctccgggagaggggaggggaggagggttcttggatgggctgctttccgtgcttcgggtcgggcggcaagggggaggcgaagaagggcggcggcgggcgcaaggacggcggctcggcggatcgccgcgtcgcccgggtcggatcaggtgcggttcttgtggtgggggtgtggggggaaagggttggatcttgggggtggttttgtttgtaggaaatggtagctgatgatttgctccgatgtggtcagttcatgagattttggtgtgattcggatcaatgggcgattcgaactttgtgctaacacgtattcgattttagcgaatgggttggagacaatctcgaggtttcggcgcggatggtggtgtggtggtatttgggagattttccttttgtttgtgttaggctattttgatggtatgagtgcttgatgttagtatgcgttacttatctatttgtagtttatctgtgatgttttggatcggtaagctaggtcatcctttttggtttatcctataactgatagaagccagcggctttagtgattttttcgtggatggataggaggttgtggatggataggaggttgcagtatgactcttgcagtattggattcagggggacaaggaaattaatgtttcacttcttgtttatactgataaatgatgtggaagtacttgcaagactgctatagatgtatatgaagaaatggacgagtcagggagacttagcttccccccaggaaatatcacctgcaattttagcaataatcggtaacaatgtggttaaccttgttagtaaagctgacctttgaaagcattct

SEQ ID NO: 9801 - DNA, 1227 bp, Oryza sativa
  ref <308>: DATABASE ACCESSION NUMBER: AK107149
  ref <309>: DATABASE ENTRY DATE: 2002-08-28
agagatgcgaagcagatatcagctgtaagcaaagcctactagtactagttacggcagagcagagaacaggcggccgaaccgatcgacgacgatggtcaccggccggagcgagcagatggtgtgcgtgaccggcgccggtggcttcatcgggtcgtggctggtgaaggagctcctccaccgcggatacttcgtgaggggagccatgagagaacctgcggacatcaagaatgctcatttgcatgttctggatggagctagagaaggcctgtccctctatcgagctgatgtgctcgaccgcaacagccttcgtgctgcgttcgccttatgcgatggcgttttccacgtggcatcgccagtctcaaatgaccctgaacttctgccagctgctatcgagggaaccaagaatgtcatcaacgctgctgcggacatgggcgtcaagcgtgtggtgtttacttcgtcttatggtgctgtccatatgaaccctaacagaagatctgaccagattgttgatgagagctgttggagtgaccttgagttctgcaaacaaacacagaactggtattgctacgcgaagatgttggccgagaggacggcgatggaggaggcgtcgaagagaggtgtgaatctgttggtggtcgtgccggccgtcaccgtgggggagatgctgcagccgacgctgaacgccagcgtccacagggtggccacctacatgtggggcaccaagagtgcgtacccgaacgccgtcgccgcgtacgtcgacgtgcgcgacgtcgcccgcgcgcacgcgctggtgtacgagcaccccgacgcgcgtggccgctacctctgcatcggcagcgtgctgcaccggtccgagtttgttcgcttgcttagggagctcttcccccagtaccctatcacctccagatgtaaggacaacagtaagccaatggtgaaaccatacaaattctctgtacaaaggctggagactttaggcatgcagttcactcctttgaaagagagtttatacagaacggtaataagcttacaagacaagggtcatctacctgcagcaatctcacgccgttcagccctgtgaatcatgatcagccctgggaagatttgaataaattgattgcgaatcatgatcagatataaattaaagggaagatttgaataaactgaatctgcgtgtatgcattgtgaaaaggaatggagttgaatcctagtgagtcaatgattatcgtt

SEQ ID NO: 9802 - DNA, 1656 bp, Oryza sativa
  ref <308>: DATABASE ACCESSION NUMBER: AK107150
  ref <309>: DATABASE ENTRY DATE: 2002-08-28
atccgatcacacacacaccatagccaaaaaaaacacaatcactcgaccaaaccacacctagctactacaaagctagtgatcataagctaaccttaattagctttaattagccaagaagagacaaagagcaagatcgatcatgtaccaccaccaccatggcggccatggcgaggtggcgagcctccacctcctctcgcctccaaaccctcccttcttcggcgccgccgcgcaccaccaccaccaccaccacggcctcatcaacatggcgctgccgcctcaggcctacttcgtccccgccgcgccgccgccgccgttccaagaagccactgctgcgctcgccgccggcgacgacgccaccgccgcgttggcggtgtttgagctggagcgcatcctggaagaagcggccgccgcgggcggcggcggcggcaatggctcaccgagctcgggctccgacgggtgctgctacggcctgcagggcgtggctccggcggcggaggaggagcggcggcggcggcggatggtgtcgaaccgggagtcggcgcggcggtcgcggatgcgcaagcagcggcagctcagcgagctgtgggcgcaggtcgagcacctccgcggcgccaaccgccgcctcctcgacgagctcaaccacgcattgaggggctgcgccgacgtccgccgcgagaactcccgcctccgggacgagaaggccgagctcgccggcaagctccagctgctgctcccgcggcagccggcgccggagaagaacgccgccgacgaccagagtagctgctcctcggagccatgcaagaacagcactacgactaccgctgctgaatgaattatattattcattattattattattatccaccaaattttcacttgagaggataataatattaacaataatatgtttatcaataagaaaacgtgtataactaaacaaggataattactggggatggaggcatgcatgcatgcatgcgccatgagatcgatttttctgtttcgaggaggtttttgctgtgtatttttacaactaattatatacttatacctgcggttaaattaacatggatcaatggatcatatatattatttctatttacaagttgcaaaactgcagttaatagaacactagtaagacaaaatgatggggtagaagaggcatgtacaactctaaaagtagtagactacttgtcaaaacgttgtgcaactatgaagttaaaaaaaatagtgcctttcatgtaatgatgtcacggggttcaactaacttgtaatggattatgctttgggattgctaatggatggcatactttcttgatgttaagttacccataataacccaactgctgctgctctgttctgtagttcattagctattttacctagttgtatcaaacaaggttctggatgtgtatcaaacaattttggtactcctatatgaatgttcccatcaagatctgaaccacatattcctattcattgagatgcttatcgaataggattccaaagaatcttaaggacgagcccggcaacatgtgccacgaaacaaatctaggcttttgtcaatacataaacgtgagtgttcatcaaaacaaacgagcaaattcaaaaacatagcatatatatatatatataagacaaaaaaaaaataaatat

SEQ ID NO: 9803 - DNA, 1957 bp, Oryza sativa
  ref <308>: DATABASE ACCESSION NUMBER: AK107151
  ref <309>: DATABASE ENTRY DATE: 2002-08-28
tctgcctctgcgcacccatccgcccctgaccgcgcatcggccccgcgccccggcgccccctccactgctccgccgaccaccgtcaggtcgcgacgccgccgatgactctctcgtgccgccaaggatcacgccgccaccgtgactcctcgccatcgatgcgcgacgtgacgcgtttccatctcttcgttcgtcgtcgacgtcttcgccggcctcctcaagaatcccgcaccgccgctgtcgaccgagatgaggaaagccaagccattatcgaaatagttgcgcgcgtaggcacaccagcagaaaaaggcaccggccactccaagctcgtccggcactacgactcggaggcctcctggaacaatgtatcactattcactagcacccctccttcctcactgctttgctgttcttgttgctatttgctaatggtctgcctctagattcctgcctgatgcttgcttgtttgggctttgcaaaggattaatggctggacatcgtgcattggatccggcaggggtgcaattacatcccaaataagatgctacttgttagcacaataattaaattcttcatgatgttactttaagatcgatgtagccacctgtagcaaatgttgagtgcatgatcaaaaaattgaagtttactgttgtttacttgtgaattgggatttgcttgcatcagtctacaaaatcttccctattgcttagttcaaaactaggcggtgtggattttggttaattttgacatatgcaggatcttagctcgatgatacgtgcgcatctgctgtttaagatgcacttggctctgttcagggatgattaactgtgcattctttagttactgattagtaagctttacagtataataacttagcggctgaaatcgtaaatgttagtactgcatttcctttacttggatgtaaggattcatgcaatcatgtggtctcacttgtgttgaggttttagcaaatataattcagattggcctggttggcagagctgagcatatgcgtgagttttgaatcttttagtagttgaatactgctttgatatgtctgtagcaccccaaatatgttatgcagaattattggtacttatttgtgtttattgcaccgtcattcatttctgtagctattgcctcatgatgaagcaatatttggatatgtcatcgaagccagggagaccaagagcagtagtcatctgctccacaaggtagctgactgatcaggtcaggttatccttactaccaaaaaacatgagtttatgatcggatttttttaaatgatactgctgaatgtgatttcgtgcaatgggatgaggcgtatatatgcctgtctaattgtattgctttgaatagaattggtttttagataaacctaatatgtttatttttagacaacaacatggattcatgctggattttagtatgaaaacctttggtccatgctggagtttagactaaaaaactctcctctctcaatattcaaataatgtgttacaaaagatcccatggtggtggtagagactaaccaccacttaatactgttttttatttttgtttatttagatacaacatggacaaagttcataaaattacattagtaatcatcatcaaattcatgcttttcattcaggctgaagagatgggtaggtttttcggaaacacaattatatccaggtattattcagtttcttgttgcttcttatatcatgtaaagagcttatttatctacctcggatgttcattccaagagacagcataaattactccggagatcccaaaacttgagctgtggtgtcttaagttagcaactaacatatctgtaatatttatgtttctcaaagatgtgcccttatcagtaaattgtgaaggagggttggagaggccttcaagtgaattttttgttgttgttttcttgacatagaaatgcaataaagaagattggattattttaggc

SEQ ID NO: 9804 - DNA, 775 bp, Oryza sativa
  ref <308>: DATABASE ACCESSION NUMBER: AK107152
  ref <309>: DATABASE ENTRY DATE: 2002-08-28
agtcgtgccattccaatcacctcggcgagatcagtccaaactccaaagaaatcaagaattcgcagatgaaggtgcttgtggcggtggacgacagccgtggcagccaccgcgcgctgtcctgggtgctcgaccacctcttcttccccgccgccgccaccggcgacggcggcgaggaggagcaggtgccgcggccggcgccggagctggtgcttgtccatgccattgagccgctccaccacgtcatgttccccgtcggcccagggtcggcggtgtacggcgcggcgtcgatgatggaggcggtgcgggcggcgcaggcggagaacgcgcggaacctgctcgtcagggcgaggctgatctgcgagcggcgtggggtggccgcggcgacggtggcggtggagggggagccccgggaggcgctgtgccgcgccgctgaggacgccggcgccggcctgctcgtcgtcggcagccgcggcctcggcgccctcaagagggcgttcctgggcagcgtcagcgactactgcgcgcaccgcgcgagctgcccgatcatggtcgtcaagccgcctcccgacgccggcgacgaagacgacggcggccactgcacgagcaactgaactgatgatggatcgccattacatccggaagaccagctttcgagggggaaagagaatcaagagagagacacttgttttaccattgttgttcctgctcagtgctgaatttgtccttccaaagttcctaccctgaagcgccgtcaataaacatttttactgtgtgc

SEQ ID NO: 9805 - DNA, 1484 bp, Oryza sativa
  ref <308>: DATABASE ACCESSION NUMBER: AK107153
  ref <309>: DATABASE ENTRY DATE: 2002-08-28
gtctcctccctctctccctctctctctctctctctctctctctctctctctctctctcctccccgtcgcggcggcggcggcggcgaccggcgagggcgacgccaccgatcgggggcctctcacccgctcccctccctcactcaccggggcctcggtttcgccagctcggagggagttctttctctctctccgtagacgtctccgtgggttcttgcttgtctctgattcttcttgtggattggcggtggaggagcggggatcgatcgatctacccctggactcggattgactctcctctctcgctgggctatgagagacggaattttagttttaaacggcagctatttcatagcctggagtaagctttttcattcaggatagcatggggggctgctgttgctgttcatcaagaggatctgagacagatagagcaccagttcatatctatcgtcagcaaaatcaagaggagcatgaaccattgtcttcagcctatgatggatcatctccagcttctgctatagttgctgttgacacaaatctggatacatccactcctgatacttaccgagcaccacctgcaccattgccttatgatgttagtttgccagtcccagaaaaccctgatttggagaagtcagacctgaagagcaaaaccgatgaccaacaggaggaatctttagaggtggatgagttcaaatcatgtgaaaaatgtgtcgctgaagataagcctgatgaggaggatgtttgcccaatctgtcttgaagaatatgatgcagaaaatcctcgctctttaactaaatgtgagcatcatttccatctttgttgcatacttgaatggatggagcgaagtgatacctgcccagtttgtgaccagattactttgatagatgatatgtatgaatagcattggagcatgggactattatgtttggtttgatgctagtttgttttaatgaggaagtacagtcagcaaagctcctgatctatcaacctggtcagacgggggtgctattggaatgaattttgagaaaactaagggaaaataattgaagacgggaatggcttgaaatttgttaaatatcatctcagctttttacattttgtttgaagcattaactgttcatgacaacaggaggatttgttagtatccatatctactgctggttcgattgcttcacagttgatgaaacccccagatgagctatctgtttctttgtagttttgaacttgggatgtcttccatttcatttctggttgcggttagcgtctgtataaatcatgacacgttagataggtgacagggaaaaaaactttattctaatttatgttcaacgatcaaagctgtacaagcttcatgtatatccttcgccttttgattagtcagggactattaagtcccctgttgtgaaacaagttggctgatttatgtaaaatggtatacatttgcctgctttataatctcggcatcttttttgggttcagct

SEQ ID NO: 9806 - DNA, 1396 bp, Oryza sativa
  ref <308>: DATABASE ACCESSION NUMBER: AK107154
  ref <309>: DATABASE ENTRY DATE: 2002-08-28
atgccggttttcccggatcgaccaagagctcgagggagagggcacgggagaaggctggcggtggaagtgtcctccagcggcgggcggtggacgatgggcgaaattggtcaacgacggctgaaatcggtcggaggcggcgatggtcgcgggtcgccaacgtcctttgcgccgagccatggagaggatctcttgaggaggagggggcggttgacggcgggatgcggggaggagcttcctgctgcgttgaccacaccctgattcctccctcgaaggatctggcacggatcaggcctcccatcgctgcctccctcccacagcggtggcgtcatgatctgtgatgcacgatgataatgaggtctgcactcgcgccggtcggcagcaggcgctggagaccctggccacgcaaagcaggcatggggatggcggtcaggatcgatggatggatggatgttcaattcgtatgtgttccaatgaaagtcaggatgttttatttgttttattttctctccatgatctatctactcaatcaacctctataggcaatagctgcttgtttttctttgaggaagcatagctgccatgtttgatcagttaattgcagcttatttgccggcgccagatatgtggtgattgcttgtgttcgttgatgcgctgtataacatacatgcatgttccatcgatccattgtagatcaatttgtagtgaatgctagatcattctgaatttatgattattcttttcattaagaacattcggtccttttttattcttgaaatcgtttttcatctgaaaagatggcaggttttgtgtagcttataacttgtatgttattaatcagagatatctggatattttagcctgaagcatcccaattacgtattctacatttttcagccaactgcattcttaattttcttttttgcacaatgtcatcgattatagattgggactaggcaagcccaggaattactgttaaggaaacataatgtgacctccatgcttgtctgaataaaaaatgatctgttggctaaaagtacgcatgaaggaacctaaactggtagctcaattttttatgaagcattttatttcttcttcagcgaatcatatctcatttagagtcatttatgagtgtaaattatgtaatcgtttttgtctatatccaggtggctgtgggatgcctctctagatgttcgtgggtgatggatatctgccgatgggagacctaaggatctatagtgttttgtcggctcaacatcgatatgtggcactagcgccgtcttgtttattggattcgtgcatgtaatagtaatttagttactaagagacattgagaaccatcagtgatagtaacttggttactaagagatttttttggcaatatcaatatgttatgttg

SEQ ID NO: 9807 - DNA, 1521 bp, Oryza sativa
  ref <308>: DATABASE ACCESSION NUMBER: AK107155
  ref <309>: DATABASE ENTRY DATE: 2002-08-28
attttcgaatgctcctgactcctcctcggttcctcttcctctcgagcccttcactgcagtagcatcattcaagctggacccaaagcatcccagatcaaatcaaacccgctggtttggccttccgttttgagggattctatatctataggcttgtccatggcatcagttacttatcttgatgatgcccattctgaagttatcgatcctccaaagaacgaggagatgctggatgttactgaacttgttgatgatcacacccagcattcaccaaaaccgaatgcgatggtctctggcaatgtgcgtgagctactggaatgccctgtgtgtctaaatgccatgtatcctccaattcatcagtgctccaatggtcatactctatgttccggatgcaagcccagggttcacaaccgctgcccaacttgcagacatgaattgggtaacataagatgccttgctctggaaaaggtagctgcatcactagagcttccatgcaaatatcagaactttgggtgcttgggcatatatccttattactgcaagctgaagcatgagtcacagtgccaatacaggccctatacttgcccatatgctggatctgaatgcactgttgctggtgacattcagtatctagtaagtcacttgaaagatgatcataaggttgacatgcacaacggaagcaccttcaatcaccgttatgtcaaatcaaatcctcatgaagttgagaatgctacctggatgctcacggttttcagctgtttcggccagtacttttgcctgcactttgaggcattccagttgggcatggcacctgtctacatcgccttcctacggttcatgggagatgatgcagaagccaagaactatagctacagcctggaggtcggaggcagtggtcggaagatgacctggcaaggcgtcccccgaagcatcagagacagtcacaggaaagttcgggacagctacgacggccttatcatccagcggaacatggccttgttcttctccggtggcgacaagaaggagctcaaactgcgtgtcaccggaaggatttggaaggagcagtgaatcacaacatctctaacttctcgttgcgactgttagtttgattgcgacatggatcttgattcttgaatttccagggtgaaatgggattaatgcgtaagcgaattgctccgggaactagctaggcaggaccctgtaagattgtagactgtcttagctaccagctgccattcttcttctagtggttcaggaacattttgtatggatgattgtctcgtggcactgatgtagtagaattgaaggcaaatctcttctttgctcttaacttctccaagaattagccaatctggcgaatcttctgatggtgactctgccaaatgtaaatgatgtagctctcccctttgtatgattcaaatctatgtcaggccaccattgttttgccggaaatgtacccctgccaaacctgcatttgctcctactactacatgttcagctgtaaatttgaacaccttttctctg

SEQ ID NO: 9808 - DNA, 1603 bp, Oryza sativa
  ref <308>: DATABASE ACCESSION NUMBER: AK107156
  ref <309>: DATABASE ENTRY DATE: 2002-08-28
agaaaacacgagccataatcgagcaatgaggagcagggtcgtgctgtacacatggatggtccgggggcacctccaccccatgacgcagctcgccgatcgcatcgccaaccatggcgtccccgtcacggtcgccgtcgccgacgttccgtcgtcaggcgagtcccgtaagaccgttgcccgcctctccgcctactacccttccgtctccttccagctgctaccaccggcggcaccggcccgttccggcgccgacacggccgaccctgacgctgaccccttcatcaccctcctcgccgacctccgcgccaccaacgccgcgctcaccgccttcgtccgctccctcccgtccgtggaggccctcgtcatcgacttcttctgtgcgtatgggctcgacgccgccgcggagctcggcgtcccggcctacctgttcttcgtctcctgcgcttcggcccttgcttcctacctgcacatccccgtcatgcgatccgccgtgtccttcgggcagatggggcgctccttgctgcgcatcccgggagtccatccgattccggcgtccgacttgccggaagtgctcctgctcgaccgcgacaaggaccagtacaaggcaaccatcgctttcttcgagcagctggccaaagcgaagagcgtactggtgaacacgttcgagtggctggagccccgcgccgtgaaggcaatacgagacgggatcccccgccctggcgagcccgcgccgagattattctgcgtcggcccattggtcggcgaagagcgcggaggcgaagaggagaagcaggagtgcctaaggtggctggacgcgcagccgccgcggagcgtggtcttcctctgcttcgggagcgcgagctcggtgccggcggagcagctgaaggagatcgccgtggggctggagaggagcaagcactcgttcctctgggccgtgcgcgcgccggtcgcggcggacgcggactcgacgaaacggcttgagggccgcggcgaggcggcgctggagtcgctgctcccggaggggttcttggacaggacatgggggcgcgggctggtgctgccgtcgtgggcgccgcaggtggaggtgctgcgacacccggcgaccggcgcgtttgtgacgcactgcgggtggaactcgacgctggaggccgtcacggcaggggtgcctatggtttgctggccgatgtacgcggagcagaggatgaacaaggtgttcgtcgtggaggagatgaagcttggggtggtgatggatggctatgacgacgacggggtggtgaaggcggaggaggtggagaccaaggtgaggctggtgatggagtcagagcaagggaagcagatcagggagaggatggcgttggcgaaacagatggccactcgcgcgatggagatcggcggatcgtcgacggcgtcattcactgactttcttggcggcctgaagatagcgatggacaaggacaattgatttggtcaacaaaaaatcgcgaagcgatatggagtactccttttctttattttaggggatgtacagcttaaaaacatcgatgtctgatctttgtatttttcaattaaacaataatacaaatataaatcttattcttatctt

SEQ ID NO: 9809 - DNA, 1033 bp, Oryza sativa
  ref <308>: DATABASE ACCESSION NUMBER: AK107157
  ref <309>: DATABASE ENTRY DATE: 2002-08-28
aagctgagagcttaattcagaggcatcatgttcacagcgatgcatcgcatcctcagcagggggaggaggacacctgcagcttcgtcttcctccgtcactgccttcgccaccgcctccgattcacagaggttggccgggaaggtcgccgtcatcaccggcggcgccagcggcatcggcagggcgacggcggaggagttcgtcaggaatggcgccaaggtcatcctcgccgatgtgcaggacgacctgggacacgccgtcgccgcggagctcggcgcggacgcggcgtcgtacgcgcgctgcgacgtcaccgacgaggcgcaggtcgcggccgccgtggacctcgccgtggcacggcacgggcgtctcgacgtcgtcttcaacaacgccggcatccccggtgacctcacgccgacccccgtgggcgcgctggacctcgctgacttcgaccgcgtgatggcggtgaacaccagggcggtggtggcgggcgtcaagcacgccgcgcgcgtcatggtgccgcgccgccgcggcagcatcatctgcacggcgagcacggcgggggtgatcggtggcgtggcggtcccgcactacagcgtgtccaaggccgcggtgctcgggctggtgcgcgccgtggcgggcgagatggcgcgctccggcgtgcgcgtgaacgccatctcccccaactacatctggacgcccatggcggcggtcgccttcgcaaggtggtaccccagccggagcgccgacgaccaccgccggatcgtggagaatgacataaacgagatggatggcgtgacactggaggccgaggacgtggcaagggcggcggtgttcctcgcctccgacgaggctaagtacgtgaacgggcacaacctcgttgtcgacggcgggtacaccgtcggcaaggtgcccaacatgccggtcccagatggccattgataatgtaccacggttgatgaataataatgttgttgatgtgtacacaattcgtagtattaactctgtttcatactgtaagttcgtttggactcttttt

SEQ ID NO: 9810 - DNA, 1711 bp, Oryza sativa
  ref <308>: DATABASE ACCESSION NUMBER: AK107158
  ref <309>: DATABASE ENTRY DATE: 2002-08-28
aagagttcacttagtcaaacaagaacaacaagtggcatcaaatcactcacactgactattcccgcttccttagccgcacccacagcccgcccttcatcttcatcgtcgccgtcatctcgtacgccggcggcgattccatggccggagccggcgccgccacctcgacgctgaacctccgcagcacggctgccgccaccgtcttcatctgcacgtacgccatctccttcccgaggcacgccctcggcctggcgtggaacaccgggtaccgcgccgcgtccagggccacgaactcgccgccgtcgcggagccatcgctccggcgagaactcgaggcagccctcgccccacagcctctccatccgccccatcgcgtacgcggagtagttggcgaaccacccggcgcgcaccgccgcgccgcccgggagcacgtcgtcgccgaccgccaccctcccgttgaacggcaccggcgggtacagccgcatcgcctccgtgatcgcagcgtggaggtagtgcgtgtgcatccccttcgcgtcgccgccgccgtcgccgtcgggcgaccgcgacacctcgtcgcggacgcgcctctcgcaccgcgggttcgcggcgaggagccagaagagccacgtcagggcggacgacgtcgtgtccttgccggccagcacgaagctcacgaccacgtcgcgcaggagccggcgcttcccctccggcgtggggaacatggcgcccagctcgccgccgtcctcctcgtccatggccgccatgaaccgcgacagcaggtccgggtccacgtcctcgctatcgcgatcgcgacacgccgcctccttggattcgacgacggacatggcgtagtcgtcgatgacaccgatggcttcgcggagccggcgcgagctgccgacgttgacgaggcccgtgagcttccgcacgagggtgaacggcgccagcgccctccggaaggagatctcgacggcggcgtcgaacgccgcgaagagggcctcgtggcggccggagtcctccctcgccgtctcgagcagcgtcgagctctcgacgccgaacgcgacgtggcagatgctgtcgaaggcgaaccggcggagcgcgtcctgcaggtcgacggcctccccggacgccgcggcggcgtccaggaacgggaggagccctccgcggaggtgcacggcgaggacgtcgtcggagaagcggcggagcgcgcgggaggagaaggcgtaggacgccactttcctctggacgctccagaggcgcccgtcggcggcgaagaggccgtcgccgatgagctcggacatcgcggcgcggaagctcgcccccctgacatagttgccgaagttgccgcgcagggggtgttcgacggcggccgggcacgccgtggtcaccgcgtggccggcgccgaacgggccccacgcctcgatggcgcccgacggcgacgcgcgcagcaggtcggtgtaccagtcgaagaagcggcgccggttgcggatgaactcgacggtgttgcccaggacggggttcgggtgcgggcggtgcgccgtcgtgagcttcgccggagctgaccggccgcctcgccggagatggaagaggaggacggcggtgacgaggaagaggagcacgtaggctagatgcgcggtctccatggtttctcaattttcccggaaattcagattggcgaattcatacgggaggaattaatgctttttataattccatcc

SEQ ID NO: 9811 - DNA, 1585 bp, Oryza sativa
  ref <308>: DATABASE ACCESSION NUMBER: AK107159
  ref <309>: DATABASE ENTRY DATE: 2002-08-28
acgagctagaacactcgcgacgaggacctgtgccgctcgctcgttcgctctgtgactgtacgtacattacagaagcagaaatccatggcagcagcagaaggatatcagatggaggccgccgtgctcgcggcgcccgtggtgaaggaccgggaggtgctccgcctccggcgagacgcggccggccgtcgagacgttaccggactcgtgcggaccatcgtcgccgcggcaccgccgcccgacagtacgacccgcaccgcggcggcgggcgcgttcaacgtgatcgacctcggcgaggtggcgcggctgttcgcggcgtggtggcgcgggctccgcggcgtgcgtccctactacgccgtcaagtgcaaccccaacccggcgctgctcggcgcgctcgcggggctcggcgccggcttcgactgcgccagccgcgccgagatggaggccgtgctggcgctcggcgtcgcggccgaccgcgtcgtctacgcgaacccgtgcaagctggagccccacctggagtacgcggccggcgtcggcgtcgacctcaccaccttcgactccgaggaggaggtcggcaagatcaagcgctgccacccggggtgccggctgctgctacggatcaaggcccccgacggcgacgatggcggcggcgccatgctaaacttgggaaccaagtacggcgcgcaccgggacgaggtggtgccgctcctcgccgccgcgcggcgagccgggatggccgtcgtcggcgtcccgttccacgccgggagcgccgtgtcccgcgtcggcatctacgccgccgccatcgaggcggcccgcgttcgacgccgccgccgcgctcggcatgccgcgcatgcacgtgctagacatcggcgggggattcaaggccggcggcggcggcggcgaatccacgttccaggaggcaagcgccgtgatcagcgcggccctcgcgaggcacttcggtggcgacgacatgcccagcggcgtcgaggtgatagccgagccggggcgctacttcgccgagacggcgttcgcgctcgccgcccgcatcttcgggaagcgcacgcgcggcgaggtgcgcgagtactggatcgacgacggcatgttcggcaccctgtgctgcgtgcacttcgagaactacgtgccgcgcccggcgccggtgaccgccaccgccgacgacggcgacgagcaggcggcgaccatgggcggcgagatgatgatcacgtcgacgaacacgtcgacgaagacgcacccgtcgacggtgttcggccccacgctggactcgttcgacgaggtggtgaggggttatcagctgccggagctgtgcaccggggactggctggtgttcgacgacgtcggcgcgtacaccaccgtgtgcagctcagacttcaacgggttctccacgtccaacatgaagacctacctcgcctactcctgctagatcactgggaaagtgccacctaaatatcgaatatattgtttcgtacataccacccagggtcggaaatttcggtgacccccgatataatattaattcggccgaaatttttgaatttttcaattctttcatgaatttggataatgtttgttt

SEQ ID NO: 9812 - DNA, 2829 bp, Oryza sativa
  ref <308>: DATABASE ACCESSION NUMBER: AK107160
  ref <309>: DATABASE ENTRY DATE: 2002-08-28
gtttacacttcacagggtctaacaaaagccattccctgcttagaattgccagtaggtttcttcagcatacaattactatctcatctcaaggaactgcagtagactcttccacctggacaatgttccacatattctcttcctatccctgctgctcttggttcctgaagaccccaattttgccgctggagcttcagccaatgagtcattcattattttgggatcctctatcaacacaagcagcacccagtactggtcctcctcttcaggccgctttgcgttcggcttctatcccaacggcgaaggcttttctattggggtgtggcttgtgattggtgtgtcaaggacaattgtgtggactgccaaccgtgatgagcccccaattgctggtggttctatcatatttgggcatggtggtgcgctccaatggtcacgaactccatcaactccaggtagccaactgaaccccatatctgacagttctacacctgctgcctctgctgccatgttgaacaccggcaactttgtactgtatgatatgaacagacaggtcatatggtctactttcagttttccgacagacacattgttggcaggtcagaacttgcgtccaggcagatttcttctttcaggtgtctctcagagtaatcatgccagtggcaagtataggcttgagaaccaacaagatggcaatcttgtgatgtacccaacaggcaccattgactctggtagtgcgtactggtctacctggactttcaacatgggcctcctcctcacgctttccttagatcctaatggtaccatatggatgttcgacaggaaaaactcctatacaaagatactgttccatgccaaccagccttccaatgcctcccctgatatggaaatttactatcgtctgacatttgatcccgacggcatcctacgactctactcacatgttttctttaagcttggcagggcacctacaacagaggttgagtggcttgagcctggcagtgatcgctgccttgtgaaaggtgtttgtggtccgaatagcttctgccatctcaccgtgactggagagacaagctgctcttgccttcctggttttgaattcttgagcactaaccagagcacacttggttgttggagagcattgccaaccggtggctgcgtgaggaacagctctaacgatgagacgagagtgacaaccacgatggtcgaagtgaagaacactacttggttagagaacccgtatgctgttctaccagccacaactagtattgaagcctgcaaactactttgcctctccgattgtgcttgcgatatcgccatgtttagtgattcctactgctcaaaacagatgcttcccattagatatggcaggatgcctggtaacaccacactctttgtgaagatctacacttaccagaccatatccggtactcgccaaagggctatgagtatccatgcaaattctgcattgatatcaggggtttccttggccatcttttctctgtttgtgctattagtggcatctctattacttatctgcaggcatcggcgatcattggcgcacatgacgatgacggcaccacggcaagaggactccaggattgatgggaacattgttggcctcagatcctattctttccaggaactagatttggcaacaaatggtttcggcgaagagcttggcaagggggcatacgggacagtattcaaaggtgtcgtggccgacaccaaccaggacatcgctgtgaagaggctcgaaaagatggctgaggatgggcagcgtgaatttaacagggaagtgcgtgtgattgcaagaacacaccaccggaacctgctgcgattgcttggtttctgcaatgagggcattcatcacctgcttgtgtatgagtacatgccaaatggatccctggcaaacctcctctttcactcagatgcctcccctgcctggagcaagagggttgcaattgcactagatgttgccagagggttgcaatacctgcattcagagatagagggcccaataatccactgcgatatcaagccagagaacatactcattgacagtttggggatagctaagattgctgactttgggctagcaaagctactgattgggaaccaaacaaagacattcaccggcatccgaggaacccggggctatctagcaccggagtggagcaagaacagagcaatcaccgtgaaggcagacgtgtacagctacgggatcatgcttctggaggtcataagctgtaagaaaagcatggatctgaagcgggctggggaggagtacaacatttccgagtgggcatatgagtgtgtgatgtttggtgatgctggcaaggtggcagatggtgtcgacgaagctgagctggtgagaatggtgaacgtcggcatttggtgcacacagagtgaacctgtgatgcgaccagcgatggagagtgttgctcttatgattgaaggtgccatcgaagttcaccagcccccaccccctgcatcatattcgcagtcactaacatgagctgcaagcataattctgaaaaaatgatgaagtttgcttgaagcgctgcaaagtacagcaagggtcgtccgtctatcaccggttcaaatacatgagcttgcatcatggaacaccctgaaaattgacaaccaagtcttttacattatgcagctataagttttacattttgatcggtagaatgctatggatggcataagtacaggaacggtcctagcagatgctgttatgctagaagtctaatagatcatttcagtgcaggaaaatatatgatgaatcatgtactctgtttctgatatggaataaagtttatgagttct

SEQ ID NO: 9813 - DNA, 1721 bp, Oryza sativa
  ref <308>: DATABASE ACCESSION NUMBER: AK107161
  ref <309>: DATABASE ENTRY DATE: 2002-08-28
ctcctcgaaccaacccaacacaacacttgcacttgcactacgtactctcatttcatccgctcccggccggcaatggcgccaccgccagtgaactccggcgacgccgccgccgccgccacgggagagaagagcaagctctcgccgtcgggcctccccatacgcgagatacccggcggctacggcgtgcccttcttctcgccgctgcgcgaccgcctcgactacttctacttccagggcgccgaggagtacttccgatcacgcgtcgcccgccacggcggcgccaccgtgctccgcgtcaacatgccgcccggccccttcatctccggcaacccccgcgtcgtcgccctcctcgacgcgcgcagcttccgcgtcctcctcgacgactccatggtggacaaggccgacacgctcgacggcacctacatgccgtcgcgcgcgctcttcggcggccaccgcccgctcgccttcctcgacgccgccgacccgcgccacgccaagatcaagcgcgtcgtgatgtcgctcgccgccgcgcggatgcaccacgtcgcgccggcgttccgcgccgcctttgccgccatgttcgacgccgtcgaggccggcctcggcgccgccgtcgagttcaacaagctcaacatgaggtacatgctcgacttcacctgcgccgcgctgttcggcggcgagccgccgagcaaggtggtcggcgacggcgccgtgacgaaggccatggcgtggctcgcgttccagctgcacccgatcgcgagcaaggtcgtcaagccatggccgctcgaggagctactcctgcacaccttctccctgccgccgttcctggtgcggcgtggctacgccgacctgaaggcgtacttcgccgacgccgccgcggccgtcctcgacgacgccgagaagagccacacgggaatcccgcgcgacgagctcctcgacaaccttgtgttcgtcgccattttcaacgccttcggcggcttcaagatcttcctgccacacatcgtcaagtggctcgcccgcgccggcccggagctccacgccaagcttgccaccgaggtccgcgccaccgtgcccaccggcgaggacgacggcatcaccctcgccgccgtcgagcggatgccgctggtgaagtcggtggtgtgggaggcgctgcgcatgaacccgccggtggagttccagtacggccacgcgcggcgcgacatggtggtcgagagccacgacgcggcgtacgaggtgcgcaagggggagatgctgttcggctaccagccgctcgccacccgcgacgagaaggtgttcgaccgcgccggcgagttcgtcgccgaccggttcgtcgccggcggcgccgccggcgaccggccgctgctggagcacgtggtgtggtcgaacgggccggagacgagggcgccatcggaggggaacaagcagtgccccgggaaggacatggtggtggcggtggggcggctgatggtggcggagctgttccggcggtacgacacgttcgccgccgacgtggtggaggcgccggtggagccggtggtgacgttcacgtcgctgacacgggcgtcgtcgggatagcacgcacgtcgacgtcacgtgcgcgccgtgctgtgatttagtactgtactaggttggtggatgttttaattgcgtggttaattattaatcacgcataaagtattaatcatgttttatcatctaacaacaatgaaaatattaatcat

SEQ ID NO: 9814 - DNA, 943 bp, Oryza sativa
  ref <308>: DATABASE ACCESSION NUMBER: AK107162
  ref <309>: DATABASE ENTRY DATE: 2002-08-28
cacacaagatcaagagctggtagtagtactcttaccctcttgcattagccttttccttcatcatacaatttatcttgagaaatcaagctgtacctccacaagttgacatgtcgacggtgacctcgtgcaccttcctgagcatccgccccacggtgagctctgctggcagtctcttatccaagaaaccggcagcgtttgtttcccttgcgtcggagaggaaatctaggcctctttcgccgtgcttcgcaattagctccaacaaaccaggggacccaaaaatagatgtgtcgccattcagcatttcacccgttgttctggtgaacccggtgccggtggacggcgagcggtggcaggtggcggagaacaaagatgaagtgagcctgtggttcgacgtgccggggctttctccggcagatctgatcgtcgagatcgacgaggacgtgctcgtcatcaagaagaagaagaaggcgagcccaaagagcaactacaatactcctacttccggtgccattgcagatcatcaggaggccaccgccgacgagttcagcggcggcgggatctacgcgcggctgctcctcccggcggggtacagtagagagggtgtccaggcaaagctcacctccggcgagctgaagctcaccattggcaaggtcaaggagagtgtccgcaggaagatcaatgtcgatatctctgtcaagtagaattcagtgagcttccatggaattcatatatggtcatctgtgatgaaggatcggagcaacggtgcaagttatatcttgcctaagattctagctcatatatatcaataactggtccatgatctgatctctctctctctatgtatacatcctttgctgttttcctaaggttgagtatgcttatgtatgcaagctttattccggctgcatccaaataaataaaatgatcatctttgttgtgcttt

SEQ ID NO: 9815 - DNA, 872 bp, Oryza sativa
  ref <308>: DATABASE ACCESSION NUMBER: AK107163
  ref <309>: DATABASE ENTRY DATE: 2002-08-28
aaaaaatattcacaaataaaaaaatcaaaccaccgtcggctccacgtcggggaggtgaggggcagccagggaggcggggagttgctgccaacaccaggggagggaagcagctgtcggccgccactccggggaggggggagcagcagccaccggataactgctagaggagccgctgccctcgaatccgccgcaggaggaagctgctgccacccgatccactctcagccagcgccaccgccaccggatccacacgcggtcgccgtccccgctgtcagatccaccgtgggagggaggagagagggggcagagggagccgtcgccgctggatccgtcctcatccgccgccggatccacccgcggccgccgccgacgccgccatcgatgccggatctaccgcgggagggaggcgagatggagaggaggagatggcgagcgaggcgaatccatccgtggctcactcggcctccccgtctccgaccactctctccgcctcaagctgctcgcctccgaataccaccaccgcctccacgtcttcgccctccaggaggacctccatggtgatggcatcgtggatctggccggcaactcgagggaaaaagaaggcctgcgacgatgttgtggataggccgtcgacgatgtggtggatcggccggcaacgttgagggagaggaataaacggagaaagtgaggagggagagaggcggagaaagacgggaagagagaggaaaaaagagggagctgcagtctagatatttttactggtagtacatagtgtacgtgcttgagactttagataattacagtcaagtggcattgtgctctatattgtggtaaccacaagattgaatttcgctgaaaacaaactatttttg

SEQ ID NO: 9816 - DNA, 2456 bp, Oryza sativa
  ref <308>: DATABASE ACCESSION NUMBER: AK107164
  ref <309>: DATABASE ENTRY DATE: 2002-08-28
attttgtgcatcagctggccttttgtgacttttgtccatcaatcatacagtcacgctccttcctcggaaatttataatcttcgaatcagagatcgatgtcgcggcggccgtccgtagcaccggagccggctccgcggctggtctgcaatgcaaccacgggtgatctaccggcaggctgcaacctcggcctgctggcccgtatcgaactcctggtgctcttctgctccgccatcctcgcgctcctcgtcttcctcggctcctccaggcgccggagcagcagcgccaccgtccgcctcgtcgtgtggggcgccttcacggtgtcctacccggtggcggcctacaccatcggcctcatgcagtcgtcccctttccaccacgagctcttcgtggtctggtcctgcttcttcctcttcgtcctcgccagctccgactccatcaccgcctacaccctcgccgacatcaagagcccggccaccgtgctgctcaaccgaggcctccaggtcatctacgtctccgtgctcctccactactacgcctccgtgctctccccgaagctcaagatctacctcttcatcgtttggctcgtgagcttggggaagatcgcgttgagcgccctcggctaccggctggcgctgcgctccgacaggttggaggcggacaacaagctcgtcgctgattacatgacctacgagcacgacctgagccggcagggcggcagcgacggagatccggtgaccatggaagggtacaagtacatagtcagaggggaggagacggacgtcatggagctaacggcgccggactacgtcaagaagatcaaggtggacggcgcgcgtgcgctggtgacggtcgagagcgtctggcggtgcaaggggcggttgctgatgggcagctccgtcgccgacgccagcgccgccgcgcgacgggatctttgcctctcctttgccctgttcaagctgctccggcggaggtgcagcaactatcccctggccgagtccggccaacccaagacgagggactttgtcctcaggggcctcctcggacagggaaaagacgacgacgacgacggcgacggcgaccggagatcaagacgagacggcagagctttccgggtgatcgaagtggagctcggcttcctctacgacctgttctacacgaggtatcccttcatctgccacgccgcggtgagcacggcaccgcacctcgccatgtgcgccctcgtgatgaccatcagcgtgctcaccctctcctcccactcgctgcgacactaccaccctactcaccatagaagcatcgaggtcaatggcgtcaacctcgacgtcgccctcaccatgttcatcatagcgctagtcatcgtcctcgaggcgtaccagttcgtcgccgtgctcttctccgactggcagaaggtgaagatgctgtgcaggtacgtcctccggccgtcatggcaggggaacccgttcttcgaggcggtgttgcgcgtgctgtgctactgcggcagtggcgtgtactggaagaagacgatgagccagtactccatcgtccgccacgcctctcctggccacgccgtgaaggactggctgtcgcgggcgactcgccggtggctggacaggctcatgttcaacggcggcaaggcgcgatcggtgaaggtgtcggccgcggtggagagcgcgctcgcgtctgcactgagggatcgcgacgacgatgacggcgtcctcggcggcggcggccgcgccacgctgcggcaacacaggctagactgggcgtggggaggcgcgacgtggcgcacgtgcgcgcacgccattctcatctggcacatcgccacttgcctctgtgccatgcagatgccggcggcaataacccacaagaagacgcggccgcgagcgagaaaggccgccggcggcggcgacggcgacggcgaccgtgcagtggcgacgagcctgtcgaggtactgcgcttacctggtgtcgtcggcgccggagctgttgccggagcaccagtacaccacccggacgatcgccgaggcggtgctcctcgagctccgggtctgcctccgtggctgcgcgtcggacaaggaggtcttggacaggttgaaggcggtggcggagacggcgaccgcgagctcgccggagagcggcatccatgtgcacggtgcgaggctttggacacagctgatggtgatcccggaccaggagatgacgtggaagctcctggccagggtgtgggcggagctgatgctgttcgtcaccccggcggacaatgcgacggcgcacgtccagcatttgacgatgggcggcgagcacattacccacctctgggcactgctgacacacgctggcatcgtcgaccggcctaattctccgtccccacacccacatccggcgccgtaaattggcaccactgtatatcggtcattatattcctccttattgctgctatatttaattgtgttcctcctt

SEQ ID NO: 9817 - DNA, 1547 bp, Oryza sativa
  ref <308>: DATABASE ACCESSION NUMBER: AK107165
  ref <309>: DATABASE ENTRY DATE: 2002-08-28
ctcctcgccgcctccgagctcgcccgcgcggcggcgccggggttcgcgccattgctcgtctcgctcctccgccgcctccccttccccggcgacgcccgcctgctcgatatcttccacgagcacgcctccttcctcgccgacgaagagccccagctcctcgcctccgccgtcttcgccttcctccgcctcctcgccaagaaccgcctcgatccggccccgcagtgtctcgagtgcagcgactgtggcgagtgcaagaacgcgaagaatcttgcaggatgcagggagaatctggtgtcgttttgcgcctccgtgttgcgggatcacacccaagtgtgtgagctgatcgggagggacctcgtgaggtgtctccatgaactggtgctcgtgcaggagttccatgaactgtggaaggactcgatgctgggccgtgcggcggagatctgccgcattggcatgccgggttggtgcaccgcgatggccgtctcaccggagatggagacgcagctgctgttcatgatgaacaatgtgaggtgggggaatcagaagaggtaccagctgtggtttgcgaggaagcatttgatggtgcctggaggggaggagaggatacccgacattgtccggttcatctgttgcgggtatcacccaacaaataaggttatgcagtctggtgtcattgcccgatgggcggtcataggttggctgctgacaagctgcaataagagctatgtgcaggcgaatgcaaaggttgcgctgttctatgactggttgtttttcgacgagggtaagggcaatctcatgaatattgagcctgcaatgctcctgatggtaaactcagtgtctcagtatactgatatcacaaacatgctacttgagttcttgtttcttcttgtcgagaactatgacgtgcggaggaaggaggcgattgctgagtgtgtaaggaacgcatttgcggtactggtgaagaaaggagtggtcccttccttggatatattgacatgctgtgagaagctttcaccgatgctgaggcagaaacttgtggcatttttatcttctgctagtcctgaagaaaccgaaaaaacttgtgggcaacccattgatgaggcttctaaagcaatggatttgaacaacagagtttgctcaaactagacccttttactgttcaacagagtagcatgttaggaatgaactcaacaccacttgcccgcaatttctccttttgggatcttcaggaagacctggaaagaggacttgaagattgtatggcatcacgtgtagaggtgaacgcatgctttgaaggtggaagaatacggattgtagaatgtggcttaccaacagctggtcatatgagcagagctacgcatactaaatctctgctgacatgttacatcgcatcacagacacatttgtttacagagttacagtctaacccatccagtgaactacacaaccttgttagcatactcatattcatggttatggagataatgaactggccttggtattggtttctcacctgaaggatggaaatggaatacatttaactggac

SEQ ID NO: 9818 - DNA, 2482 bp, Oryza sativa
  ref <308>: DATABASE ACCESSION NUMBER: AK107166
  ref <309>: DATABASE ENTRY DATE: 2002-08-28
atcattcaaccaccggctatggcgatggcgatggcgatggcgctgctgctgctgctgcttctgcagctgtggtcggtggaagcgcaggtcgcagcgccgccgccggcgagctgcccggacaggtgcggcgacgtgagcgtgccgtacccgttcggcatccgcgacggctgccacctcccgggcttccgcctcacctgcgacgccacccacaccccgccgcgcctgatgctcggcaacggcaccctccaggtcgtcgacatctccctggccaactccaccgtgcgcgccctcgacctcgccggcgccgtcaacttcacctacgacgtgtcgaagctcgcccccagcggcagcggcacgtggtccagcctcggcaccgtcgccggcgccggcccgtacgtcgtctccgagcagcgcaaccggctcgtcgtcacgggctgcaacgtccaggccacgctcgccggggagaacaccaacatcatcggcggctgctcctccttctgcccggtcagcgagatgttcaccagcgtggcggcgaccgtccccgtcgtccccggcgccggcgccgacaacgccaccgatggcggcttcatctgctccggcaccagctgctgcgagacgcccatcgccatcggccgcccctcctacctcgtgcagttcctcagccttgaccagaaccaggagctcaccggcaagctccccgtcgccgtgcgcatcgccgagcgtgggtggttcgagggcgtcgccggcgagctgctcaacaccagctccgactccgccgccgccctccggacgccggtcccggtggtgctggagtgggtggtgtcgccgacgctggaggcggtgctgcagggcgtcaccgggcagttcgccgacgaccgcaactggtcgtgccccgcggacgcggcgaggagcgcatgccggagcagcaacagcttctgcagcaacgtcaccggcaactaccgccgcggctacgtgtgcaggtgccggcgaggctacggcgggaacccctacgtcgccggcggatgcctagacatcgacgagtgcaagctcgccgggaggtgctacggcgagtgcaccaacacgccgggagattaccagtgccggtgcccgcgcggcgctcgtggcgacccgcgcattccaaacggctgcgtcaaaactaatctaggtttaagtgttggtattggagttggcagtggagctgggcttttggtaatgggactgggcgctgcctttttaaaacgtaaggttaagaaacagagagcaagaatgctgaggcagaagttcttcaagcagaaccgaggtcatttgttgcaacaactagtgtctcagaaggctgacattgctgaaaggatgatcatccccttgtcagaactggagaaggccacaaacaattttgatagatcacgtgagcttggaggaggggggcacggcaccgtgtacaaagggattttatcggatcttcatgttgtcgcgatcaagaaatctaaggaggcagttcaaagagagattgacgagttcataaatgaggtagccattctctcgcaaatcaaccatcgtaatgtggtcaaactttttggatgttgtcttgagacagaagtgccattgctgatttatgaattcatatcaaatggtaccctttaccaccatcttcatgttgaaggaccaatgtcattgccatgggaagataggctcagaattgcaaccgaaaccgctagagcacttgcctaccttcactcagctgtgtcgttccctataatccacagggatatcaaatcccataacatcctattagatggttcactaacaacaaaagtgtccaattttggagcttcaaggtgcattccagctgaacaaactgggataacaaccgttgttcaaggaacactaggatatctggaccccatgtactactacacagggcgtctcactgagaaaagcgatgttttcagcttcggcgtcgttctaatagagttgcttactaggaagaaaccatactcatacagatcgcctgatgatgaaagtcttgtaacacatttcactgccctactcacacaaggcaacttgggcgacatacttgatcctcaggtcaaggaagagggaggcgaagaagttaaagagatagctgtgttagctgtggcatgtgccaagctgaaagtagaggagcggcctactatgaggtaggtggagatgacactcgaaagtgttcgattgtcatcacagcagcaagagcatggtgtgggtgcaaagaaatccagggagaatcatgtctcctggagctacccggtaagtgagggtacaagtacacaatcaactagacaatatagccttgaagaagagtatttgttgtcatcaaggtttcccagataatggatttttttttctggagtggttttggatcaatagaaagagttgtcacaatgtacaaggcatatgatatgcatgattttcatagctaaatgtgcactgttttattgttcttctt

SEQ ID NO: 9819 - DNA, 1468 bp, Oryza sativa
  ref <308>: DATABASE ACCESSION NUMBER: AK107167
  ref <309>: DATABASE ENTRY DATE: 2002-08-28
ctcatcagaatctacttcccggtgctctacgacatcaagcacctcatgaggttctgcagcaacctccacggcggcctgagcaggctcggtgagcttcttgatgtcaagcgtgtggggacctgccaccaggccggctctgactcgctgttgaccctcgggtgctacaacaagatcaaggaggtgtacttcaaaggatcgaccgagaagcatgccggtgtgttgtatgggcttgttattgaggatggggtgaacagaccaccaccaactcagcccaatgaatgaatatggttagttaaataaaacaatctgaaatgggaaaaaaaattgaaactttcgttggtgaatatatgttgtctgatctgatctgatgatttgcttatggtttccatggtagtttgttgtgccttgctgttactatttgttgtagttgagttgctttagttgttttgtctttgactctttgtgctgtgcaatcatctttcattgtttgcccaatttttatcgctgactgcactgtttagttcaagtagcaagttcttgtcatgatgaattagtgcgaaagatagtaggatagttcaaattatgtttagggactattgcattagatatcttggacagcttgtctggttaattttactgcaaataagcgattgcttcgcttccatacaaaagtatgtatttaatatctgatcgttctttttgatgttgttccctgcctgtgcaatcaggcagttcgtcatggtgttctgaaggtacaatactctcagcatgacaattcttttttatgttgacatgcctgtttgtgtggtggttgtccttcgttctcagtgggtacttctttatatcactgcttgtagtatgctgatgaaatgcaaaatcttaagtggtcactagctagactacgaattatgtttgtttcaaaatgttttcatatgtctattgtatatcattgtttgcatgtactggtgcctagctagcacctttacattatcatttataggggtgctaatggactggatttaagtgggctgaatgggttggatctaagaacgggttggctttggttgggtccgactggattgatttaagatttggcctggatcgatttggggctacaagtgaagcggtttggattggattggatctggctgaagtgtttttggttttaaaatggattgaacccatggaccccaaccagtacattgccttggatcctggtcgagtggttgcgcaccgggtgtccgagcgtaggaggcgccgctgtccctcccctccccccagtcatcttccgtgcacgggctgcaggaggtgccaccgctgtcctgcctccacccaccctgggcacagtcgcgccgactgttagaacatcgacctgagggtagtgaagtgaatgaggtgagcagagcaaagaacaacatcgagcaaccaactgggagtaaaagagatgagattctttggttgaaatctc

SEQ ID NO: 9820 - DNA, 1356 bp, Oryza sativa
  ref <308>: DATABASE ACCESSION NUMBER: AK107168
  ref <309>: DATABASE ENTRY DATE: 2002-08-28
gagcgcagcggcaaatatcactaaatatcacacgaaaaccaaaccaaatcgaagaaagagagatactgctgtacttggagccaagcgagagagaagactgagacgcgacacgcgagcaatggaggctgcggtcgacggcaggtggacacgcgtccgcacgctcggccgcggcgcgtccggcgccgtggtgtccctcgccgcagacgaccgctcgggcgcgctcttcgcggtcaagtcggcggcggcggcggcggcggccgagcagctcgtgcgcgaggggcgcatcctttccgggctgcgctcgccgcacgtcctcccctgccttggcttccgcgccgaagccggcggcgagtgccagctattcctcgagttcgcgcccggcggctcgctcgccgacgtggtggcgaggagtggcgggcggctcgacgagtgcgccatccgcgcgtacgcggcggacgtggcgaggggcctggcgtacctccacgggatgtcgctcgtgcacggcgacgtcaaggggaggaacgtggtggtcggcgccgacggccgggccaagatcgcggatttcgggtgcgccaggacggtgggctccgacaggccaatcggcggcacgccggcgttcatggcgccagaggtggcgcgcggggaagagcaggagccggccgccgatgtctgggccctgggctgcaccgtcatcgagatggccaccggccgcgctccgtggagcgacatggaagacatcctctcggcggtgcgccggattggctacacggacgccgtgccggaggtgcccgagtggctgtccgcagaggcgaaggacttcttggcccgctgcttcgcgagaaacccacgcgagcggtggacatcgtcgcagctcctggagcacccgttcctggcatcggcaggctgcagcgtgaaaacaggggaggcggcgccccaatgggtgtcccccaagagcacgctggatgtggcgttctgggagtcggacacggacgacgaggaggacgacatgccagcgagccccgccgagaggatcaaagcattggcttgcccctgctcggccttgccggattgggactccgacgagggctggatccaagtgctcaacgagtccagcgaagcttgcgacacggcagtggccaaggtggaggccgaagggaaggggcgcgttctgatcgaagcgttggaaacgatcaacgaatcttccggtggcgatgcagagtgtgttgatcccgagggcactgtacgattgattactgttgcttccattgggcagcaggaagtgttctgcttgggtctcattaatgacccacttgtattttctgttaataaaagtgaattaacaaagtctttgtttcc

SEQ ID NO: 9821 - DNA, 2424 bp, Oryza sativa
  ref <308>: DATABASE ACCESSION NUMBER: AK107169
  ref <309>: DATABASE ENTRY DATE: 2002-08-28
cacacgactctcggcaacggatatctcggctctcgcatcgatgaagaacgtagcgaaatgcgatacctggtgtgaattgcagaatcccgtgaaccatcgagtctttgaacgcaagttgcgcccgaggccatccggccgagggcacgcctgcctgggcgtcacgcgatcttgtgtttaattccaagctcctcttgagcggccgtaattcttgatcgtcgttcccatttgctatagctagctagccatggaggacctgtcgctgtcgtcggagctcgacccggcgctcctctcgacgtcgacgtcgtcgtcgtcgccgccggactccgcctcgccgtccttctccttctaccacccttcgcctcccaactacaccctcgccgtgtccaacctctcatgccgggaccctcgccgcggctccggcggcgccgggttgctctcgtggttgttgggttctttctcgaccagctcgccgccggccaccggcggcgcgggcctcctgaacaacgtgtcgttcacggcctccagctcgcagatcctggccgtcgtcggccccagcggcgccggcaagtcgacgctgctccgcatcctctccggccgcggcaccggcggcgagatcgccgccaggccgcacgcggtggtgtccgtcaacgggcgcgcggtgacctcccgcgcgcggctccgccggatgtgcgggttcgtgacgcaggacgacaacctcctcccgctgctcaccgtgcgggagacgatcctgttcgcggcgcggttcaggctccggtccgccgtgacggcgcgggagcgcggcgagcgggtggaggcgctgatgcaggagctgcgtctatcggaggtggcggacagctacgtcggcgggtgcggcggcgccggcggcgcgccgcgcggggtgtccggcggcgagcggaagcgggtgtccatcgcggtggacatcgtgcacgacccgccggtgctgctgctcgacgagccgacgtccgggctggacagccggtccgccatggacgtgctgtcgctgctccgcgacgtggcgcgcgcgcggcggcaggtggtggtgctcagcatccaccagcccagctaccgcatgctcgcctacatctcctcgatgctgctcctctcccgcggcgccgtcgcgcacttcggcacgctcaagtcgctggagcactccctgtcccgcctcggccacgagatccccatgcagctcaacccgctcgagctcgccatggaggtcaccgagcagctcgaggccgaccacgccaggttcggcgccgcgctcgccaccaccatccatcaacaccaacacaacaaggtcatcgacgacgaggacgaaagcagcggcgctggcgagcacgagcacgagcacggctactactgcagccgcgcggtggaggtgggggcgctggcggtgcgctgctggcgcacgatgcaccgcaccaaggagctcttcgcggcgcgcgcggcgcaggcggtgatcgccgggctggggctcggcagcgtctacttccgcatccgcccggacccggagggcgtcgcgctccgcctgggcctcttcgccttcagcctcagcttcctcctctcctccaccgtggaggccctcccgatcctcctccacgagcggcgcgtcctgatgcgcgaggcgtcccgccgcgcctaccgcctctcctcctacgtggtggccaacgccctcgtcttcgcgccgtgcctcctcgccgtgtccctcctcttctcggcgcccgtctacttcctcgcggggctccgcgccacgacccaggccttcgcctgcttcgcgctcgccgtgtggctcatcgtgctcatggcgagctccctggtgctcttcctcagcgccgtctcccccgacttcgtgctggggaactcgctgatctgcatgtcgctgggcgtgttcttcctcttctccggctacttcatcccgagggagagcatcccgaggtactgggcgttcatgtactacgtgtccatgtacaggtacccgctggacctgctgctgatcaacgagtacggcggcagcagcagcggcaggtgcgtggcgtgggcgggaggcgtgtgcttgaggaaggggggtgatgtgctgagggggagagggatcgacgaggggatgaggtgggtcaatgtcggggtcatgctagggttcttcgtcttgtacagggtcatgtgctgggctgtgctggtcaggagggcagccaagaccacgctgtgatttttcacataagtgtgtgttgtaagtagtactcgtatatgggaaatgggacgtgactacgcgtcggacgtccgatccactagagagctgagatatactgttcctagcagtcttgtttgttgaaatccaaagatgtgtagctcccctattttctgttcacgtgtccttaacatttttaaaaaaggcaaaatttgctataggac

SEQ ID NO: 9822 - DNA, 1693 bp, Oryza sativa
  ref <308>: DATABASE ACCESSION NUMBER: AK107170
  ref <309>: DATABASE ENTRY DATE: 2002-08-28
actgtcgcttacgcctttattttttcttctctccttcatctgttcgtcctctcctctctcctctctctcgccctctccacactggcacactctctgtgaatctctccttctgttcctggttaattcgctcttcttcctctcgtatctccgccgcgatcgatggccatggagaaggtggacgccaaggagagggagaagatcgaggccgtccgcaagaccctccgcaagcaggctccgctcaccgccaagcaggcgatgtactgcaacgacgcgtgcgtggagcggttcctccgggcgagaggggagagcgtgaagaaggcggcgaaacacctgagaaccgtcctgtcctggagggacaccatcggagccgatcacatcatcgccgacgagttctccgccgagctggctgacggcgtcgcctacgtcgccggccacgacgacgaggcccgacctgtcgtggtctttcgaatcaagcaggactacccaaagttccactcccagaaatcgttcgtgcggttactggtgttcacgctggaggtggccgtgtcatgcatgtcccgcttcgtcgaccagttcgtcctcctcttcgatgcaagctttttccggtcggcgtcggctttcctcaacctgctcatgggcacgctcaagatcgtcgccgactactaccccggccgcctccaccgcgccttcgtcatcgacccgccgtccctcttctccgtcctctggaagggagtgaggccgttcgtggagctggcgccggcgacggcggtggtgtgctcgctggacttcgaggactcgctggaggacgcgtcgttcacggcgtacccgcggacggcgtcgctgcggttcgagccggcggcggccctgctggcgaccgggacgaagggcatcggcctcggctccgcctcgtcgcggttctccgtcaccgtgtcgcacgacaacaccctcaagccgtggtacctgtccaccaccacgccgtcgtcggtggggcctcgctccgtggtgccgacctccagcccgtccctcatcggcgcgtcgccgctctcggcgcgctccttctccttcgcctcccccgccgcgcgctccaccacgacgccgcccgtccaccgcggcgcaccgctgacgccgttctcgaccaagggcgggcagaaggcgccggcgccagcgcagcagttcccgcggacgccgcggccgtcgttcctgcagtcgccgtcgatgctgttcgcgttcaagaaggacggccaggccagccgcggcgagcgggagcgcgagtccttcctgccgttcctccgcttctaccgccgcccctacgacgagatatcgtatcgcgccaagatgcggccgccgctgggcgggctcatcgccatcgtcgacgagaagtcgaagcagcacaagacggtgcagccgccgctgcgacggcacgccgggctccaccaccagcagctgttccagctccaccaccaccagaggatctgatctgaactccagatgatctcccgttgctgaagcatgaatccaaccgatgaagctagcgttcttctccatacattttacagcataatccaatgctataattatgctaagttgatcttttgtcgacattttccccccagtatttacctcctaggatattcttcaacccgtgtaaaataacagccctaaaatgtgagtaaaatcgaccccttttgcagcc

SEQ ID NO: 9823 - DNA, 1394 bp, Oryza sativa
  ref <308>: DATABASE ACCESSION NUMBER: AK107171
  ref <309>: DATABASE ENTRY DATE: 2002-08-28
actgctactcaacaatgcaccagcaacaaagttcatgccttttcaaagttcataatttttcagtcaacaaggacgcacacaagagccgatcgccgtagacgacgatgcagcacggcgagcagagcggcgccaagaaggcggcggcgtgggtggtgtcgcccaacggccaagtcaagcgagaaatggcggtggaagcggcgcgcggcgagggagctgctgcagccgccggagccggagaagaagaagaagaagtccaagccggcgggatgatcgccgcggcggtgggcgacggcttcgagggtgtggagatcagcgtgcggatcgacttggccgtgctccactgccccctctgcctcctccccctcaagcccccgacctaccagtgcgcggcggggcacttggcgtgcagcagctgccatggcgacgtcccgggcaagaagtgccacacgtgcggcggcggcggcggcggcggcgtctacgcgcgatgccccgggctggacacgttcctccgcgccgccaagatcctgtgccccaacgacctgttcggctgccggagctatgtcgcctaccacgacgtcgccgcccaccagcgcgcgtgcccgcacgcgccctgctcctgctcggagccgcgctgcgacttcctcggctcgccgccgatgctcctcgcccacctcgtcgccgaccactcgtggcccgtcagcaaggtcccctacggcgaggtcctcaccatccacgtgccggagtcggagcggcgccacctggtcgtcgcgggggccgccgggggggacgacgagcgcgtgttcgtcctgtccgtgggcgcgctcggcgtggcgagggccgtctcggtggcgtgcgtcagggcgaacgccgcggcggggccgcgctaccgctgcaagctctgggcgcacgccccgggcggcggcgccgcggacttcgtccacatggactcggcggtggcgagcagcgccgccgcgcccggtggcgaggtcgccgtcgacgaggaggccaggttcctgacggtgccgccgtgcttcctccacctgctcgacgccggaacgtccaaggagatgctcatcaggctcagcatcagcattgacattgacattgacatgtcctgatcgatcgacatgaaacatgatggtctactagtaatgtcctaaattcgtgattagtgctctgatgccgttcaagtttaggtgctagtttcaagttctaaccagccataagctttgctatttggaagtttgaactctgatgttctaaattataattttcgtaaggaaaactcgagttaaaaattcgaacttgtactttccttcaacctcgtttttaatcttcaatggatagaagtagatgccaaaaagatcctaattgaagcaaactatctttacccc

SEQ ID NO: 9824 - DNA, 1544 bp, Oryza sativa
  ref <308>: DATABASE ACCESSION NUMBER: AK107172
  ref <309>: DATABASE ENTRY DATE: 2002-08-28
agtatataccaccgtgaagtactaccaccgcatctccggcaatgtcgagctcggacgaacaccttaggctgccgccgcgctccggccgcggcgcactccaccaccgcgcagccgcggcggcgccggccaatgccattagtttgcacgtagatgctgaggctgatgatggtccggccgccgccgagaggtcgtcgtcgacgacgagagagaagcggctggagcggttcatggagtactcgaagcgcgccctggtgtacgagttcacgctggccacctcgctgctgcagcaccggacggcgagcttcaccgccggcagcgcgtgggccaaggccggcgtcgcgctcctctgcgccgcgctcttcgtcgacctcatgggctccgtctacctcgccctcgtcaccaggctcctcgacgccgaggccaccgacgcgagctgcaggtggcacgtcgtccgggtctacgcctccgccgtgctcctcatgtccatgccattctgcctcctcatgtcgctcaacgcgctctactcgttcctcgccgtcgcgctcgtgccgcccatctatctcgtcctcctgctcttcgccaaggagcaccaccaccaccgccaccgcggcggcgtgctccacgagttcccgccgccgcgcggcgagcggacgacggtgttaatcagctacgaggactacgacggcaagctcaagagccagttcgacgcgtcggccaccgtgaacaccatcgccaccggcgcggggctgacgggcaccttcttcggctactccacctccaccgacttctcccccaaccacgccgtcaccgtctccgagagcctactgttcctgaccatcgtcggcgcgcagttcgtgatgctcgtcacggcggcccggccgatgttccgcaaggaatcctcgccggcgaggctcgccggcttcctgagcctcttggtagggagcctgccggtgcttctccccctcagcgcgttcgccggcgccatcgacttcctcggtggcctcgccctgctcgccttctccatcgacttcctcgagctcgtcgtcttcttcaaagcaaccttctacaaggaggcgctggaggaggagcccgacgcgccgccgcggcctacatcgacgacgacgacggacgggctgcagctgctgtggctgtgcgtgatgtacatctacttcacggcgctggaggcgctgtaccaggagcaagcggggaggaagacgaagctagagttgttggagaaggccagggtgctggtctacttctgggctttctgctgctgcagcctcgacggcggcggcagggggaagctcccgctgctgccgccgctggaggagctgagaaagcaccaccatcacctgtcgctggggcgagctcgctacgccgtcatgggcctcgccgcgctcgatgttctgtggcgtgtcgccaggatgttcctcgtagttgctcccgtgaaaccgtaggcacgcccggggggcccacatgtcggtgacactggcttttcaacatctgttaattattaccaatgtagaatgtgatacgattttgtt

SEQ ID NO: 9825 - DNA, 1183 bp, Oryza sativa
  ref <308>: DATABASE ACCESSION NUMBER: AK107173
  ref <309>: DATABASE ENTRY DATE: 2002-08-28
agaacgaaaatagagaaaaattaatttgggagtactaattaagatgtcgtcgcgacgacatggcatgaaagccgtggtggtggtggtggtgatcgcgcacgtcctgctatgccatgttgccggcggcggcgggggcgtcccggcggtgatcgtgttcggcgactccacggcggacacgggcaacaacaacttcatccagaccatggcgaggggcaactacccgccgtacgggcgggacttcgccggcggcgtggccaccggccggttctccaacggccggctcgccgccgacttcgtctccgaggcgctggggctgccgcccgccgtgccgccgtaccttgaccccagccacagcatccaccagctcgcgtcgggcgtcagcttcgcctccgccggaacgggcctagacaacatcactgcacaaatcctatcagcaatgaccctgagtcagcagatagaccacttcaggcagtacaaggagaagctgaggtgggccaaaggcgaggcagcggcacaccacatcataagccaggcgctctacattttgagcgtcggcaccagcgacttcctgcacaactacctcgtcttccccatcaggggcaaccgcttcaccctgccgcgctacgaggcctacctcgccggcgccgccgccggggcggtgcgcgccgtgcacgggctcggcggccgccgggtgaagctcgccgggctgccaccgctggggtgcctgccggtggagaggacgatcaacccggacaggcctggggattgcaacgagatgtacaacatggtggctctgagcttcaacgcaaggctcaagaggcttattgggaggctcaactgggagctgccaggggcacaagtagagtatgttgatcagtacagcatcctctctgccatcattgccaagccatgggaatatggttttgggaactcaatgcaaggatgttgtggcacgggatttgtggagacaggaattctatgtgccttggacgatgcgttggcatgcgacgatgctgataaatatgtattctttgatgctgtccatccatcggaaagggcgtacaagatcatagccgatgcatttataaacaccacctcacctgtattccactgaattaaaaaatatatttcactcgtgatattatctgaacgctcaaattaatataaaagagctactccctcc

SEQ ID NO: 9826 - DNA, 1602 bp, Oryza sativa
  ref <308>: DATABASE ACCESSION NUMBER: AK107174
  ref <309>: DATABASE ENTRY DATE: 2002-08-28
attatttgaaagaacatcaaccgaacgcaagaatcacacacaacactcggttaaccatattgcagtagagatcgatgggtagactccaaaatttgatgcttctatcggcggggttcttctccacgctattgctcgcacaggttttaactcctttgttttaacttttacagtatatctttaattttttttcccatatgggtatcgacaggatggtgcacataaacatcaacattatttatatttgttatcttgtgaccgatcaatatatctacttattgaaaagtatacttgtatacaataatgacgactctactttggcattaattaatatctttagttacttgccaatatgtaacaacaaattaatatgtttttttctcaacaacactgagaactaacactcctagattaatgtttagttcttttacagttggtttgtaccaaaattgaagtcgtctttcgaaaattgggtataacactgatagacaaggaaaaaaaaacagtgaacttatctcaaatcattgctgtcacatacacattcatgtatcatgtatgcaggtgacgagtgctgctgcagggatgacagtgaaagtgagcacaacgcccatcttctccaagatcccacgagctcagacgaacaaggattttcaggtgctactacgcatcgaggcgccgcctccggtggatctcaagggtcgtgtccccatcgaccttgtcgctgtgctcgacgttggtggtggtggaatgagcttggaaccggttaagaaagccatgaagttcgccattcgacagctcagtgatgaagactctatcgccatctttgggccacccatgagccgagaggtcatccctaagtttatgaatattcatggtagccgaaggattgctgagaagaaggtagatgagctggagggccgtcgctttgcccatccagcaaggtctagcttggatgaggccctcaaggtatgtgcttttctttggtttgtgtatttctacatcgagttcctgatatatttttagtccttggtctacttgcatactataattaagaagaccacgactatgatatttgatcagctttgttatttattagttgtataatattgtcttatttgtcaatgaataacctaaaagtgcacaagtaatcaatataggaatgtggaaagtatttttaccactgaaatggatatcctcctatatatatatatatatctcatccatttgcatattatctgaacggtcatgaaaatttaataggcaatctgacaatataaatcatagtgtgatatatcattttacaatcatgcaactttaaatttaatctatatgagttaaaattttatcgacatatcgatattatcaattttgttaagatagttcgataactacttggttggcatttcggagataggaaaaaacaaagggagatatccccttaatgagtgaaaaactatctccataaaaacgtaacttcagcataaataattaaatgcaactctacttttcttttaaatttcttgaattactcaagatgtattttcttgcttatgtagataaatattattttcttttcaactgcaaggatcaataccaaagtgcttt

SEQ ID NO: 9827 - DNA, 2331 bp, Oryza sativa
  ref <308>: DATABASE ACCESSION NUMBER: AK107175
  ref <309>: DATABASE ENTRY DATE: 2002-08-28
gattgattttactatctcgatcgagttggtcgccaattcgccatggccagcagcctcatcaacctcctcctcacggaggtggcggccatcgtcagcatcgtcctcctcgccctcctcgtcgtgctcagctcctaccgccgccgctccggccacccggcgctccgcctcttcgtctgggcggcctccacgctcttcctcccgctcgtctcctacgccgtctccgccgccgccaagtgggacgccgcgcgcgtcccgctcctcctcgcctggaccgtcttcctccagatgctgcgcaacaccatcgacaccgcccgctcgtcctcgtccacgatcggcaacggcagcggcagcagcaagttcaggccctccgtcgagcagctggcgaggatgggctgggtggcgttcctcattgtcagcagcgacggcaccgccgggagcccacagctcaccggggtgctcctgtggctgtgggtgctcagcctcgccaagctcgtccaccgcctcgttgccgccgagctcgccaagaactcgttcgccgtcggccttaacgcctacctcatctccgactacatgaagcagctgtacgggcaagaccaaggagaccacgacgtgcaagctcctccgttgttggtgatgggcgaggagaagctgcaaatcgaggcgaggccacaggggtaccgcattggccggacatcgccgccgccattgtgcgtcgacgccgggcatgtggtcaccatggaccggatatgccggctgttctcctccggcgatccactcgtcgcttctaacccgcagatcaaggacacatgcctctcgttcgccctgttcaagctgcagctccggcggttcgtcgggtgccccatcgccgaggcgggctctcgccgttcggtggcgttcgtgctcgacggcctcctcggcgagagccacgagcgggtgttccgggtgatcgagaccgagctgtccttcctcgccgacttcctctactccaagctcaccgtcttctacgcgagcgggtggtggttcccggtgctcaactcgatgctcgtgttcgccacgtgggtcagctgcctcgccgccggcggcgccatcgtgcacgacatgacgtgccacggcacgacgctcgccagcaactacgacaacctgagggagtacctgcagaaccacgacaccgtgttccacatcatcgtcggcctcgacgtgctcgtcaccgtctccttcatcgtcgccatcgtgttcacggaggggtgggagatcgctacctacgtccgctccgactggatcaaggtgtccgccatctgcgagtacgcgcgccggccgtcatggcgcaagtcgccatggactcgccgcaacgtcggccgagttctcccgctcaagccaatgcagcgctgggacgatcggttcgggcagacgtccatcctgcagctccgtccgtgctactgtggctgcgtctcccggcaggttgaccggatcgccaagtcgtcggccactgtgccggcggcggtgaagacggccgtcgtggacacgctaaggacgaaccaaggaaacctgggaaacggcgtgctctcgttgcagcggaacggcgtcgccgacaagctcgcctgggcgtgccaccacgccggcgacgagagaagcgtctccgagcagatcctggtatggcatgtggcgaccaggcttctcgagatcatgcgatcagaaggcgctcacgggagacacgacgacggagacggcgacggcggcggagacagcgacacggtggtcgtcgcgacacggctgtcgcggtactgcgcctacctggtggcgctgaagccggagctcctgccggaccacccggcctggacggaggagctgtacgagggcgtggtggaggaggtgtcgagggtgctcgcgcggttcgcaggggcggtggtgcggtacgagcgcgcggcgacgtgcctcggcgggagcacgaacgcgacgctgaggaaggcggccaagctcgggcggcagctggcggaggagctcggcggcgacgaggagttgccctggagggtgcttgccgatttctgggcggagctcgtcgtctacctcgcgccgtcggagaacgtcacggcgcattccaaggcgctccgccgtggcggcgagttcatcaccgtgctgtgggcgttgctcggccacgccggcattgttagccggccggacactgacgtctgactgacagtgtgagtgtggtttatggcgaacacatggttttctttccgcttttgtcattgtgtataccaaactgtcgacatgagatgtgtttgccaaactgtcgacaatttatttctgatttgcaatagtaaaacagtttcc

SEQ ID NO: 9828 - DNA, 1345 bp, Oryza sativa
  ref <308>: DATABASE ACCESSION NUMBER: AK107176
  ref <309>: DATABASE ENTRY DATE: 2002-08-28
cttttcgtcgccatccgctccttgtcgccgtattggatgagaagctccacggtgccgccgagctcaaccttggcagattgagggacggtgtcaacctcggcggcggattgaggcggcccctcttctccaccccttatcggtgaacacagatgcaagtggtgtgggtcgacgactgcagatcgagcgatgaataacatctcatttggtcatggatcctgacgggtgagatctactcagctattttgcattcgtgcatggtgggtaccgactcaccatcagcctctccaccacttacattttcctggtttttcctgcttagagtttgatcgttgcgaagtctctaggccgcatcccgtgcagctgagcgcaactggcgctctggagactcggatctggtgtacctgcgggtcagccatcgtttagagagcaatcttctttatactggaagagaaatcatggcatctatggaagacattggaagtgcattaatccccctagtgggtattggtgattaatgacaaatgtggttaagagattaatgagtttattgagctactttcagatgcattagtccaaggtgtggaaggtggatgcttggagaccccccaaaagtataaaatcaaagcggaccggaactcgagaagtgtatatgatagtttatttattgcaatcgagtttttaggataaaccgtactattaagagggtttccaggtgatgctctgagatatgtcaagtgctcttagcgtgaaccaagtgtcaaagtttccctaggagttatttttgcaaatactccatctgtccaaaaatgcaggtccggaacttcttgtcttccaagtccggaagttccggtctgatgaaagaaattttcctaagtgttatccggaagttcctgtcttctaggtccagaacttcatgtctagtttccagttcaaaattgagtaacggctagatgacgtcacctagccgttaaacatatgcagctcgtttccagctcgttttttggccattccactttcacttttcatccctagagctgttgctagcctctcctaagtgtttcttgccatctccactcaatctagagcctaattcttgtgagaaagagagattgagagggagagaggaagatttggagatgtgtgaagactaggatcttgggtgagcacttggaatatctcgtgggctgtcatctcggtgcttattactcttggagatgatctcctagacggttagatgtcgcccgcgagaatccgttgcatattgtggatgtcctgggtaagtttgtgaaggatctcctctcctccgaaagggaacgaggtaagttaatgaagttcttgtgctgag

SEQ ID NO: 9829 - DNA, 1003 bp, Oryza sativa
  ref <308>: DATABASE ACCESSION NUMBER: AK107177
  ref <309>: DATABASE ENTRY DATE: 2002-08-28
tcacgccattttgcaacagccgcctctcccgcccccatccagacttttccgcgacgcgacctcacctccagcgcgacctcccctccatcgccgtcgtcgccggccggtgaaggtgagtcagcggacggtggagagggagggtggagtgagagtggagatcgagaggtgtaccagatctggagccgcgccaccgccgtctgtagccgtcgccctgcccgtggctgaccgctggcgccctcgcgatgcgcgcggccgctgcttgcctcctccgccgccgccgccgtcgccatgctcgcggccgccgcttgcatcctccgccgccgccgtcgtcaccatgcgcgcggacgccaccttccgccgtcgcccagtagcccgcaccgttgttcagctcggcaccaccctgccctgcagcgccgcccgcgccgtcccgcatcgcccctccgtctgccgcacgcacgcacccgcgagaggataaggtatttggaggatcaaatatggatgagctgctagggatgctctaattgcccacttcttctcgctcctaaacccactgcaattgtgtggctggggtgtagagggtggtggcttcttcatgattcctacaccagctaaggtatcaggaagaccaagggagtttagtaagactgcaacagttcgcgtagagaatggtcacatttcaattgataatctcaccactgagctgcgccggttggttcccgtcagatttgaagtaaaggagacggcacaggatacatttgttgttcagtttccctctacaattgaattagatagattgcatagggttggcagagtccgtagctttgattttggtgttgatttgttatttaacaaatgggaacaggagattgaggcaaagtttgtcctgaagaagacatggtttcgtgtctatggtgttccatatgaaattagggactttcttagccttcatgctgtcggttctgtcattggaaatacaacgatggtggatatggtttatcttcgg

SEQ ID NO: 9830 - DNA, 3602 bp, Oryza sativa
  ref <308>: DATABASE ACCESSION NUMBER: AK107178
  ref <309>: DATABASE ENTRY DATE: 2002-08-28
gtgcctgcgtgcgtcgcttgcagcgacaagcagcagcagcagccgcgccgcgcgtcgcgtcgcgtcgcgtcgctttcctctcgcgatggccgccgccggcgtgccattctccatccgggggtacgcggcgcgggcgcgggcgggggcggcggacgaaggggggagatgctggccgttcgcggggaaggcgggggcgctgccgccgatggaggtgagggggttccggtggtgggaggacgaggccgccgcgctggccgaggaggaaggggaggaggagcggaggctggcggccaagcggcggaagcgctccatcgtcgagctcttcgccgccgtgcccaaggtcgtcgccgccgccgacgaggggctcgggagggggaagcgtgtcaggaggaagctcgacaagggggacccgccggcggtcggggttgaggcggcgaagaagaaggggttcaggaagcagaaggttctagttgagatcggcgtcagaaaaaaagggaaaaatagcaagacaaaagtcacctcagctagtatgtcgcagttgtttcaaaatgccatacaaaagcagaagaaaaaatctcttagcaagaaaaaaggagttccattggaaaagaaaagcatgaagggaaacaaaacaacaactttaagcagccagaagactacaaagagtagctgtcatgttcaaagcattcttaagaaacatttgaaaacaggagtgggcacactactaaaaaacacagatgttatgtctccatcaaagtctttactcaaaccaaagcgtgttaccttttctgatgacaatgacatacttggaaggacagactcccaacttggagatggcacagagaaatcacagttgttacaaacatcccaacaacactacaaggatggtaaatctcagggaggtgacaatcactgcagtacatatgaaccacagttctcgtatcaacgagcaggtgctatcgtggatagtgttgaggaggataccagctctactgttctgcttactaaatcaaaagagaaaactatattggccaatccagtggatctgaatcattgcttagagatatccagtagtggtagctgtttgaactctattaattcagctgtcctatcaggtcaggtccttccccaaaactttgctggtgtgggctctattccgaatgaaggctcaaatgttcatgttggatttcaagcagaagaaaatcatcataaataccacggatcatctgttggtgctagtttagcagtcaaggcgagatcaagcgatcttattaggcgacaactgcctgaaccttctagttcttgttttgttgcttctctccgtgtaaatgatgggaacagaagcaaaatgcttcaggaaaggttgacagcacttcatcctaggcttattagatcgaaagacatggtgaacagcataagctcttctgcaggatcaaacaaatcaaccgatgcacaaactccaaattgtgtatctgcatgcaggaacatgcatagtgaaggctatcaggggcttcctcttaattcacatggtgaatttgtcaagcttcatcctagtggcacaatcgatcctaatgggatgtttaagagacaatttccggtaggggattacgtaagaccttcagcatttccagcctttatcacacctgaaacttgcgtggattatgcccatttaaaaagcagctatcaaggaccacaattttgtgcagtagatacatttgattttcagtcagagccttatcattctcctacagcatcagctgcatatggtatgggtttcagacagtcaccaagttctgaaagaatggaggtacatggttatgcagttcctagcaataacgatccatacagcaaccagcaagagctttcagtgggatgcttttgccctgcattcacgggacaaggtaatcaaacacataagccactagagatgcaaaattgctttcctagtcagcattatgagcagaactcccagccagctcctgaaacaacagtgcgcctgatgggcaaaaacttcactcttggaaccagcagtaaccaattcagaggtctagataacaagaatccttgtccaagtaaacaaagtagagatgaagatcatggtacgtccgcaaaagctttttctcagttgtttcatggtacgcgtgttgagcctcctagcacattgagaaattcaaatggaggggcggaacatccatcacgtttttcttctgttccggaagctgaactaaggtgtggtcttgattcctatagtttcagaacaagtgatcgctatcaacaacctcatctagctgttcaaaataagctgtatgttaacccagtgagcaggcacaatgagtctgagccatggcagcagcaactccatgtggaaaaccatattcttggtgcttctgaaccccagctccttggtactatgcacctcagacagagtaaaactgctgcaacagtgccatcttacagtccaaagcataactttagcaacttagtggaaataaggccagcacgttctcagttcgcttattttccacggcaaaacgtaacacagaggactccaatatcatcttttttgtctggttacgctgttcagagcagtcctggtttgacaactccaacaaagtttacctccctccgtccattgcccccttcagttacatcttctcatgtttacagcagtgaagacgcacagcctcatggatctgttcctccattttatccatcaattgccttgtctgatcaggcaagcaaaaattgtgatcctggtgatctcaaagacaataggagcatgcagcagactccgataacatcaaatcatgatagttctgaacaattgaacagaggtttcaaaaggccagcagtagaggatgatgtgttcctgaaaccaagaaaatctttcatagcagtaggaaaggacctaaatctgttaccacttcaagaagaaaggctgggattgtgtgggtctagaccagatgcacaactgcctgtttgtctcagcaaagattctgaagtggatgttcaacttttaaacaacgatacgcagatcgcgtggtctgattctgtcaatcgggtaagaacaattctacctgttaagttgagatctggagcgaagcatatacttgagccaggtgctagtcctactgctaccttgggccaagaggagtcatggcctttgcattcgattaaaacttttgtagtggaggatgatgctcacgcagtaggcacatcaaagaagagagacgaagaaatttgcagagtctgaagaaatttgtgagtgatgataaggaacttcatttgcggtacaacctgaaaccagtgtcgccgaaaacaaatcatagtttcggctcatgacaggtatgtgcaaaggaatacatgagaattctcaggcgttcacaaggggaaaatgatggtatatgcatcaatgcatgtggtagtttctgagtatgttcattatggactgcattaattacttcacaacaagcaatcctatgacgagcatgccagatagtaatgcacttcatatgccgtgcagcacttttttcctcttgcatttctgtaatcaatttcctttcttgatctctcgtacaaacctcgtgaagccttcaggaaac

SEQ ID NO: 9831 - DNA, 1447 bp, Oryza sativa
  ref <308>: DATABASE ACCESSION NUMBER: AK107179
  ref <309>: DATABASE ENTRY DATE: 2002-08-28
aaaaacggttcgatctttccccctctcctctcgcgttttcccgtctcctctcgcgttcgctgggggtggagcggcatctagggtttgtgcgccggccggccgccctccccgcacgacgccggcgccgtcctccccgcccgacgccgccccttctcctccccgtccgacgccgactccgcccgacgccggcgccgctcccctctgcttgtccctggccggcgccgaacctgctactccccgcccgacgccggcgccgccgacgccgctctgttcctccccgaccggcgccgacctgctcctcccagcccggagcccgacgccggcacctctcatccagcccatgccgcccgatgccgcccctgctccgacacggcgtccgcagtccgcccaacgcaggcttgacaggtgctccgacgacggacgccggcttgacaacttagcctgctgctctaggttaaaccatgacaataatagactatgttgacctgtgcgatgatgaggagattattgtagaagaacctggtcctcatggacaagttcatgcagctgacatgcatgtagaattagttgacttgaccactgaaggagatggtgtggaagatcaaaatattcctggcaaagatgatgctgttctgtgtacaacattacacagtccaaattttattgcagctcatggtcaaggtgaaacagctcacctcatagtaacattgtgtaaacagggattcattgcagtagttgatgatgcagaagaggctatgcaatctggaaataaggagctgtctgcagcaaatgatggcaagggagaggccatgcaatctgcagatcaggggattgttgtggcaggtgattgcacggaagaggttatgatgtctggaaatcaggactttgcttcagcagttgctgacgcagaagagacaatgcagtctggaactcaggaatttgttgcagaaggtgatcactcaagagatgctatgcagtttggaaatgctggtcaagcttccacatgctcatcaatgtcagagcaaggtgctatcacatactcatcaatgacagaacaaattgctactgcatcctcatcaatgactgggcaatggagtagggaggcagctgcttttctatgttcacgtcccatgtctattgcattgccattcccccggcagttctggaaagctggggaatacagtgttgctgctcaacccaccatcaacagtgatcagaaccacttaaggattcaccccaagtttcttcattcgaatgctacttcacacaagtgggcatttggtggtgcgtcatagtggcatcagtaaaagctttgcacttttcttttgcttttgtatatgtgctcttaactattcagacatgtactcaagggtgatttattgattaaattttgtttctacagctattgcagaacttctcgacaatgctgttgatgaggttttgattt

SEQ ID NO: 9832 - DNA, 1356 bp, Oryza sativa
  ref <308>: DATABASE ACCESSION NUMBER: AK107180
  ref <309>: DATABASE ENTRY DATE: 2002-08-28
aatcaccaccacctcgtctccactctccacgctcccgcatccatggcggcctcctccgcccgcctcctcgccgccgcagcgcgcggccgtgccgccaccaccttccgccatgctcctaccgtctcctcctccctctcattccctcccaacccgcaccaccgcccgtccctccgcggccgcgctggcatctccttctcctccacctccatctccctcccctcgggctccccgcacggcgcctccgcccccttcaacctcttccctcccgactccgatcccttcatacagtgggaccctccccctcccgacgccgcctcgccgctcggcgccggcgccgccggccgcgaggcgcccggggacctcacgctggtcgtgctcctcgggtggctcggcgcgcggcagaagcacctgcggaggtacgccgacctctaccgcgaccgcggggtcgggtcggtgcggttcgtggtgcccgtgcgggagctcctcgggctcgacctcggccgccgcgtcgagcgcagggtcgccgacctcgccgccgggatcgccgcctggtgcgacgccgaccaccggcgcacgctcctcttccacacgttcagcaacaccagatggctcgcatatggtgctatacttgagaatctacaatcaagagctgatataattgagaggatacggggatgcattgtagattctgcaccagttctggagataagaccagaggtctgggctgctggattctctgctgccatgttgaagaaaagcagttccatgacaggaccttcagttgaatctcctgatggatatacttcaaatggcaccttgaacaaccttagctctgatgtgacgagaccaacatggggtgaaaatattcttctatctactctacagaaattcttcgagattgtccttcatctacctgatgtaaacaagaggctagaaaaggttcactcggttctttcagagaagcagcctacctgcccccagttttatctgtacagctcagcagatcgagtaatacctgctgaatgcgtcgagcgcttcatcgacatgcagaaatccctagggcagagcgtattcgcccacaattttgtgtcatcgccacatgtggaccactacaggagcttccctcatgtctacgcagcaaagatcgacgagttcctgaagatttgctccatagctagagtatgaccagtttttgaccaacaggtattctttcgagacataggtattgctctattaccttgagaggtatatgaatcatggaatatttacccattagagttcctgaaatgatgtgtactcgttcatgaaaaatatgaaatcttgaaaagtgacgctgaaagctgaactcttagatgc

SEQ ID NO: 9833 - DNA, 2249 bp, Oryza sativa
  ref <308>: DATABASE ACCESSION NUMBER: AK107181
  ref <309>: DATABASE ENTRY DATE: 2002-08-28
tgatgcatatgattcttatggtgatccggttatgcatggcgcctttcctccggatattcctgctcctccagtgttgatgcctgtgcctggtgctggcccactaggaccatttattcctgcaccacctgaagttgctatgcgtatgatgagagatcagggtggaccaccaccttttgagccaactggtggtccacgtcctaggagaccagggaggggtggtcttccaatgggtggcccatcaccaattcttgctgctcctttaccaccccctcatatgcatgatccacgcaaaatacgaagctatcaagaccttgatgctcctgaagatgaagtgactgttatggactaccgaagcttgtagaggaattggagacacgatccttttttgtatctgggaaactgtaggtaatattacagaccgcaacaagacggcattcatttctagatttttttgtgaacgcaaacaggtaggactttgaggttcggagctctgttactgtctgtaaaatggatcacaggaaaacctgggacaaggagcatattctcattcaccaatcaccactcacctgaaaagaaaacattgtgaagtttgttctttgcaaaaaagttcctagcactgtccattccaaccaaatgtctacaagcctgccatatcatcagactttctatgaagcccgttatgaagaacatttgttccccatctgctaagtttgagttcaaccttgtcagcttgaagagtgtcccagttcaccagtcagtattgtatcagttcttgccatttgatcaagcttagtgttgtcccattccttaccattgatgaagcttctgtcaaaatgggaatatatacacctcggatgactgaagaatgactaaagtcacctgcatatattagcagaataaaagaaaaaactattggccaggaagattgttttttagaaaatcactgttcgtttgttgatgtcgcagctaaccttagttacacatgctctccctgatacggtctaatctcatcgtgcttacgtggttcacatctaaccgtccatcccatctatccaacggctagggacgaaacctttcggcggaggctaagttcgtttgtcccaacttagaccttagtttttcgtatgcacgtttttttaattgttaaatggtatattttttttaaaaaaatctagctttaaaaataatattaatttattttttaaaaaataaactagtacttaattaatcattctcaaatgaatcgttttgttttgcgtgctgaaggttttgttccagcctggtccggtaggcaacggcccactcacgttcgcggcactggcctatctcccccgacgggccgagttgggcccacgtgtcagcgacaggctacaagttccccaccgctcgcgagcccacgtcgagacgccgcaaacacgaaaccgacgccgacgccgacgcgaggcgcagccgccggtggaaacttggagaagaagctttacgcgcggcggcgaggcgaggggcagccggcgaaggtgacactcacccacccacactgggggaggatttgatcgggcatggcgcaagggaggttgttgacgctgcttccgccgccgccgccggagagccgctccactggacgggatcgctcggaggagtcggatgtggaggggatgctcgacgatccgttcgatgtagtaccccagaagaagaagaaggaggcttcgtctgtcgatcgcttgcggcggtggaggcaagctgctctcatgctcaatacttcacgtcatgttatatgtaatcttgaccttaaaaaggaggaggagaaaatgcgcgagatttgccgaagagcatccacaagtgatacgggcagcatttcgtatcaaacaagttgagtgaaaagatctcagagttacacatggtgcctttcctccagatgtttctgttccagcgctgatgcttgagccttgtgctgggcaaaaactaggactatttgtttctgcgcctgaagttgctatccgtatgttgagggatcagggcaggccatcaccttttgagccgaatttcggtcgtccagaaccacgcaagatacgaaggggacgtgcgtacaggagatggggattctgaatatgtcctggaaatggaggaagcggattcgtcaggtattcagagtgtggaaggtggaattatcctttaggtgtaggtgagctttgcaggagacttgtaagataaatctttttgaaaatatagatagaaacagtactctcttctct

SEQ ID NO: 9834 - DNA, 1459 bp, Oryza sativa
  ref <308>: DATABASE ACCESSION NUMBER: AK107182
  ref <309>: DATABASE ENTRY DATE: 2002-08-28
aaactcgatcactcgcttctctcacctgctcgagatatttgggcaggaacggagaacgaggcaggacgtgtggggtagtagcagccaaggacaagatacaaggtcggcaacgagagttgccgacatatagcccaaggtcccaggaagcacacggcaattgaaggctaggcccactctgcagtgtccgttctctaatcctccctcatcgggcaggttgtaggcacgaccctccccttgggcagtctataaaagtcaagtgaccgtcaactttgcttcaccctcctggcggcctagtattttgcaagagcagagtgagagtaggagagcttgagttgaggccttgtgggtttgcacacagaacagcttgagaaaatgtcacagtgcccaactcatgtcgctctccggttgcttgctctgctcttcctgcttccagctgcgtggtccgcgacgttcacgatgaccaacaattgcggctacacggtgtggcctgggctgctgtcgggtgccggcacggcgccgctgtcgacgacagggttcgcgctggcgcacggcgcgtcggcgacggtggacgcgccggcgagctggtcggggcgcatgtgggcgcgcacgctctgcgccgaggacgcgacaggcaagttcacctgcgccacgggggactgtggctcgggtggcatccagtgcaacggcggtggcgcggcgccgcccgccacgctcatggagttcacgctcgacggctccggcggcatggacttcttcgacgtgagcctcgtcgacgggtataacctgcccatgatcatcgtgccgcagggcgggggcgccgcagcgccggccggaagtggcggcggcagcggcggcaagtgcatggccacgggctgcctcgtcgacctaaacggcgcgtgcccggccgacctgagggtcatggcggcgagcaccggcaccggcgccgccgctcccggcggggggcccgtggcttgccgcagcgcgtgcgaggcgttcgggtcgccgcagtactgctgcagcggcgcgtacgggaacccgaacacctgccggccgtcgacctactcccagttcttcaagaacgcgtgccctcgcgcctacagctacgcgtacgacgactccacctccacattcacctgcaccgccggcaccaactacgccatcaccttctgcccaagcaccaccaggtaatcgatttctccacgactcccaccccatgattcgtactcgaaggctcgaagcttcataactcagcaaccaactccccttacaattaggcgcgcttaggcgcgaaatgtacggtcgaactgccttaaaagtcaagtttttaacgtgtcgacaactaatcgacgtagagtgcccgaaaattttctgatttgggaatgagacagatcgaagtcgattttttttattgaattttgatcaagtggatctttttttaattgaatttttgcaagatagt

SEQ ID NO: 9835 - DNA, 1596 bp, Oryza sativa
  ref <308>: DATABASE ACCESSION NUMBER: AK107183
  ref <309>: DATABASE ENTRY DATE: 2002-08-28
acgcattctacacagaatctctggttttcccaactgtcagagaagtagagaacattccagcttagttgaacttctcacaaaaaaaaaaggtactccaggctgcctccaatggcggaccgaatccctgctgttgccgctgccattgccattgcctccctaatcctcgtcgttacgccggaaatggtctcctccggcttcattccacggttcaagctaagcccaaaggcaaataagcagatccgggacatattcaaggaccatgccgcggacttggccggcctcgccgcggacgccatccccagcaagggcgagggcgaaggcagcagcagtgacccaagtcaggccccggccaccaccggcggaacctacctcatcaccgtcggtgtcggcacgcctccgcagtatgtctacggcgcgttcgacatctccagtcagttcgtgtgggtgccatgcgaggagtgcgtgagcccctactcctgccccagcgacaaaaccggcgtttacaagacgctgccccgggagctttactcatgcggagaacagcgctgccggacaatcgtcgggcagccggactgcggcgcaccgtataatggcccatgcaaatacacctgcaggtacggtggtgcgggcggaacggaaacggaaggacacctcggcctccaaccgttcacgttaggtgacaacacgatgccagtcaatatgattttcgggtgtggcctcgaacccgaaacaaacttcggcgtgatcggcctaaacagggggagactctccctcatttcgcagctacaactcgggcggttctcctactacttcgcccctgaatacgacgacaccgccgccggcaacgcaagcttcatcctcttcggcgaatacgccgtcccgcagaccagcaatccccggtacactcagttttggtcctacgaaaacggtgcctacagctacctttacctcgttgggctctccggtatgcgagtcggcagcaacaacctcaacatgttgggtgcggggtcgggcggccgagacccactcgttgcgtacctcagcacctccgtgcccatcacctttctcgagaagaacgcctacgaccttctaaggcgggagctggtcagcacggtggggtccgacaccgtggacggctctgcgctcggccttgacctgtgctacacgagccagtacctggccaaggccaagttccccgccatggcgctcgtgttctgggacggcgcggtcatggagctgcagccgcggaactacctctaccaggacacggctaccgggctggagtgcctgacgatactgccgacggcggtggccggcgggctgtcgctcctcggcagcctgatccagacgggcacgcacatgatgtactacgacatccagatccagggccgcgggtcgctgtggttcgagtcgttcgaccagccgtccaagtcgtccaaccgggcgtcctcggcttcggctgccgcgttgccgcggatcatctcgacggctgcggcgatcgcctgttccgtgtggtctgtcgtggcgtgcatgttcgtgtgaactgcttgtgttgtgctacggatggactgagatatgtgttattagaactatctt

SEQ ID NO: 9836 - DNA, 1414 bp, Oryza sativa
  ref <308>: DATABASE ACCESSION NUMBER: AK107184
  ref <309>: DATABASE ENTRY DATE: 2002-08-28
tgtttttcctctgtaaccacatgcttgactctgtgatcactgattacggccaaacagttggcgtccgtccagttcttgcacgctacaatctagtatagtgcaatttggcattgccattggcgataatttctttgttgggttcaaccaaagcaaaacgtttttcttgtcatatttttcaggcggggcgtgtgggtatggatcgctggtggacgtggtgccgatgaaggcgcgggtggggtcggtgagcccggtgctgttcaaggacggcgagggctgcggcgcctgctacaaggtgaagtgcctcgaccacggcatctgctcccgccgcgccgtcacggtcatcgtcaccgacgagtgccccggcgggctgtgcgccttcggccgcacgctcttcgacctcagcggcgccgcattcagcaggatggcggtcgccggcgccggcggccacctgcgagaccgaggccagctgtcggtcgtctacagaagtgttcaaatataccaggactgcgtgcaagtacggcgggaagaacatagccttccgtgtaaacgagggctcgacgaacttctggctgtcactgctggtcgagttcgaggacggccagggcgacattggatccatgcagataaagcaggcgaactcagtggagtggctggacatgaagcatgtgtggggggccacgtggtgcctcgtgcggggcccgcttgtcgggcccttctcggtgaggttgacgacgctgtcggcccagaaggcgctcacggcccgggacgtcatccccaggaactggaagcccacggccacctacacctcgcgcctcaacttcgaggccgccctctgatcgggtgggggtccgccggcccagggcccacgttttatcggcccgggaaactgccaggtgggcccgcaaaggcaggcccgacgtggcagtcggtcaggcaggagagccaggcatcctccattgttatgcagctcatcatattagttggtctgatcattcatgattctattcatggtaagtgtagctaatttagctgttttggtgagtgtgtgtcagtgtgagtagtttgttcaggaatcagggagatggcccatgcgcaacaggtagccgccctctccgaaggagaagagagcgttttgctgcttggtttgcttcaaggatttacctgtaggagggctgaagctggggagaagtaggtccgagggttttggatctctcttggtctctcctgccttgacactcctgtgctcctgttttgtgtgtgtgtgtgtgtgtgtgtgtgcgcgcgcgcgcgcgcgcgcgcgctgttcgtgtgtgtttgccctggtcgaaacgcagtcgcagggttcgtgagtcaatgccaccttttatgccgtgtgttcttgatccggctgagaattgagatgttctctttgttt

SEQ ID NO: 9837 - DNA, 1619 bp, Oryza sativa
  ref <308>: DATABASE ACCESSION NUMBER: AK107185
  ref <309>: DATABASE ENTRY DATE: 2002-08-28
tgttcctggctcaactgttcgtcgctgcaacaatgttgagtaagattgcaacaagagaaagaacaagaaccactggcacaaaattctctagaccaccgcctccacccttggcccgtggagctcctcttgtaggggttttaccatcgcttctcgccaatggcccggtggaattcatccgccaccattatgagaagatgggaagcgttttcactgttagcttgctccaacagaaggtgactttcttggttgggtcagaggcgtcaagccatttttacaaagggttagattcagagatcagccaggatgaggtctcgcaattcaccataccaacctttggtcccggggtcgcttttgatgtggattatgccactcgacacgagcagttccggttctttggtgatatcatgaagccggcgaagctgaggacttacgttgatctcatggttgctgaagtggagggttactttgcaagatggggacagtccggcactgtgaacatgaagcaagagtttgaacaactcgtcaccctcatcgctagccgttgtctactaggggaggaggtcagggacaagatgttcgacgaggtctcgacgctcctccgcgagctcaacgacggcatgcgcctcgtcaccatcctgttcccgcgcctccccatcccggcgcaccgccggcgagacagggcgcgcgccaggctcggcgagatattctccgacatcgtgaggtcccgcaggggcagctccggcggcggcggcggcggcggcggagcccggcacgacgacatgctgcagtgcctgatcgacgcgaggtacaaggacggccgcgccacgacggagacggaggtcgccgggatgctcgtcgcggcgctcttcgccgggcagcacacgagctccagcaccagcacctgggccggcgcgcgcctcctcaccaaccccgaccacctccgcgccgccgtggaggagcaggcgcggctactccgtcggcacggcggcgaccgcgtcgaccacgccgccctagcggcgatggacaccctgcagcgctgcgtgaaggagaccctgcggctccacccgccggccctgatgctgctgcgccacgcgcggcggagcttcgtcgtgcgcggcggcagcggcgagcgcgagtacgaggtgcccgagggccacacggtggcgagcccgctgctgctccacaacgcgctgccgcgggtgtaccgggaccccggcgagttcgacccgggcaggttcggcgccgggagggaggagggtgcaggtgggctggcgtacacggcgttcggcggcgggcggcacgcgtgcgtgggcgaggcgttcgcgtacatgcagatcaaggtgatatggagccacctgctgcgcaacttcgagctgcagctggtgtcgccgttcccggagacggactggaccgtcgtcatgccggggcccaaggggaaggtcatggtcacttacaacaggaggaaacttacctagttattatcagttaaaactggaggtataatcatcgtatgtgtttaagcatgtgtaaaacatctcatcatgtattctcaactagtacataactcatatctatctctatcttttctctactattataaaaattgaagatgtgttttt

SEQ ID NO: 9838 - DNA, 1698 bp, Oryza sativa
  ref <308>: DATABASE ACCESSION NUMBER: AK107186
  ref <309>: DATABASE ENTRY DATE: 2002-08-28
ctccgtgtcacccctggctggccacatcccccaaactccggtgactccggcgatggagggcggccgcggggggaagcgatggcgcttcgcgaccccgaatctggccgtggccgcggccggggaacgcagcatccagcggtacctccttcagctgcacgcgtgcctggacgagaacgggccacggcccgtcatcccgctcagccacggcgacccttcctcctccgcctgcttccgcaccgcgcccgaggcagaggaagccgtcgccgccgccgtccgctccggcgactacaacggctactcctcccccgccaccagcctccctgctcgccgagctattgcagagtacctatcctgtgatcttccttacaagctttgcacagatgatattttcctcacatctggaggtacccaagcaatcgagattgttatgtctgtttttggccaaccaggtgccaatatattgcttccaaagcccgggtacccaaaacatgaagcacatgcggtgttccacaggatggaagtgcggctctatgatcttgttccagagagaggatgggagattaatgttgaagctgttgaagctttagcagatgagaatactgttgcaatagtgattactaaccccaataacccttgtggtaatgtgtacacttatgagcacctgtccaagattgcagatacagcaagcaagttcggtctgttagtcattgctgatgaagtatatggtcaccttgtttatggaagcactccttttgtgccaatgggtgtgtttggagagactgttccagtactcacattgggagctatatcaaagagatgggttgtccctggctggagatttggatggatagcaatttgtgatcctaaaggcattctgaaagaaacaaaggtcgtcgattcactcagaagctttcgaaacctaacaacaggtcctgcaacatttattcagggagctattcctcatattatgaagaacacaaatgatgaattcttcagaaagactctcgagttgttaaaggaaactgctgagatatgttttggtgaaataaaagaaataaagtgtatcacctgtcctcacaaacctgaggggtcgttttttatgatggtaaaacttgatatatcacaattatcggacatttgtgacgacatcgatttctgcagcaagttggtaaaggaggagtctgtcgtacttttgcctgggagagccttaggcatggaaaactggttgcgcatcacctttgcattggatcccccaaggctaaagcaaggattagaaagggtcaagtccttttgccggaggcatcagtcacatgctaatatgctcaatataagtgcgtcggcgaaagtggagccccatttcggaatgtcaaagagttagagcaaatacaataacaaactacaaaccagttatcaatacatataaagaagataagagaggagagatgaaaagtgagctacaaattttaaatttatagccagctatgtgtgtataagaggtgggataagataatttagttccagtagttggctatagtattaaagtttctcttgtgtaaagtagttgtacaaattctacttgtactccattaataaatataaaaaaaataaagagaggtttttctatttaacttattggctttgtatctgttagaggctagagatgtaaattattttcattatccaaaaaccatattatat

SEQ ID NO: 9839 - DNA, 1532 bp, Oryza sativa
  ref <308>: DATABASE ACCESSION NUMBER: AK107187
  ref <309>: DATABASE ENTRY DATE: 2002-08-28
atcgctggcggcggcggcggtggcgaagaccgtctgagcgcgttgccggacgacatcctgctggaaatcatgggcaacctcggcgtccgcgaggctgggaggatggccgtgctgtcgaggcggtggcggcggctgcccggccttctcccgcggctggtcatcgacgcccgggagttcgagcccgccgctctccgcgccggctggcacgcgaggacgaagcgggccatggagcgcgtcgccggcgcggtggagagccttcttcccggagaccgcgccatcgagcggctgcggctcgacgcgtacctgctcagggacgagtcctacaccgtccgccgcgtcgtcgagcgcctcaacgacgccgtcgacagcggcaaggtcgcggccggcgggctggagctcgtgttcagggccaccggcggaggcggcgcgcccgatcaggatcagccgagcaagcggcaggcgcggcggctggcgcgcctcctggccgcggccgcgtcgccgagcctgctgccctccgtcgccgagctttccctcgtcaacctgcggttcacgtcgccggcgctcgcgtccctcctcggccgctgcaccggcctggaggagctcggaatgtaccagtccgacgcggggttcggcgcggtgttggacgtggggcacgcgcggctgaggcgcctcgccgtgcacgccgtggacgaggccatgtacaagaaactgcgggtgtcgtcggcgccgaggctggagcgcgtcgtcgtcgccaactggttctgccgctacgcccccgtctcgttcggccacgtcccgtgcctcagggagctgcacttgaagaacaaagccgtttactaccaggaaccagtaagactaagcaaaatgttggccagcacaccgcacctcgagtctctgacattggggttctcatcttggaggatttggatcgaaccagaggctcccaaacaacttgaaccgatgttcagcaagctgaagtccctcgttctgacaggaattttccgtgggtgcgacctctcgtggacattgttcttcctccaagcagcgccggttttggaggaatttatactcgaggtggacaaacctttagatgccaaggcaccgagtgatatttatggcgaaatgccgaagaccgacgacgtgacatggcaggtgcctgagttccagcatcaccatctcaagcatctgtagttcagtggcttcaatgaagaagaaatgcactggaggatagtggagcttgtcaaggagagagctgtgaacctgcagagcattgctctggatgacggatgccaagcctgcgatgttgtggcgaatgaatatgttctctccggtgggatcaaaaacaagaaaccggtgttgttatcagtgtcccagatcacaggatctcctcctattctcacccttgtatagagggtgtatccggtgccttgtgctcgcaggcgagtatagggttgacgccgactcttttaaatatgttcctaaatatttgacatcgttgactttttaaagcatgtttgatcgttcgtcttatt

SEQ ID NO: 9840 - DNA, 1402 bp, Oryza sativa
  ref <308>: DATABASE ACCESSION NUMBER: AK107188
  ref <309>: DATABASE ENTRY DATE: 2002-08-28
gtgctcgcttctctctctctccccccccccgcattccccgtgcgcgccagccgtgagcccacgaggccattcgcaccaagccatgaagcgccgctcatccgtttgggagacagatcggtcgtgggagggcaagtgggtgcgatggcgatccgtgcagctcgatggtggtgggggccggagtcgcgtcacgccccggcgccatccgccccgccgtggcggcgcaggcggaggaggcgaaaccctagcgtggggagatgagatacaaaaatatttgtttggcaacttgaggagaagcttgacaattgaagcagataaccttgctcggtatgtctactgttcaactcaacatatatttttcatatcttctgtacatctcttctctaatttatctttgcaatatcatttcatattccagttacaacttatggatatactcctacatttagcaaatatgatagttacttccgatatttgtaaatatataatcagaattagttaattctgaattgaattggttctttgccctgagtgctgattttagttcctcaaaaaaagtatctgaatttattctatttggtaagcctaaatttgccatgaattttgcccacattctatttgagcatacattatgatttgaaccaagtaggagcactgttaaagttttgtgaattggtttctctaaacctaagaaagaatccctaccctatgcactgttgttgtttcagtttcttaagaaaggatttctaatacttgcagtggatacttatatgtcctataactctaattaatttgagcagttggagagcaaccagaggattggtatatagatgtcctgacatagcgagactaatgttgtgattatgactataaatttgaaacttcttgcaatccaaatgagtattctgtgttcagtgcttttagcaattgatgcaaatatcacatttaattgctcaagtagcagaactattcacttatatctcgattcttccatctatattttttatacattctaatattgtgtgcatatagctaaatctaaaggagtttttgttgtttctgatatttgcaggtttttgaaattgtatactacactatattcctgtttgatttttcatgtctttcaagcaataaaacagagctccacattattggtttatgagcttgatgcagtttcaagtatttcttacttgagtacatattttgccaatcaattttttttcatgttcaaacaatacaatctgattgttcatacttcaatgcacatttcatgttttctaatgtgcccgcggcaacgcgcggggcttcatctagtatcaattagaataataataccacactccagagcatgctaatctgacaatttgttttgaacggcaacaaaagctttgccatttatattaac

SEQ ID NO: 9841 - DNA, 1882 bp, Oryza sativa
  ref <308>: DATABASE ACCESSION NUMBER: AK107189
  ref <309>: DATABASE ENTRY DATE: 2002-08-28
aaaacggaaaaagaaaaaaaaaatcgcagctaggcctctcccgaatcttctggaaccttctcgaaccaggaggcggaggaggagctgctgctgccgcggctgccaatgccggtggcggggatcaggaggaggaggaggaggagggggcggtggatgtagggtgggggagcgatggcgaggtcgaggcctagggtttggctcctggcggggtgcagcgccgtgctgctgtgggccttcgtcgggcagctcgtggccgtcggacgcctcctcgccttgttcggcctcgccggcgacgcggagccctcgcctccgcccaccgcgcttccgcctcgaagagtctataagagtaatggttatctgaaggtatcttgcaatgggggtttgaatcagatgcgttcagagatatgtgacatggtggcggttgctcgcttgctaaaccttacaatggttgtcccagaactagacaagaggtcattctgggctgatcaaagcaattttgaagatatatttgatgttaaacatttcattgacacattaagagatgaagtgcacattgttaaacagcttccgaagaggtttggtccagaggattcaaacaatatacttaatatgccacctgtgagctggtctgatgaaaaatattacttgcatcagatcttaccattattcagcaaatatagcgtcatccattttaacaagacggatgctcggttagcaaacaatggtatcagtacacagcttcaactacttaggtgccgtgttaattttcatgcactgaagttcacccctcaaattgaggccttggggaataaactggtgcagaaacttcaggccaagggatcatttgcagccttgcatttacgctatgagatggacatgctggccttttctggttgcaatcatggtctttctcaagaagaagctgaagagctcaaaagaatgagatatgcttatccatggtggagagaaaaggaaattgatccacaagctaagagattgcaagggctatgcccacttacacctgaggagacatcttttattctgaaagctctgggatttcagaaggacactctcatatacattgctgccggtgaaatttatgggggagaaaaaagattagaaccattacaagctgcatttccaaaacttgtaagaaaggagacgctgctagacttggaagctctacgacaattccagaaccattcttctcagatggctgcacttgacttcattgtatccacagccagtgatattttcattcctacttatgatggtaacatggcaaaacctgttgaaggtcaccggaggttcctgggtttcaggagaagtgtgctactagaccgacagaaattggttggatttatagatctgtacaacaataagacaatctcttggaacaattttgcatcttctgtccaggaaactcatagaaatcgtgtagttcaaccgtcctgtcggcagaaacttgaaaataagccaaaagaagaggattacttttatgctaacccacacgaatgcctggccaattcaagattttgcagccgaaccaaggatgcaatcagtgtaaggtgagcgtcaagtcaagttgtaacctcaccgagccaagttattatggcgacgtgcagtggactgaacccagcagcacagcaggcagagtccatcttgatcgtttaaccggttttcctgatctcctgttgtataggtcagccttttcgctttgcgattgattgattcatttttcacttgccgaatgcagaatatgaatgcccttctaaagcatgtaaattgggctggttgtttactgttcgtgttcatgacaatcaattaattcatgatgatagccaaagcaaaatacatgcttttctatgaaaaaaaaattcgc

SEQ ID NO: 9842 - DNA, 1637 bp, Oryza sativa
  ref <308>: DATABASE ACCESSION NUMBER: AK107190
  ref <309>: DATABASE ENTRY DATE: 2002-08-28
tagatagctagtagagttctttttctttggagacatggaggactcgagcctgttcatggagtgggccatggagacgctgcagcacctgcacccgctgccggcgacgccgccgcctgccggcggcgggtacgccggcgacaacgcgacttttccgtcgctccaagcgctccgcgagtcgtcggtgtcgcagaacggcatggccccgccggagccaacggcgcacgaaggccaccgagcctccaacagctggagctcgggcgacacggacagcgtgtccggtggcggcggcggcgcggtcatggagcacgacggatggtcgacgtcgccaaattcggtcaggtgcgccgctggcggcgggggcggcggcggcggcggcggcctctggcccgtgagctggaacttctcgtcggccatgacgcagccgtgcaacgatcaggccacgccgtcgaacccgccgacgacgacgagagcgcgctacggcggcggcggcgttcgatacctgccggccgccgtgtcgccatcgccatctgcacagacacggagagcctcctccaaaggcaacggcggcggtggctccggctcctcgtcggcggcgccgtacgcgcaggagcacatcatcgcggagcgcaagcgccgggagaagatcaaccagcggttcatcgagctctccaccgtcatcccgggcctcaagaagatggacaaggcgacgatcctctccgacgcggtgaggtacgtgaaggagatgcaggagaagctcagcgagctcgagcaacaccagaacggcggcgtcgagtcggcaatactcctcaagaagccgtgcatagccacgtcgtcgtcggacggcggctgccccgcagcgtcatcggccgtggctggaagcagcagcagcggcacggcgagaagctcgctgccggagatcgaggcgaagatctcgcacggcaacgtgatggtgaggatccacggcgagaataatggcaaggggtcgctggtgcggctgctcgccgcggttgaagggctccacctcggcatcacgcacaccaatgtcatgcccttctcggcatgcaccgccatcataaccatcatggcaaaggtggaggacggggtgagcgtcacagctgaggacattgtagggaagctaaacactgtgctccagcaaaacagcagaaatagcgcgcgagaaacaaaaagctgacaaacagcaacaaacgacagctgctagctagcttggctagctactcaatcaggcatgttgccattgattccagaacagtgtaaacacacactctctctcgatctgctcgtcgtgtacttgcgtgcatctggcccgtgatgcatgcatttgcacaaataaatctagcactggatacaatttatcttagtgcaataagtttaaatatatcatatttagtactagatttagttttttggacggagagaatactagctagagctacgaatgcactctctatagccgaataatcttaagatgtaccggttcaactttttttaaagatgttcataggagataagatgtgtgcatgtacatttatatcaatgagtgttttgcatgttatgagtatcatcatttgtacaatgttttttttaaaaaatattatgctgatgttgatcgattggtc

SEQ ID NO: 9843 - DNA, 1624 bp, Oryza sativa
  ref <308>: DATABASE ACCESSION NUMBER: AK107191
  ref <309>: DATABASE ENTRY DATE: 2002-08-28
ttccgtctctttcctctctcttctctctccccctctcctggaggagagagaggagaagaggagggggggccgcgccaagagccacgcgcgctacagtctccttcccacccgcgaccgcgagcaatggagatggccagtggaggaggcgccgccgccgccgccggcggcggagtaggcggcagcggcggcggtggtggtggaggggacgagcaccgccagctgcacggtctcaagttcggcaagaagatctacttcgaggacgccgccgcggcagcaggcggcggcggcactggcagtggcagtggcagcgcgagcgccgcgccgccgtcctcgtcttccaaggcggcgggtggtggacgcggcggagggggcaagaacaaggggaagggcgtggccgcggcggcgccaccgccgccgccgccgccgccgcggtgccaggtggaggggtgcggcgcggatctgagcgggatcaagaactactactgccgccacaaggtgtgcttcatgcattccaaggctccccgcgtcgtcgtcgccggcctcgagcagcgcttctgccagcagtgcagcaggttccacctgctgcctgaatttgaccaaggaaaacgcagctgccgcagacgccttgcaggtcataatgagcgccggaggaggccgcaaacccctttggcatcacgctacggtcgactagctgcatctgttggtgagcatcgcaggttcagaagctttacgttggatttctcctacccaagggttccaagcagcgtaaggaatgcatggccagcaattcaaccaggcgatcggatctccggtggtatccagtggcacaggaacgtagctcctcatggtcactctagtgcagtggcgggatatggtgccaacacatacagcggccaaggtagctcttcttcagggccaccggtgttcgctggcccaaatctccctccaggtggatgtctcgcaggggtcggtgccgccaccgactcgagctgtgctctctctcttctgtcaacccagccatgggatactactacccacagtgccgctgccagccacaaccaggctgcagccatgtccactaccaccagctttgatggcaatcctgtggcaccctccgccatggcgggtagctacatggcaccaagcccctggacaggttctcggggccatgagggtggtggtcggagcgtggcgcaccagctaccacatgaagtctcacttgatgaggtgcaccctggtcctagccatcatgcccacttctccggtgagcttgagcttgctctgcaggggaacggtccagccccagcaccacgcatcgatcctgggtccggcagcaccttcgaccaaaccagcaacacgatggattggtctctgtagaggctgttccagctgccatcgatctgtcgtcccgcaaggcgagtcatggaactgaagaacctcatgctgcctgcccttattttgtgttcaaattttcctttccagtatggaaaggaaattctaaggtgactggcgattaatctccctgtgatgaataataatgcgcgcccttgaactcaattaattgctgtgccgcatccatctatgtaactctccatgaatttttaagtatcagtgttaatgctgt

SEQ ID NO: 9844 - DNA, 1838 bp, Oryza sativa
  ref <308>: DATABASE ACCESSION NUMBER: AK107192
  ref <309>: DATABASE ENTRY DATE: 2002-08-28
agagagaaccccattgccatagacaaatagtggcggcaggttcagcatagggcagtgatactagctagtagtggcactactcctttccttttctttttccctccttgagattcttctcactttcatgccgtctcccttccatcgccacaaaggcagtacgaaatttcgagttcctggtctcctggagagggcagcagaaagggagagagtatggagatggcgctaactccattgccgctcctgtgttcgtccgtcttgttcttggtgctatcttcgtgctcgttggccaatgggagggatacgccttcttcttcttcttcttcttcttcttcttcttcttcttcttcttcttcttcttcttcttcttcttctccggcgacgtctactgtggccaccggcatttccgccgccgccgccgccgccgccaatgggacggccgccttgtcttcggcagttccggcgcctccgcctgttgtgatcgtagtgcaccaccatttccaccgcgagctggtcatcgccgccgtcctcgcctgcatcgccaccgtcacgatcttcctttccacgctctacgcttggacactatggcggcgatctcgccggagcaccggcggcaaggtcaccaggagctcagacgcagcgaaggggatcaagctggtgccgatcttgagcaggttcaactcggtgaagatgagcaggaagaggctggttgggatgttcgagtacccgtcgctggaggcagcgacagagaagttcagcgagagcaacatgctcggtgtcggcgggtttggccgcgtctacaaggcggcgttcgacgccggagttaccgcggcggtgaagcggctcgacggcggcgggcccgactgcgagaaggaattcgagaatgagctggatttgcttggcaggatcaggcaccccaacattgtgtccctcttgggcttctgtatccatgaggggaatcactacattgtttatgagctgatggagaagggatcactggaaacacagcttcatgggtcttcacatggatcaactctgagctggcacatccggatgaagatcgcccttgacacggccaggggattagagtaccttcatgagcactgcagtccaccagtgatccatagggatctgaaatcgtctaacatacttttggattcagacttcaatgctaagattgcagattttggtcttgctgtgtctagtgggagtgtcaacaaagggagtgtgaagctctccgggaccttgggttatgtagctcctgagtacttgttggatgggaagttgactgaaaagagcgatgtatacgcgttcggagtagtgcttctagagctccttatggggaggaagcctgttgagaagatgtcaccatctcagtgccaatcaattgtgacatgggcaatgccacagttgaccgacagatcgaagctccccagcatagttgacccagtgatcaaggacaccatggatccaaaacacctgtaccaagttgcagcagtggctgttctatgcgtgcaggctgaaccaagctacaggccactgatcacagatgtgctccactctcttgttcctctagtgccgacggagctcggaggaacactaagagctggagagccaccttccccgaacctgaggaattctccatgctgatatctgaatatctgatacagcaagtttgtcaaagcaagggaaaatatttatacagtttagtatagattcttatgtataacttatgttacctgtacttgctccttgtttgaggacgagagttagtccaacctatcgcttcttggttggattgagagacaagtctcactttcatactccctccgtattttaat

SEQ ID NO: 9845 - DNA, 1457 bp, Oryza sativa
  ref <308>: DATABASE ACCESSION NUMBER: AK107193
  ref <309>: DATABASE ENTRY DATE: 2002-08-28
cttcttcctcctcgcgctgcccccacaggaggagtttgtgagctctctcagcgtcgacgggggcgtcggggaagtggatcaagtcgctggtgagcctcaaggcggcgccggaggggacgacgaaggggcggaggtggacccggctgtggcggagcagctcgtcggcgtcggcgtcggcgtcgaccgcgggggacgcgtcggagtcggcgtcgtcggaggccgacgcgttcagctcggtcgtcgccgccgtcgtccgcgcgccgcccagggacttccgcgtcatccgccaggagtgggccgccgtccgcgtccaggcggccttccgcgccttcttggcgcggcgggcgttgaaggcgctgagaggcatcgtgcggctgcaggcgctggtgcgggggcggctggtgcggcggcagctcgccgtgacgctcaagtgcatgaacgcgctgctgcgggtgcaggagcgcgcgcgggagcggcgggcgcgctgctcggcggatggccgggactcgcaggacgcggtcggcgagcgcgacggccgcgccgacccgatcaaacaagcagaggaacaatggtgtgacagtcaaggatcggtttctgaagtaagatcgaaaatacacatgaggcatgatgctgtggctaagagggaaagggcaattgcttatgcgctttctcaccagcctaggagttcaaaacaaagtgcaaggccaagctctcctgctagatctctgaggaaccatgagtctaataggtgcaatcacgactggagctatattgaaggatggatggcaacaaagccttgggagagcaggctcatggagcaaagccatgctgaattgaagtgttccaagaacagtggcgaactgaacttagctggcgcccaactttcaaatgcaagctcagttaagatgagagggaacagggtggcagcaaagcctccttctgtactctcagcttcttcttcagacttcccgtgtgatgtgagctctgcatcgacatcgtcagcaactccagcaagatccgacggtggacatggtgaaggtccgagttacatgagcttgacgaagtctgcaaaagcaaggcagagctacaacagtccattccagattcagagacagcgatctggaggcatgtcatcttacaaaagggttgcactctctccattagatgttcagagcaacgcctgttcagaattttcagtcacctccaggaagttaaacagtctgtctctgaaaggccgtagcatgacaaggagcttggacaaggagaatgacaatctgttctagcttgctgttctatggacaaattagctaatttgcatcttacatatatattatctgatccgttgttagcatttatacatccaagccaagctcaatgcctcattgcctctatcatgttttttgtatgcacaactgagattagtcattagttaaatgtctgaacctctttttatccct

SEQ ID NO: 9846 - DNA, 1428 bp, Oryza sativa
  ref <308>: DATABASE ACCESSION NUMBER: AK107194
  ref <309>: DATABASE ENTRY DATE: 2002-08-28
aattttggtccaagaaggcgccactgcacaccggcgaccatggacgccactgccaccgacctccgcgtctccatagctcaccaaacccgcttcgcgttccgcctcgccgccgcgctctcctccccgcgggcgcacccggcggcaggcggcgccgccggcgccggcgggagcaacgtggccttctccccgctctccctccacgtcgcgctcagcctcgtcgcggccggcgcgggcggcgccacgcgcgatcagctcgtctccctcctcggtgtcccaggacgagggacggctgaggggctgcacgcgttcgccgagcaggtggtgcagctcgtgctcgccgactcgtctcccgccggcggccctcgcgtcgccttcgccgacggcgtcttcatcgactcgtcgctgtcgctcatgaaaagcttcaaggacgttgccgtgggcaagtacaaggctgagacccactcggtcgacttccaaactaaggccgctgaagttgctagtcaggtgaactcatgggtagacagagtcacatcaggcctcatcaaagaaatactccctccaggatctgttgaccatactaccaggctggttctgggtaatgccctttatttcaaaggagcatggactgagaagtttgatgcatctaaaaccaaagatggcgaatttcgtcttcttgatggcaagtcggttctagcaccattcatgtccacttcaaagaagcaatatctttcgtcttacgacagcttaaaggtactgaagctcccataccagaaaggcagggacctgaggcagttctccatgtacatacttcttccggaagcacaggatggcctctggagcttggctgcgaagctgaactctgaaccagagttcctggagaagcgtatcccgacgcggcaagttactgtcggcaagttcaagctccccaagttcaagatatcgtttggatttgaagcgtctgatttgctcaaaattttggggctccaactgccattcagttcgaaggctgatcttactgggatggtgggttctccagagagacataacctgttcgtttcatcccttttccacaagtcgttcgtccaggtggatgaggaaggcaccgaggctgctgctgcatctgcagcagtggtcagttttaggtcagctccagtaaccgtggacttcgttgcggatcatccgttcctgttcttgatcagggaggacatgacaggtgtggtgctgttcatcggccatgtggtgaatccacttctgtgatcagggaagacaagaatgggtgttgcaatatactgtagagaagcagcatttgatcatggtgacttctcaatgagtatgacaaatgttctgtgtgtgtttgattgtgcctgcatgatgtatgtgaggtttgtgtaatggctgagttaataaatgagatgagactcgctggtc

SEQ ID NO: 9847 - DNA, 1454 bp, Oryza sativa
  ref <308>: DATABASE ACCESSION NUMBER: AK107195
  ref <309>: DATABASE ENTRY DATE: 2002-08-28
atccacgcagatcccctctccccctctcacgccgtacgtgagggatgccgatctcgtcgacacgcagcgagatcccaggtgggcggccgtcaagtgcgcacgcaaggaggcctacggctgcggggagttcggtcaggagctggtggatggcctgacgctgtacgtgcgccgcaacgatggccccagcgacgatctcttctccgccctcgccgtccgtgccaccgacgagatgctgcggaaggtcgcggcgccaacgaagatccagaagagcctcatccgcccgctcttccgctgtcaggcaagtatgaatgcccgcgtcaccttcgtctgcgagttgcacgccgcggaggagaacctcgtcgtcctctccgcgtccttcgaccacgcccaccacatctactacctcgtctacgacggcatcgacgagtcactcaccatgatcccgagcctgtcaccgcaccgcttcgtggccttccacccgcggcctgtcctaaggcgccgcgccactgggggctatgacctggccctcatagcgaggtacctcagcaggaagagcagagaagacggggacgttctccttctgtttaccaaggagaaggagagttcctgctgctccgatcagtggatggagaagaagaagggtatgcgcctcccaacggggcccctgggcttcttctgcccggacatgatcttctcgttcaagggcaacactttctgggtcgatctctcacagggtttcatgtgctgcgacaccaatgtcctcttctctggcgacaccgtggatttcagacacctcagcttcccccaccagtacctgcttcatgacgccactgcattagccaacacaacagtggccgtgtggacactggaccaaggtggcctgtgctggaaaaaggatgtggagttcaggctggggaacatatggtcgcaacgggactacaagcagtctgggttgcccaggatggtacccgtgtggcccttcctaaggccgcacgcacatggcacactctacttcctggtgccgaaaccgatgaccggacctagtgacccccaaatgtatcacatttgcgggctcgacatgtgcaccaagaaaatccagttgtcgcagtactccgtccgctccaatatcctccggccggctgccttccctaccaatgcattccaacaccttgatgagtccccactagctacaaagtaattctactgattgcttgagttaactggaggcagggaatgttcatcaaggcagtgcggagttgggattctatatgcaaggttgcttattactttctaggtatcgtgttttgggtcgaaggcacttcccaactcgtaatttatcgtcactctatatagcctaggaccctattgatgcacttgcgaaactgattatgtgcttccttattgattctgtatccgtgcgacgaactaatctagctactcgttatattattatc

SEQ ID NO: 9848 - DNA, 1876 bp, Oryza sativa
  ref <308>: DATABASE ACCESSION NUMBER: AK107196
  ref <309>: DATABASE ENTRY DATE: 2002-08-28
aatcgccaccgcagccgcaaggccatctctactggttgcttgatccccccagcaataggaggtagatctaccatggccaggatgagcttgagaccgagaggccggcggccgcgggaggcctgcggcgacgaccgcctcagcgcactccccgacgacctgctcctcctcgtcctccgccgcctcgacacccgcgcggcgctcgccaccggcatgctctccaggcgctggacgaatctgccccacgagctcgacgccctcgatttcagggtcagcgacatactcccgccgcgctaccaccggtgcatcctccgccaccgcggcgtgatgaactggatagcgtaccggcacgccatccccaatagcctgatgcccgccatccggaggcacgagcggcgagccgcgcgcgccttggtccgctccgtcgagagcttcatcgacgccgacgacggccgacctagccggcggaaggtcagtaggctgaggctcgagttcttcggcacgcacaacaccgctggcatcaaccggttgatctccaaggccatagacgattggggcgtcgaggagctcgaggccgtcgggaagccaatgtactggcgccaacctcccacccacgaattccctagccatggcctctgcaaggatccccgcgcgtcacgcctgcgaaccctcacgctcggcggctgcgtgctcccgccgctgcacgagtacggcggcgtcaccaagctcgtcttgcacggcatggcggcctcgacgccggcggaagcctacgagggcgtcttcacctcgtgcccgcagctgcaagtgctgcacctcgaatcatgcttcctcgaccggaggaagtccttggtggtggacgctcccatatcggagatcagggagctcgtcgtcgatgcctgcgatatcatttcggtgaagctgcggtctcttccgagactccagaacctagcctccatgggcacccaggtgctgttcgaccgccgcacctcctcctcctccttcccctgcctccggcaatggcacctcgcctgcctctacggcttggcccgcaagttcagccgttggctcgaacccgacctgacgctcgacagattcttccactacaccctggacatcaccgacctgatcgtccggttcaccggaccggagagatggatcgtgccgtcgtcttgctcgccgtcgccgccgttgctgcgcagcttgaggcggctgctggtcgccgacgtgccttcctcctgggacgcgtcgtggcctcgcatcctcctcgacgcggcgccttcgctcaagacccttcacattcacatcgccccgcgcgacgcgaagaagcccaccggcggcgggttctcatggcatcatcccaccgttcctctgcacaactatcgcttggaggagttcgccatggctggctttggagggacagtgagtcaggtatactttgtgaagctcgtcgtcggagcgtgcaccgcgctgcgccatgtctccattttcaagggaggggatctgaagtacaagggaaattgggactgggagatgccgaggttgcaggagaattcgtggaatgacaaggagaaagaaaccatggagaagcagatcatggatgcggtctcttgctcaacggatcatctccaaatagttctaggttgattcacccatgtagtagttataatcagcattagccattaggccaaccgatggcagcaataatttatcatgttcacttaattttatttagagtaagtggcccggtgaaaaatttaatttgtaatctcttttactcgaataatgtatttgctgaacctcgtgttcagcagtgtgtgaagtgtgaactcggttcttatttgttttctgtaatgtgtaataatttgaaatttgtcttact

SEQ ID NO: 9849 - DNA, 1919 bp, Oryza sativa
  ref <308>: DATABASE ACCESSION NUMBER: AK107197
  ref <309>: DATABASE ENTRY DATE: 2002-08-28
accatctagggttccaagggccagcctccatcgccgccgccgcctcgcgtgcttccgtttatctctgttccgctcatgctcttgttggtttttcatgttcataagttcatgtgtgttttttttctttttggttgaatcgtcctctcttgttcttgttaaggtgggggcaccaatatatcaccatggtgccagccatctctgcgagaaggggatagatcgacgcgtcaagaaatcgtttctgttgccatggctccagtaggcaatacgattgttgcttgcgcacagttcaatctcttgtgcagatcagtttcttcttctttgtttttgggtgatctgttgtttatctgttcgagttgtgttcttgcacggtgctaaccccgggcttgtcggattcaaatcgcctgaagaaggaagccccaatgcctgtgctagatccaccataccattcagtgttgcaggtcttgatgcttcgagcatgtgattgatctgtgtcagcgtaatggatacatttcaaaaatcaaatgtttttttttgtgtttcctaattctctttttccttgggagatttgatagctgatggcagtgatttgacatttacccgcgcttctgatttaaaccgtgaagttaagggaaaaaaataatggttgaatttcttaatatgagccttccattctgctatcgtatttcctctaaaaatttggtatttctgtttgttagatttacgtttagatttggtagatttgtctcttcggcagtgatgatacaaactttcagctttaaacgccagctctgcttctgataattcatgacagataaagctgattcagatctgagccaattgctgttctactttttttcccataggaataaccctttgcgttagcatcatttgtatctcttctattagcatattatatcatttgtttgaactaatagcatcatctaataattttacctatgatgagctgcccattgtttagaggatgtagttggctcgagttcctgtttatcaggaagaacctacttgtagctgctgcattcacatgttatcaacgggctacctgaggtcattagattagatgaccttcatgttgtacctttgtattttcagggatttttcttcgtccattgagtaatttgcataattttttgccgagtttaactatccttccgcatgttaagtttctgatttgccgggaggctgaaaaagctcggagattgtgtgttgacatcagcttcgtctctattaaccgtgggatgggagttaaatgacagcacgaaattcgttccattcttctagcatatactcaccgtccattttgattttgagattttgttgatgataggtgattcagctctttgtagttgtcgtgtataactgacgcaacgaaattcatggaaatgcattgaatattcaatcactgattcgaggctaacgttttaataatcccagtaattactgaggcaaacggttttaataattccaattactggcaactcaatgttgaatgtctaattctttgaacagctgaacaccatgttgccagttgcactcccagctagttggaaacttgcattgccacagctattcaggactgttttcagatgttacaattgttcatatgaacgaattaaggaccggttcttttgattgacagtgatgttttatttctgcatcacaaaggaacttcagcctcagagactctgctgatgatcagaattcagagaggaactcaagcatcatcagaaagttttgctgtatcggactgctggagaacggaacggaggagacatggaaggagagatcacaacaacaaatgataatcgttgacatgtcttgaaacttcgcattgagttgttttgatctgagaaatgacccatgaaaagaaaaggaaaacagctaacaaggatctgaactgg

SEQ ID NO: 9850 - DNA, 1253 bp, Oryza sativa
  ref <308>: DATABASE ACCESSION NUMBER: AK107198
  ref <309>: DATABASE ENTRY DATE: 2002-08-28
aaaaattgcctaacactaacaagcaacgatgaccgtcgtcgtcgttgccgatgacgccgccgccgccgcagcggcggcgcagcagcaggaggagctgccgccggggcacggccaaacggtgtgtgtcaccggcgccgccgggtacatcgcgtcgtggctcgtcaagctgctgctggagaggggctacaccgtgaagggcacagtgagaaacccagatgacccgaagaacgcccacctgaaggcgctggacggcgccgacgagaggctggtcctctgcaaggccgacctcctcgactacgactccatccgcgccgccgtcgacggctgccacggcgtgttccacaccgcctcccccgtcaccgatgaccctgagcagatggtggagccggcggtgcgggggacggagtacgtgataaaggcggcggcggaggccggcacggtgcgccgggtggtgttcacgtcgtccatcggcgccgtcaccatggaccccaaccgcggccccgacgtggtcgtcgacgagtcctgctggagcgacctcgagttctgcaagaaaaccaagaactggtactgctacggtaaggcggtggcagagcaggaggcgtgcaaggcggccgaagagcgcggcgtcgacctcgtcgtcgtcagccccgtgctggtggtcggcccgctgctgcagccgacggtgaacgccagcgccgtgcacatcctcaagtacctcgacggctcagccaagaagtacgccaatgccgtgcaggcgtacgtggacgtgcgcgacgtcgcggctgcgcacgtccgcgtcttcgaggcgccggaggcctccggccggcacctctgcgccgagcgcgtcctgcaccgtgaggacgtcgtccacatcctcggcaagctcttccccgagtatcctgtgcccacaaggtgagtttctgtatgtgtgctagtgatctgtaatccatctcttgatctccccatgcccttgcatgttaatcagttgtgtagatactagtagatatatagatagcttagcttcaaaaaagatagtactagattatgccgcttacatgcttaggacattttcattgctttagttaagcatttagcacttgtatgctcctgcccccggcacctataacttccacctctgtcgattaatgcatcaaacacaaacacatgttacaagtgatattcctatttttttttcctagatgctaggtgtagtcctataaatgtcttactaaggatatggtttttcatccctt

SEQ ID NO: 9851 - DNA, 2058 bp, Oryza sativa
  ref <308>: DATABASE ACCESSION NUMBER: AK107199
  ref <309>: DATABASE ENTRY DATE: 2002-08-28
caaactctctcttccctccacccccgcttcctccttcttcccgtacgtacacgccggaggccggacagagacacgaaccgcacggcgacgagctgtgagacgcggcggttttggtcgcgacctgagggattccgatgacaacctcgtcgtccgggagcgtcgagacgtcggccaattcgcggctggggacgttctcgttcgccagcgcgagcttcacggacctcctcgggggaaacgcgggagccggcggcggaggtgtgtccaggtacaaggccatgaccccgccttcgctgccgctctcgccgccgccggtgtcgccgtcgtccttcttcaacagcccgatcggcatgaaccaggccgacttcctcggctcgccggtgctcctgacctccagtatcttcccgtcgccgacgacgggcgcattcgcgtcgcagcactttgactggaggccggaggtggcggcggcgcagagcgccgatcaaggcggcaaggacgagcagaggaattcctactccgacttctcgtttcagacggcgcctgcgagcgaggaggccgtgcgaacgacgactttccagccaccggtcccaccggccccactgggggacgaggcatacagaagtcagcagcagcagcagccatggggctaccagcagcagcctgcaggcatggacgcgggtgccaacgcggcgagcttcggtgcggcgccgttccaggcgacctcgtcggagatggcgccacaggtgcagggtggcggcgggtacagccagccgcagtcgcagaggcggtcgtcggacgacggctacaactggcgcaagtacgggcagaagcaggtgaaggggagcgagaacccccgcagctactacaagtgcaccttcccgaactgcccgaccaagaagaaggtggagcggtcgctcgacggccagatcaccgagatcgtgtacaagggcacgcacaaccacgccaagccgcagaacacgcgcaggaactccggctcgtcggcggcgcaggtcctgcagagcggcggcgacatgtcggagcattccttcgggggcatgtccggcacagcggcgacgcccgagaactcgtcggcgtcgttcggtgacgacgagatcagagttggctcccctcgggccgggaacggcggcggcgacgagttcgacgacgacgagccggattccaagagatggaggaaagacggtgacggcgaggggatctccatggctggcaaccggacggtgcgggaaccgagggtggtcgtccaaaccatgagcgacatcgacatcctcgacgacggctaccgctggagaaagtacggccagaaggtggtgaagggcaacccgaacccaaggagctactacaagtgcaccacggccggttgccccgtgcggaagcacgtggagcgcgcgtcccacgacctgcgcgccgtgatcaccacctacgaggggaaacacaaccacgacgtgcccgccgcgcgggggagcgccgcgctctaccgccccgcgccgccggcggcggccgccaccagcagccacccgtacctgccgaaccagccgccgcccatgtcctaccagcccacggggccacagccgtacgcgctgaggcccgacgggttcggcggccagggaccgttcggcggcgtggtcggcgggagcagcttcggcggcttctccgggttcgacgacgccaggggctcgtacatgagccagcaccagcagcagcagaggcagaacgacgcgatgcacgcctcgagagccaaggaagagcccggagacgacatgttcttccagaactcgctctactgactgaaagaatcgtcgtcgtaggaatctcaaagacatgacacgacggaaattgtagtttaggggggttttgtacttgtacgtacctaggatatactgtagtctttgatacatttgtttatttgtttggagggcccaggaatgcagatggctgcagaaaagggtaccgtcccttaacactggagatgggaggaaaggatgtactcctgtaggatacacagcaaattttgctctgtaatttttttcacatagaaaaatg

SEQ ID NO: 9852 - DNA, 1393 bp, Oryza sativa
  ref <308>: DATABASE ACCESSION NUMBER: AK107200
  ref <309>: DATABASE ENTRY DATE: 2002-08-28
aaaacccccactattactaccactcctctcctctcctctcctccgcatcacctgccgcatcagccgtggtgtgggctagcaaccacctcctcggcaacggccacatcgtggtggtgctcctccggtcgtggtcggagttcgcgcgcacggggacattcgccggaggcctgaaccttgaccggtcggtgctgagccgtccccactccccgccgaggtacagcgccgccgtcgacgggatgttcgtgccgtgggaccacgagcacgaggtgaacccgctcactggggaggcgagcttcgtcgagcggctctactatgtcgaggccgccgacatcgccaggctgcgcgaggaggcgcgcgcgacgagcgtgcaggcggtgtcggcgtacctgtggaagaagctagccgccgtcgtcagttcgtcggcgagcatagccaaatccgacaccgcggcgaggcgctgcagcatggggtattgggtggacctgcggtggcgcgtgaggtcgccggatttctgccgcgcgctgcgcagctacgtcggcaacgcgaccacctacgtggagcgggaggagcccgcggacgccgtcctgaagaagccgctgggcgaggtggctgcgatggtgcgggaggtggcggcgaagctgccggccgcccgctccgcttccgtctcagccgcccgctgccctccgccgccggcagcgctgcttgctcccgccctcgcggggccgccgccatgctggtgagcagagagagagagagagggggagggggggggagattgggatagagtagagagagagagagtggtggagaactgacagtggggcccactaattttttttaaaaaaaatgctgactcaactgccagtgaatccaaaactactccggattgagtaggggggttatttattcggtttcaataattgaggatgtagaatgcctgtttttcgaatttaggggggtaattcgtaccttttccttctccatatagcagttggggtttctcaaacaatccgccatcgctgatggcctgatgcgagtccacttcttctgctcctcatctgaagttaatcgaagacacaaccagccctagtagggccttgttgcatgtaaaagctgcatgtgaaagggtctgttcactttgctgccattttcaaccttatcaaattttggtaaagttgttaaaaaagtagctacatttagtttgctaccaaattttggtaactatataagaaatcatgtcaaaattttgacaagttcgccaaaattttggcaactataccaaaatttggcaatgccaaaatttagtaaggtttttttttttttttcatcaaagtgaacaggcccaaaattttctccttccgtacaaaattccaggtactactacattagatgc

SEQ ID NO: 9853 - DNA, 1628 bp, Oryza sativa
  ref <308>: DATABASE ACCESSION NUMBER: AK107201
  ref <309>: DATABASE ENTRY DATE: 2002-08-28
agctaggtcagtttgccctaagacaatttccccgtcgcgagtcgccgacttcatcggagtaggggcgcggcggccatggcgaaaagggcgagactactcagcgccgcggccggtcccgtcctccccgacgagctcgtgtgggagatcttggcccgcctcccggcgagggggctcctccgctgccacgccgtgtgccgcgactggcgccgcctggccacctccgccgacttcctcctcgcccaccaccgccaccagccgccgcgcccgctcgtcttcggctgcgcgaggtggaggagcggcgccgccgccgacgccgacgccgccgtggattccgtcgacctcatccggcaccccgccgagcgccgccgcgtcctcggcttcagcgactaccgccaacaccaaagcttcaagatccactcctcctgcgacgggctcctcctcttcgtctccggccgcgccttctacatctgcaacccggccacgcgccaggtgacgccagtcccagccctcaccggcggcggcagccaggtcaccctgtacccgcacccatcttccggcgacggcgagtaccgcgtcctcaaatggaagtatcccgatgccgtctgcatcctcgcggtcggctcgtcggagaagccgcggcgcattggattacctgaggcatttctcccacccgtgttctggattgatgagatcggctttctcccacccgtgttgctccatggctgcctgcactggcacctccgtaaaccggaagacgcaatactcgttttcgacacggtggctgagtccttcaggtggatggtttctccaaatgttgatggttatggtgcacatttggttgagattgatggtggtatgcttggcattggcattgtgactcaaggtatggccaaactctgggttcttcaggactatgagacggaggtctggtcgttgaggtaccacgttaaattgcccgtggcgagaatgaggagcattgcaagggaaggtttcttttcatggaaaatcgtatgtcatcgtggggaaattctggtctacattcagagctctgtgttcttgtttctgtgtgacaccaaggggaatttgcgggagaaaatccatttggataacatgcttccatgtgctatgaggcattgtttgaaagaaagccttgtcaaccatgcgttcttcgggaggcatggtggtgctcatgtgggacagccacagtttttctgtggtctgtagcatacgctggtgctgctccgtcattgttttgcttacccctgcaaagtgtagaaggggacaaggacttgaggagtttgagtagggggttatattttgcagatatttggcaatggtaatttttaatcggaccaaagaatgattgtcttatgtggtgactggagctgtagatcttctgggtgtaatggtgtgccgcatcttagcctgattggtctaaattttctgattctacaatgaatttatcttctagtaattaactcgaatgtatatcctgctgccttagttcctgccttgaaaactagttgattggatgtagacatatagtttccatggtttaatagagggaaccatgggttatccttttgaatttgaaatatataagaagcttgagcataatgttgacatgc

SEQ ID NO: 9854 - DNA, 1775 bp, Oryza sativa
  ref <308>: DATABASE ACCESSION NUMBER: AK107202
  ref <309>: DATABASE ENTRY DATE: 2002-08-28
aagccaaacaagaaacccaccgtttctctctcaaaaccgcgggaatcaatcaatcgccgttcgcgtcgcgccacgagatattttcccccaagaaaagttggagtgagggatgagtgctatggcgatgtcgtcgctgaacccgaacgcggcgccgttcatcccggcggcgttcaggagggtggaggacttctcgccggagtggtgggagctcgtcaagaccacggcgtggttccgcgaccactggttcaggcagcaccagatgtacgaggacgctgcggcggaggaggaccaccaccgccaggtgttcgacgacgacctcgccgcgctcctgcccgacgactcgctcgacctcctcgacatggtcgacaccgacgacctcttctacacccccgacccccccgtccaccacaagccgacgacgactcccaccctcgacgccgacgtgctcagggcgctcagcctcaactcgccgaggttgggcggcgccgggatggtgaggcacgccgagaagccggcccagttcgtcgccgccaagggcggcgccgcccgccacgtcatccaccagcctcgctagagcgccatgggtgagtggtgatgctgctgctgctgctgtctagtgtataaccttggagttttcagagtttagtctctctgcttttcttcactgtgtataaaaactgaaaaaaaaagggggaaaaattgcagctttctggtgctgcatcccttgtagtagtaaagcagcttctgttcagtttcaggtgcatcatctaaaatgtgttagaaaaaaaaaagcaaaaatagagagtgatgtagaatcatgtgtactaatgattctactaccgcccttgttaatgttggatatattaagatggcaagcagtctaatgtttagaatctttcaacttctgattattcctttgctctcttcagaatctggtagaaacctgctcttttgttgtctgtgaatttgttggatctcgaaagttggtggttggtttgtcaattgtcatcatgtgcgatgccgatgatggtggtttattactggcatcatcagtagcaaaaatggaagtgactgatcaagaaagatgatttaattgggagctctgaaaagaaggtggaagtttaaagcctctgaaagacatcagtgtggaaatgtgacgaactgggaccgaaatcgccatcgaattggtcatgatttagtaactttagaaatgaaagcaacataagtaccattcaaggagcaatatctacgtgtgaggtgtcacagataaatgctagacggaaacagcattaagttcagattgatttctgcagctggctgttaaggttgcagagatatccatagacattctaacaataggtagctgatttattcttgacgttggctttcaatttctggttggctctctcaactttgaactgaagagttcgtatgatgaacatgccagctttgcataaacaggcatacagctcagccatgtcaaactgtcattaaattatttgagaacttagtatgcaatgcaagataagacatggtttctaaactataagcatgaaagcaaaatgtatcgtgcaagagaatgtcttggtttaggttcagttaggtagcaaattatggaaggccatgttgattcagcagtcaagtctctaaaacaagctagggagaagaacatgaattcagaagtagttggtcaaaactcaaaagtgattgtagggtgaagaacataaatgaagtaattggtcaaagtgataatagagaaaggaacatgaattcag

SEQ ID NO: 9855 - DNA, 1468 bp, Oryza sativa
  ref <308>: DATABASE ACCESSION NUMBER: AK107203
  ref <309>: DATABASE ENTRY DATE: 2002-08-28
aatcgatcgtgtatacacaatctacaaatggtccgtagtcgtcgccgtcgtagtgccatttttctcagttgaagacgtcacactgcttccggatgttgcccttgccgccggacttgaccccgacgcggccgagcttgacgatggcgtcggcgaaggccttgtagaagtccggcgtgctggccgccagcgagtccaccgtcggccgcgtgcggttgtcggtgtagagcagctcgtcggaggcgagcaagccgccgccgtcctgcaggttccggtagtactggttgtcgaagagcgccggcgtggcctggtccatgagcaccatcatgtccggcccgccgtcggggcacttgcccttgaggaacgccgcgtacttctcgttcagcgtcgggtccgtcggctgcgacggcgggttgtagcggtacagccggtccgagaacttgctgcagtgcgccagcccgacgctgtgcgccgctgcatgcgtacaccgagtccggtcagtcattgcgtcgaacacatggcgggggatgcattggtttgtatagtatagtgtgtgtctatgtcgcacctgagagcgcgaccatgtcagacatgttgaggccgttggatttgaagatggcgacgagctcgctgagggtgttgttcggctgcggcagcttgccggcgacgttgctggcgctggacctcatgccgtccagcctgcccagctccaccgggaagaatggcccaccgctctgcacgaatcttgcagtgtttggcataaccggttacttctagagcgtgtgcgagttggtgtagcgcgtagcgtaccagggcgatggcgtcgcgcgtggcgatggcgagcacgtcggtgcaggagacctggtcggggcacgcggcctcgacggcggccttggcgctcctcaccgtctcgaatccctcgaacgccagcgagaggttgtcgggcgcgtccctctccgccgtgttgcccgccgtcgacgtgatcagcaccgagccgtcacacccctgcacgccacgccacgccacgccgcacacacgacgtcagtcaatcgagatcgccatgcttgacacatcgccgattaatcaatcaagcaaagtgtttgtacatcgacgaagcagtcgtggaagaagaggcggacggtggagccgatggtgcggatggtggcctgcatcttgtccttcaccacgccgagcacgatgctctcgacgttggggcacgtgctgttgtagtagtccgtcctcaggtcggacgcgccgagctgcgccacggcggcgacgacgagcagcgccatccaccacgacgacgacggccgagccatcttgttaaacctcttggcatgcataagtggtgaaagacttcacttttggggagatttatatggtggttaacaggagaagtgcgacgaacaagttttcgttgaaaaaaaaagtgatgatcaagtgtggtgtgcaagattttgtcacactgtgg

SEQ ID NO: 9856 - DNA, 1853 bp, Oryza sativa
  ref <308>: DATABASE ACCESSION NUMBER: AK107204
  ref <309>: DATABASE ENTRY DATE: 2002-08-28
acagcccacacttccattgctcctcccctctcctctacagtctgtgttgagcgcgcgtcgaggcggcgaggatggcaacgtgcgcggataccctcggcccgctgctgggcacggcggcggcgaacgcgacggactacctgtgcaaccagttcgcggacacgacgtcggccgtggactcgacatacctgctcttctcggcgtacctcgtgttcgccatgcagctcggcttcgccatgctctgcgccgggtccgtccgcgtcaagaacaccatgaacatcatgcttaccaacgtgctcgacgccgccgccggcgcgctcttctactacctcttcggcttcgccttcgccttcggggcgccgtccaacggcttcatcgggaaccacttcttcggcctcaagcaggtcccacaggtcggcttcgactacagcttcttcctcttccagtgggccttcgccatcgccgccgcgggcatcacgtccggctccatcgccgagcggacccagttcgtggcgtacctcatctactccgccttcctcaccggcttcgtctacccggtggtgtcccactggatctggtccgccgacgggtgggcctcggcttcccggacgtcggggtcgctgctcttcgggtccggcgtcatcgacttcgccgggtcaggggttgtccacatggtgggcggcgtggccggactctggggcgccctcatcgagggcccccgcattgggcggttcgaccacgccggccgctcggtggcgctgcgcggccacagcgcgtcgctcgtcgtgctcggcagcttccttctgtggttcgggtggtacgggtttaaccccggctcgttcctcaccatcctcaaatcctacggcccgcccggtagcatccacgggcagtggtcggcggtgggacgcaccgccgtgaccaccaccctcgccggcagcacggcggcgctcacgacgctcttcgggaagaggctccagacggggcactggaacgtgatcgacgtctgcaacggcctcctcggcggcttcgcggcgatcaccgccggttgctccgtcgtcgacccgtgggccgcgatcatctgcgggttcgtctcggcgtgggtgctcatcggcctcaacgcgctggcggcgaggctcaagttcgacgacccgctcgaggcggcgcagctgcacggcgggtgcggcgcgtggggggtcatcttcacggcgctgttcgcgcgcaaggagtacgtggaccagatcttcggccagcccgggcgcccgtacgggctgttcatgggcggcggcggccggctgctcggggcgcacatagtggtcatcctggtcatcgcggcgtgggtgagcttcaccatggcgccgctgttcctggtgctcaacaagctgggcttgctgcgcatctcggccgaggacgagatggccggcatggaccagacgcgccacggcgggttcgcgtacgcgtaccacgacgacgacgcgagcggcaagccggaccgcagcgtcggcgggttcatgctcaagtcggcgcacggcacgcaggtcgccgccgagatgggaggccatgtctagtggaaccggaggagctgagctagtagtacatacatgcagcatcatcgatcgaacgaaatgcatataagcgtttttcaaggttgatctggtgctgcaggtttcgtgattgtataataggaagaaaaagatagtagtattttttatctgagatcatctgtttggaacaggggatttgactaagatttgatataaatttacacaaaatcttagcaaaaatccctttatctcaactctcaagtagagctttgctttgtacaacaaagtatcatgtgtgatataattgtcaggtgg

SEQ ID NO: 9857 - DNA, 2025 bp, Oryza sativa
  ref <308>: DATABASE ACCESSION NUMBER: AK107205
  ref <309>: DATABASE ENTRY DATE: 2002-08-28
ggggcgagtaaatacggaaacgaagccgcttgctttcggtttcctcctcccccatttccttggattttgcgaggtttcctcttcctccacgctctcgaatccgagcagagaagaagcaccagccggggaaggcacgggaaccctaggttggctgcgccgccgcacgcacgcacccgctccctttcgtgctgctgctgctgctgttgttgccgccgcctgcatcgtccccgatccgccggccagccagctagctagcgagggaggccaggttatactgggctttcctcctgataaactcgttccaaagacattcggtgttgccatagttttccaagtgaactcactatgaaaccggactggtcaattttctccaagtttgaccacaatggagggtacctgcataaattcccaatagattctccaatatctcatgatattggattaggattgatatcacattttggaaccttagtcgagagttcctttcagcatccaaggcatatatgttctacagggaatggagcagttcaggaagcattcagttgcttcaacaagtttgctggtgctttctatttctggctttctagagcatcaaatcccaagattttccacaggttgtcagctattgcaggctcaagttcaagagcctgccagtcgcaaataaagcaagtgacttcttgcatgcagcatttggccggattgcgttttggttctcaagttagagaagagcacgctatacaaattcttttagcaaagcttgctaatgcaacatttgggcgactgtggaacgaggtggaggagcgccatgcctgtaacattcttatgttagctgctgctactgtaccaccatttgaaaacatatcgccgaagatgcttgcagactcaatgacattgggaagagataatggtcgtaccagagaacctgttgatcagcattctttggaggaaaaccattcaggctgtacttgtgttgctgtgccaagaataattttaccagaagacgcaactgaaccaaaaactgggataaagttccctactcttctcgaggataattcaaatccaacttcagaggtgctcgtcgggatgggctttagaagcatgcgaataatgagggtcaaaaacctgaatctctatgcctttggattatatatacaaccagattctatttgcaaaaggctgagcccaaagtatgcttctgttccagtttctgaactgaaggaccacccagatttctatgaagatcttttgagggaaaatattcatatgacagtcaggctgatagttagctacaatggtcttagcattggcacagtgcgggatgcatttgagaagtccctttgcttccgattgcagaagatgaatcctaatactgattatcattgcttgaagacgtttggttcttattttagtgaagatatttgtatacctgcgggtacaaagatcgacttccggcaaacctctgatggccagctcataactgaaattgatggcaaacaaattggtgctgtccagagcaaagatctttgcagggctttcttcgatatgtatattggtgatccacctgtttcagtcgagaccaaacaagacattgcacagaatgttggtggactcattagaagatgttattgaaaggcataattaaacgacagactggtcggaattatttcattcttcgatacaaggatactagggtgagggggaagcatatacaaagacaggactaggaggagaggatgaactgtatgtatagtgatagatcaacctgtaaactaaacagagccttagcatctttctccggagcaattgcctccatgcttttcatatgggttggctttggctatttcctggccactgtatcatgtgcaatgatccagccagacaatgtaaaagaatgcttccttcccccatctaaaatgagggacaccagctttgctggtttagattaggccatagtagtggtgctgaatataaattgtgtactagtgttgagattaaacagcaagtagtgtactagtgtcacttttc

SEQ ID NO: 9858 - DNA, 753 bp, Oryza sativa
  ref <308>: DATABASE ACCESSION NUMBER: AK107206
  ref <309>: DATABASE ENTRY DATE: 2002-08-28
acagagagaaaagctaaaccaaactaccaaggcccaaacgtccaaaccccaaacgcatcgacgcttcacaggtagcttggtttgtgcgtgcgtgcgcgcgcatggcgacgatgggagaggagctgtacgagtccgacgtgctgtggccggatcaccagtcgccacacgacgtcgtcccgccgacggcgacggcgacggcgaccgcgccgacgccggctcggcggggccagcagcagatcacgcgccactgctccacggcgagctctcggccggtggacattcccagggccgcgcagcggtggagcggcggcgaccagggcgacgactgcggcggggggacgatggtgccgccccacgtgatggtgtcgcggaggcggtcgacggaggagggggatcaggcgttctcgctgcggacggggaccgggcgggcgcgccgcgacctcagccacctgcgcaactccgtgctgcggatgaccgggttcattgaaggatgacccggcacggctggcccgtcgtttgtgcacacatgcatgcagaggagtggacgacgactggtcgccaaacacccgtccgtcgtcctctcggcttgcactgggtgctcccatttttgttcgttccccttaattagttgcggtgtcatggtgtggacgtgtggtccatgagcaaatattgctcttgtaggaaaggaagcttcgccatgtgtgcctgagttaggattctgattatggactaattcaagtgtgtcttgtgtac

SEQ ID NO: 9859 - DNA, 2215 bp, Oryza sativa
  ref <308>: DATABASE ACCESSION NUMBER: AK107207
  ref <309>: DATABASE ENTRY DATE: 2002-08-28
acttgcttcagcttacctgctgctgcttgccttacgcctaccacatcgctcctgctgtctgctgtcctagccgcgtagccgcgccaccgcacaccagctctggcgcccagtcgccgcttgttgatctcatgcggggagctggatgcggatgcctcccgcagttccaaacggccgcgccgtcgtcgcctcatcgtccgccgcggcggcggagatggggaatttctgagctagggttaagtctagtgaatcatccacatatgcccacattaacacgaaacgagcccaatgggcctacgattgagtggagagtggcccagcagcgagtgccctgtcttcgcccatcgcctgacgccgcacctcgcctctgcacctgactgccgtcagcggcttgccggagttggaggtagagggtgttggtacgagcgggcggcgaggtatggcgagtcctccaccactgctctagcattacccacatttatatagatgttaatgaatctagcacatatatgtctagatttattaacacaaatatgaatgtgggcaatgctagaaagtcttataatatgaaacggagaaagtagataatactgtgaagtggtatgtagtggcatatctctaatatttgtgaaattgaaatgacatggtaccaaatatatgaataataatggcatattagcaaaccataaaatttataatgtcatgtatgcaattaacccttatttattttgtttctgatgagctatgcaaaattagttaagatgatttttttgttcattacgtttttattttaaagaaatgttttgttgtgggacatcaccaagcaaaatatcttttctatttaaaaatatagaaatgttaatatctatttgtgtggtacacacataatcattttttcacacaattttttccttctacacatatatcctcttcatatctatttgcttatgatgtttatattttataaggttactaaccacagaaacaaaatgttaggtatgtaccaaaacttccatatatatataggaaccactctacatggtcttaatcatccatataacctcttgacagggcaactgattgagaatcatctgtagttttgtccacagtcctagcaatatgaggaaaatgggcaccccactttctgcattgtattatagggttactaattgagcaccatgcatgtgtagattgaacggcggtcccaacgtttttattttaaagaagtgttttgtgggacatcaccaagcaaaatatcttttttatttgaaaagatagaaatgttaatatctatttgtgtggtacacacatgatcattttttcacacatttttttccctctacaggtatatcctcttcgtatctatcttcttaaaatgtttatatcttataaggttactgaccacaggaacaaaatgtcaggcatgtactaaaccttccagtatataggaaccactctacatgatattaatcatccaaataacctcttgatagggaaactgattgagaatcatgcgtagatctgtccacagtcctggcaacatgaggaaaatgggcaccccactttctgcattgtattataaggttgagcaccatgcatctgtagattggatgacagtcctagtgttatgaggaaaatagtcaccctgctatctacattctacccaatggttccctactcgaacaccgacgttccttttgggtcatggactttgagagaattagacgaaaatgattaggtgcaatagtcacaaatatttgtctattggaagcattgccattccagccctcttatccctttcagtagagaatgttttattaggctaatctttgttttgtttctaatgataaactgatgtttcaccagctgagctagcactgtttgtagccttggccatacggatagcttggactagtgctcagccaattcttagttcttgtgccacttttagtgcagtaggtgctcagcaattgatggaaagttcttttaccattttgaatcaacctatggaaacatttcaagcagaagttgtcactacagcagaacaagctagcagtgacgggctcaaaccctcttctgtgacggatagaccccctcgtcacagatcaatggtcactgatgacttaactcacctttgacgggtgtagctccgtcagaggtgacagacacctttgacgggttgtatcatgtgaaccgtcacagatgagaaaaatcaccc

SEQ ID NO: 9860 - DNA, 2043 bp, Oryza sativa
  ref <308>: DATABASE ACCESSION NUMBER: AK107208
  ref <309>: DATABASE ENTRY DATE: 2002-08-28
atttttttgccccctcgactgcagtctgcagccctactcccccacaagcgcgacgcaagcaaggtgtttgtcgaaatggagcacggtggccacgagctcgccgtcgtcgtcctcgtcttgctgcttctcgtgtccgccacctcgtgcacgttcctggaggaggacgtgattcttggcacggtggaggaggcgaaggtggcgaggctgggtggcggcggcggtggcggcagcaagggcgcgaacgcgagcacgaggagagcggacaacacctgcgccggcgtcggcgtcggcgtcggcggcggcggcggcggtggcggtggcggtggagggggtgggagagggaggttttacttggggtggaaggaggagattgccgggatggcggggcggccggagacggcggcgtggctgcgcgcggtgcggcggcggatccacgagcggccggagctggcgtacgaggaggtggagacgagccggctggtgcgcgacgagctggacgccatgggcgtcgggttccgccacccggtcgcccgcaccggcgtcgtcgccaacatcggcaccggccggccgccggtggtcgcgctccgggccgacatggacgcgctgcccatccaggaagcagtggaatgggagcacaagagcaagaacccagggaagatgcacgcctgcggccacgacgcgcatgcggcgatgctcctcggcgccgccaagatactcaaggctcgcgagcaccatctcaggggtacagtgaggctactgttccagccagccgaggagtcgggcgctggcgccaagcggatgatcgaaggcggcgcgctggaggacgtggaggcgatcttcgccgtccacgtgtcgcaccagcatccgacgtccgtgatcggctccaggaccggccctctgctcgccggctgcggcttcttcaaggccgtcatccacggcggccgccgctccggcgacgccgtcctcgccgccgcatccaccatcatcagcctgcagagcatcgtgtcccgcgaggcggatcccctcgactcgcaggtggtgtctgtggccatggtgaacggcagcgatcacccggcggcgacggcgagggcggcggcggcggaggaggaggaggagttcgtgctgggcggcacgttccgggcgttctcgaacgcaagcttctaccaggtgcggcggcggatcgaggaggtgatcacggcgcaggcgagggtgcacgggtgcgaggcggcggtggacttcttcgagaaccagagcttctacccgccgacggtgaacgacgcgcggatgtacgcgcacgtgaaggcggtcgccggcgagctcctcggcgccgggagctaccgcgacgtgccgccgatgatgggcgccgaggacttctccttctactcccaggtcgtccccgccggattctactacgtcggcgtgcgcaacgagacgctcggctccgtccacaccggccactccccctacttcatgatcgacgaggacgtcctccccaccggcgccgccttccacgccgccatcgccgagcgctacctcgccaaccactcgccttcctcctcctcctcctccgactccgacgacccggatgtcgagctggaggcgtcgtgaccgagcaagggagcccggcaaagtcagtcgatcagcgcgccgcgccgcgccgcgggagcgcgccacgccggttggtggtgggctggactggtgattttgggcccatttcgcggtgggctttgtcgcgggccatagggatcggtgtttttgccctgccatggggaaatttaggtgggagggattaatctgaggaaaaagtccacttttactcccttaaatgtataccgaatctaattcgtacccctcaaccagaaaaccggttaggatgactcccccaattactaaaactggtacaaatagactccctcggcggtttcaagggcggttttgctgacgtggtggtgttgacttggtcttcgtcccacgtggcgttgacgtggcattgatgtaagattagatttaaaaatatatatgtgggatcaatttgtcattcat

SEQ ID NO: 9861 - DNA, 1725 bp, Oryza sativa
  ref <308>: DATABASE ACCESSION NUMBER: AK107209
  ref <309>: DATABASE ENTRY DATE: 2002-08-28
cttcgaaaccaatccatctcgagttctcgccgtcaagaatcggaggagcagaggagagggaggagaattcgagagagaggagaggaggaggaggaggaggaggaggcggagtgaggtgtaagggggtggtggtgacgcgtcgctgattcgtgcggtttgctctgtggacgccgatcccggccgtttcgggcgatggcgtcgaggaggcagtggggagccggtgccggcgccgtcgatgttcctgctcaggaacgcaagggagaggctgccaagattgcgaggaggccaaagaccacgacggttgttgctcagcaaccgccaagaatccgtcgagccctcgccgacgtcagtaatctcgtcaatggccgggctgctctgcctgtcgtaaatcgccagaaggcagcagcagcagcagctgacaagtgcaggaaaccaatcaagcagcgcaacgagaacaacaaggcggccaagccagaagtcatcgtgatcagttcagactccgagaaacataagaaaaatccagcccagagagcagcctcccggagggcgccaatccaaacgctcacctcgattctgaccaagtgcagcagggcttctgacggtgtgatcagcccgaaaaaggagctgatatacgacatcgatgcatctgattctcacaacgagctggcagtggttgattacgtcgaagatatctacagattctacaggaacaccgagaacacctaccggcctctctgcacctacacggtgtcacagaccgagatcaacgagagaatgagagcaatcctgactgattggctcatcgaagtgcactacaggcttatgctgatggcagagacactgtacctcactgtctacataattgatcagtacctgtccctggagaatgtgcccaggaaggagctgcagcttgtcggtgtaagcgccatgttgatagcctgcaagtatgaggagacttgggctccattggttaaggacttccttgtcatatcagacaactccttcagcaggcagcaggtcctgagcacagagaagtccatacttaacaagctccagtggaacctgactgttccgacaatgtacatgttcatccttcgatacctgaaagctgcattgggtgacgaggagcaggagcacatgactttcttctacgcagagctcgcactggttcagtactccatgctcttttttgcgccatcggtgatagcagccgctgccgtctacgctgctcggtgtacccttggcctgagcccactatggagcgatcttctggagtaccacaccggcttagctgagccgcaattgctggggtgtgcgaggcggctggtgagcctgcacgcggcggcgccggagagcaggcagaaggtggtgtacaagaagtacgcgagccccaagctcggagccgtctccctccactcgccggccaagaagcttctcccgccgccgtcgccggtggcggcttgagctctcgctgttggaattttggcctcgattggaagaacatgtgcatagataggatcggatcgtcgccgcgtcgtcgtatcatcgctttgatgttaccccccgtttctgatttgattcttccaaattttgggttcctgatttgattggattgctactgattcgaatttggtgcgaatgaaattatgaaaaatcatcttgatgtttattctttttccccctttcctttttgagaggtggtaataatatttacatctttatatt

SEQ ID NO: 9862 - DNA, 1708 bp, Oryza sativa
  ref <308>: DATABASE ACCESSION NUMBER: AK107210
  ref <309>: DATABASE ENTRY DATE: 2002-08-28
accacgatccaacgcattttcttccacaattgcacgtacgtggagtatcacggtatcagtagtacgtaatggatttgctgccgctggtgacgctgctgctgctggcgcacgcggcggcgtgggtggcgtggcaggcggcggcgcggcggcggcgggcgacctgctacctcctcgactacgcgtgccacaagccctccgacgaccgcaaggtcacgacggagctcgccggcgccatcatcgagcgcaacaagcgcctcggcctccccgagtaccgcttcctcctcaaggtcatcgtcaactccggcatcggcgagcacacctactccccccgcaacgtcctcgacgcccgcgaggactgccccaccctgcgcgacgccctcgacgagatggacgacttcttcgacgacgccgtcgccgccgtcctcgccagggccgccgtctcgccgcgcgacgtcgacctgctcgtcatcaacgtcggctccttctcgccctcgccgtcgctcgccgacagggtcgtcaggcggttcgggttgcgggacgacgtcatggcgtacaacctctccgggatggggtgcagcgccgggctcgtctccgtcgacctcgcccgcaacgtcatgctcacgcgcccgcgcaccatggcactcgtcctcacctccgagtcgtgcgcccccaactggtacacggggaccgacaagtccatgatgctgggcaactgccccttccggtgcggcggcgccgccgcgctgctcaccaacgacccggcgttccggtcgcgcgccaagatggagctccgctgcctcgtgcgcgcgcacatcggcgcccacgacgacgcccacgccgccgccgtgcaccgcgaggacgccgacggccgcctcggggtcagcctcagcaaggcgctcccgaaggccgccgtgcgcgccttcaccgagaacctccagcgcctggcgccgcgcatcctccccgccggcgagctcgcccgcttcgccgcccgcctcctcctccgcaagcttctccgccgcaaggccgccgccggcgccgccgccaagatcaacttcaagaccggcgtcgaccacttctgtctccaccccggcgggacggcggtgatcgaggcggtgaggaagagcctcgggctggacagctacgacgtggagccggcgaggatggcgttgcaccggtgggggaacacgttggcgagcagcctctggtacgtgctgtcctacatggaggcgaagcggcggctcaacgccggcgaccgggtgctcatggtgaccttcgggtcggggttcaagtgcaacagcagctactgggtggtgaccaaggacctcgccgacgccggcgcctgggaagattgcatccacgactacccgccggcgaacttggtcaacccttacatggagaagttcggctgggtcaacgaccttcccagccagggtcagggaggcgcatttcccttcttttaattaattattactattactggtagtactgattaatttatactcaatttattattactaccatgaatccgtataatacatatagcagttctgactgtggtttcttagttaattaagccgtcaaaattaagaaactacagtcagaattgactcaactgttaaaacttgaaaacaatcgtcacacaggctgtgtgtaagggactgtatgtacggtgtttatacggtatttttttgtggttttatgtgttatt

SEQ ID NO: 9863 - DNA, 1389 bp, Oryza sativa
  ref <308>: DATABASE ACCESSION NUMBER: AK107211
  ref <309>: DATABASE ENTRY DATE: 2002-08-28
agctcagctcactcatcggtagcagtgtgtactctagctcgctcgatcttggccatggtggtgctcgcgaagccggcggcgctggagcagatctcgctggtgaggtcgccgtcggtggaggataacttcggcgccgggttgccggtggtggacctggccgcggacggcgcggcgggcgaggtggtgcgggcgtgcgagaggtttgggttcttcaaggtggtgagccatggcgtcggggagggcgtggtgggtaggctggaggcggaggccgtccggttcttcgcgtcgccgcaggcggcgaaggacgcgcacggccccgcgtcgccgttcgggtacgggagcaagcgcatcggccgcaatggcgacatggggtggctcgagtacctcctccaggtcgccctccaccacgacgccgacgccggcgaccaccagtgggtcaccgtccctcccgaccccgcctccttcctcgtcatcgtcggcgactcgctgcaggtgatgacgaacgggaggatgaggagcgtccggcacagggtggtggccaacaagctcaagtcgagggtgtcaatgatctacttcggagggccgccattggagcagaggatcgcgccgctgcggcagctgctggtggccggcgtcggcaacggcgaggaggaggagcagagccggtacgaggagttcacgtggggggagtacaagaaggctgcctacctctcccgcctcagcgacaaccgcctggcccccttccaccggcagccaccacctgtcgctaacccactcgcctaagctaagttaagggtgtaagtggttaaaccgtgaaactcacttatagataaaagtaagtttcgaacccacttactttaacctattagtgggtttgcggcttacccacttacaccctaaagctgagctaggctcctcgcttacacagatcgacactgcattgagaatgacgacgaattaagctactgatcaacctaacaccaatcgatgattgatcgtccatcgattcgatccagccatgatccgtgcaacaaggggactggggccagcatggtagctagataagggtaaggagggtagggcatatgtggggccatggatgcaacttttaattctactatagctcaaatagagacaacatgcttattatctatgcatatgcagctccaatcaattggataatctgctagatcctctttccttttggatgattgattgccaaaatgtacagttgtcatcactacatgatgtacagtgtagggtttgtcaccaaccagtgctagctagctagctaagctagtaaagccaaaaagcttgttgttgggtgtgtgaaactatgcaagtttgtgggttgtatttttactcatgtattgatttgactttgtgtgt

SEQ ID NO: 9864 - DNA, 2103 bp, Oryza sativa
  ref <308>: DATABASE ACCESSION NUMBER: AK107212
  ref <309>: DATABASE ENTRY DATE: 2002-08-28
ttaagtttttcaaaaaaatactgtttcttgagcactttttggtgcttgcaatgtttatttgtggtttattgatttgctttgtctgcttccgcctcaaagctgatggagagttgtcggctctctctgcttatgagggtgaagcttaggatgctaatgttcgtagcagtcgctacgtcattagcttcaaccgttttagctgcatttaccttttattacttgattgaaatcgaagcatctgttttcgcgtgtttgagtgtgggaattaggatttctgtttatgtttcatatgctttcagtggtgcattctgtttttttatatattattatttgtttaggaatgtagtctactcatatgctttctgtggtgcattctatattttttatatattattatttgtttaggactgtagtctactcagattaaaggggtgggtacttcgggaatgaagaatagagggtgtgtacttcgggagcagtatgaagtatgtgacgtgtgggggtctaatgtacttgtggtgacttcgggggaagtatgaagtatgtgacgtgtggggtctaatgtacttgtggtgtacttctactaatgtacttgtggtggtgtaatgtacgaatgatgtatgaatgacttactatgaatgaagaacgggccggcaatctacggcgatggagctcggatccacccgcgtcgggagaatgaaaaggcggcagtacggtggtgagggagaatcatcggcgacgtgcgacacttcgagaggatcctggggaaaatgcacgagatatcctcccgctcgataatgccatcctcatgtcggtgctcttcctgtgatggcatgacgccatgcggtcgcagctagtggggcactctgagctagtcgagttcacccccgacacccagctggagaagctcgagtacccagtggagcggctggtgaggcatcttctccctcgttgttgaccactgcacaaaccgaatgagaggcgagcttgtcagtcgcttcctcaccggcgctgagcagtccaccgttgagcacctctacgtccacctgcgcagcagttcggtgagggacagggtcaccttctacttccactatttgaacctgctccttcgagcctcatgcttcacgggatcaacttctctgcccgatttttctggtgggtctccccgcccttcgcccacctcgcggtgctccacctcaactctgtccgcatcacgttcgatgtgttccatggcatggcctccttgtgctggcctgctctccgcgagagtgtgccctttgtaggtttgttccgttaacctttcgtttgcccacaagatggatggttatcttcaaatcgatctagatcagcctgatggctggttttgatctagttatcttcaaatcgatctaaatcagcttcgtggctggtttttatctttaaatcggctccgctagctggtttagttttacaaaacctatcttgattggcttttggctagatcgagatggttgacaactccatatcaccgcaaggcgtttaggtatcctgattgtgattgtcttcttaaaaaaaggttgttgctaacactacctgttctctatggcatcagtagtaagctcaccatcctggaatcctagtggtgcatgcatttcctccttttttttttttttcggtgtgagccacggcacattggtaacatgcctagtgagtagtgatcttaagaccagaacaaaacaaaatatgaaatttcactcaattcttaccacttcacatatacaactcataaaattaagcacacaaagtaagaaagcatggataaatatcataattgtcgttttacttttctttattacaagaaaatgaagaggataaattacactatgcatctccacaaagaaattatagtttctctttatagattaattgttttgcacccatggccattgcaccaggacacttgcatgtactacctatactccccctgtcacaaatgctttgtgatttgggctccaaactccaacttgtaactctaaacttcaactctagtgagagctatctcctattagagttggaaactcgttaaaagtgtttggctatattttcagctctagatctgaaaaaaat

SEQ ID NO: 9865 - DNA, 1375 bp, Oryza sativa
  ref <308>: DATABASE ACCESSION NUMBER: AK107213
  ref <309>: DATABASE ENTRY DATE: 2002-08-28
atagtagtggccaaggttggtgacgatgatggtggcatgtgatcccccagatcttcagtgacccagagaggaggggacggcgcgtggtgagctacaaggcatactcagtggagggcaagatcaaggcctcccgtccgtaggggactccgctgcatcaaggccaactgctccgaactgatcaatttctggtgcagacaggtgcttgcggtcaggttaaagaagttggcaaaaatgcttctgaagaaaggttaattgttgtttcatctcaggagattccagatgatccagtgtctccaacaattgaggcgcttattttgctccatagtaaagcaagtacacttgcagagaaccaccagttgacaacacggcttgttgtaccatcaaacaaagttggttgtattcttggggaaggtggaaaggtaattactgaaatgagaagacggactggggctgaaatccgagtctactcaaaagcagataaacctaagtacctgtcttttgatgaggagcttgtgcaggttgctgggcttccagctattgaaagaggagccctgacagagattgcttcgaggctttgaactaggacactcagagatggaagttcttccaataatccgacaccttttgcccctgttgatggtcctcctgttgatatcttgcctaacaaggaattcatgctatatggacgatctgctaatagtcccccatatggagggcctgctaatgatccaccatatggaagacctgccattgatccaccatatggaagaccaatatccacaatatggaagacctgccaatgatccaccatatagaagacctgtcaatgatacatcatattgagggttggacaatgatgggcctcgtgatcaggcccggtcctgaggggggtcgaatggggcgatcgctccgggcccccgattcccagggcccccacctatctgtgcaacgagtagtagcgatcttccagcgcgcaacgtgaggcgatgtttctccgtgatttcgccggcctgcaactgcgagatcgcgagtataacgatcagccgatcgatctcatctgccgactgccatgctgatgccacacgcaagcgcagcatatcagccttatcttggttgatcggcatgctggacgagcacatctgttgtcgcatcaactgctgactgctatatatgtgctggtgctgaatcgatcgattgtcgtcgcggaagtgaagaacaaccacggcactgctgcctgctgggctctagccgccatcagtaagtacgctatactgcctatctagatctagatcgagattacatagtggaattatctgtttataacaaaattacaaggtatcaattgataatttaaggttataaccgtacaaacttc

SEQ ID NO: 9866 - DNA, 1411 bp, Oryza sativa
  ref <308>: DATABASE ACCESSION NUMBER: AK107214
  ref <309>: DATABASE ENTRY DATE: 2002-08-28
atacctttctcggccttttggctaagatcaagtgtagtatctgttcttatcagtttaatatctgatatgtgggccatgtgttcacttcgatattaaatttattttttgtgggggagggtccaccacagtggcttgccactggggccctcgcgtgtcgcccaggcgttgcactaccgcccgggcctggcgcaccccaaaaacaaaccaaagtggtttactctctctagtagctagttttcctctgctgctgaacaggctggagttcatcaaggatcacatcctgaagctggagccaacaagcacacagaggtggaagaagagcaagaagaccggctccgagccgatacaaggtaggagcgagcagcgttagtgcaacactgtcatcatatactagggtaatcaatatggtgacagtgagagaagagatacgcaaagggccatggacagagcaggaggacctgcaactggtatgcactgtccgattgttcggtgaacgtcgttgggatttcattgccaaagtatcaggccttaatcgcacaggcaagagctgccgcctccggtgggtcaactacctccaccctggcctcaagcgtgggcgcatgtctccgcatgaagagcgcctcatccttgagctccatgctcggtggggaaacaggtggtccaggatagcaaggcgtctgccaggacgtactgacaatgagatcaagaactactggaggacacatatgaggaagaaagcacaggagaggaagagtaacatgtcaccctcatcatcctcgtcttcactgacataccaatcttgccacccagagaccccgtcaatgatcattggaattgaggagcaggaacttcatggcggcagtggctgcatcacaagcatcatgaaaagcacccctgttgacatggatggttatcccatggatcagatatggatggaaattgaggcaccaaatgtgctcccagggccatgttttgatgaagcagaggatagtgcatccaatagcctatctggtcctctattgccatatcctatgtgggattactattgcccagaaacatgcttgaggatggatgatgagatcaaggtagcaccacaatttggttatggtaaaggggtgggcccatgttattgaagcaatatattggactaggttacccaagttaattatccacctagcagaagtgaagtgcttttgtagaagaatcattagcatggatctaaatatttacagctatgtaacattgcaagtgtgctcatgtttcatgtatctagctagtgtgcaagatagcttttgccacttggtccttgatgtatgcaatgcaagtgggcaaggcactctgtattcacaatacaaccagctatctccttagcgacttttctatcaatcaagtttaatataatattgttatt

SEQ ID NO: 9867 - DNA, 718 bp, Oryza sativa
  ref <308>: DATABASE ACCESSION NUMBER: AK107215
  ref <309>: DATABASE ENTRY DATE: 2002-08-28
actcatgctaaaagttttgtgtccattcttgaatcactatcactttagtcttagtagctacatatataaaaccactcattgaggattgagaataattaaaattttctgcaacaacaatagaaagaaaatggctttcatcaaggtagtgttctcggtgttgctcccggtagttgtctccatgctcgtggcaacgacgacaatggcggatcaccgtggccaggtggtttatacccccgggcagctatgcgctgccggacggggctacccgatgtacccgctgccccgctgccgggcgctggcgaagcgccagtgcgccggcggtgccgtggacgagcaagtccggcaagactgctgccggcagctcgccgccatcgacgacagcttctgtaggtgccccgcgctgagccacatgttggttggaatgtacaaggagctcggtgcacccgctaaagggcaacccatggacgaggtgttccctggctgccggagaggcgacatgaaacgcgtggcggcgagcctcccggcgttttgcaatgtagacattcccattggcattggtggtgtttgctactggctgagttatcctatgaaccccgcgactggccactaagaaatagctaccttgtgtgtcttgtgtggtacctatataattagtgtttccttttgcttggaaacatatatatgtggtgaataaatgatgaactctgatagtcttatg

SEQ ID NO: 9868 - DNA, 1094 bp, Oryza sativa
  ref <308>: DATABASE ACCESSION NUMBER: AK107216
  ref <309>: DATABASE ENTRY DATE: 2002-08-28
accatcaccagcctgtctactatcatcggctcgcacggtcgccacacattccgatcatgccgcccggacagatgctcgagccctcggagcccgaggccgagttcacgctcgcttgccttcaaaacggccttcgcatcgatggacgatccttccttgccgcgcgtccggtcgacatcacctttggcgaagagctcggcaacgtcaccgtggccatcaaaggtacgcgcgtatccacatccgtcagagcgacgctcatgcctccgcgctccgatcgaccgtatgagggcttcttgcagatcaccaccgacatctcgcccatggccggtgtcgagtacgactcgacaggcggaggagccaactcgtctgcgcgcgcacgcgaggtgctctttgaccgtctcatcgaaaaagccgtccgtcgcacggaagccgtggatcgcgaagctctctgcgtggtggcaggagaacaggtgtggaacgtccacctgaccgttcatcttttgtcggacacgggcgcggccttggatgcagccgtgctcagctcgatgctgtcgcttcgacacttccgcagaccggactattccatcgagaatggcaaccaagtgcgtctctacagcgccgacgagcgtgtgcctgtcccacttgccatccatcacacaccgctgtgcgtcacgttttcgatcttcaactgccttccaccagatctgcccagcccgagaagaatgacgacgacgatctgatcgacccgacatcgtccacaccagcacaaacggccgacagcggctcggtggcactgctggatccgagcctgctcgaggagactctggcgcattccaaactgacactggtgctcaatgcgcagcgcgaaatctgcgtgctcgacaagtcgtacggcagccccatcaacccgcacacgctgctcgagctcatcaacgtcggcctcaaccgcatcgacgtgctcacagaaaccctcgaaaccgcactcaaaaacgacgctgctactcgcatcatcgaagtcatttgacctccctcacacacactctctcgcacttgtatttgtaccacactcacatcaatccctcacaatctaccaacac

SEQ ID NO: 9869 - DNA, 1513 bp, Oryza sativa
  ref <308>: DATABASE ACCESSION NUMBER: AK107217
  ref <309>: DATABASE ENTRY DATE: 2002-08-28
ctccccctccccggccgctgcctgcctcggcagcccatgtgctcacatgccactccgcctcgccactctcttcccccctcctcctctcctagcctagcctagccactgctcgctcgcttgctcacttgctctgttgctcaccaccaccaccaccaccacacggcgggatgaaggagggcggcggcgatggagggttcgtgcgggcagaccagatcgacctcaagagcctggacgagcagctggagcgccacctgagccgcgcgtggaccatggagaagcgcaaggaggaggcggccgccgaccagcgtggcagcaagccgcccgcgctcgccgccgcgcactactcgcagaaccgcaggcagcggagggaggagtgggagatcgaccccgccaagctcgtcgtcaggggggtcatcgcccgcggcaccttcggcaccgtccaccgcggcgtctacgacggccacgacgtcgcagtgaaattacttgactggggagaggatgggcataggtccgaacaagacatcgcagcactaagagcagctttttcacaagaggtctctgtctggcataagctggaccatccaaatgttacaaagtttataggggctataatgggcgccagggatctagatattcaaacagaaagcggacatcttgccatgccaagtaatatctgctgtgttgttgtggagtaccttgctgggggttcactaaaaggatttctgataaagaataggagaaagaagttagcttttaaagttgtggttcagatagctcttgaccttgccagggggttaagttatcttcactcaaagaagatcgtgcaccgtgatgtaaagactgaaaatatgcttcttgacaagacaagaactgtgaaaattgctgattttggtgttgctcggcttgaggcttcaaatcccagtgatatgacaggggaaacagacacccttggttacatggctcctgaggttctcaacggcagtccatacaacaggaaatgcgatgtttatagctttgggatttgtttatgggagatatactgctgtgatatgccatatccagatttgagcttctcagaggtcacgtctgctgttgttcgtcagaatttaaggcctgagatgccacgctgctgtccaagttctctggcaaacgtgatgaaacgctgctgggatgcgaaccctgacaagcgacctgagatggccgaggtggtgtctatgttggaggcgatcgatacttcgaagggtggaggcatgatccctgtagatcagcgacaaggatgcctttcatgcttcaggcagtacaggggtccgtgacggatggagcacgctggagttgtatctgcagattgacggctacatctcgtgtaattcgattacatttgttttaaggtacgtaagcaaactggttatggagctagcatgcttaagacctttggtttgtgtagccctctgatgtaaattccctgttcatcccttctgtttatcaatgaagaaccagctcggctcgttcatcc

SEQ ID NO: 9870 - DNA, 1561 bp, Oryza sativa
  ref <308>: DATABASE ACCESSION NUMBER: AK107218
  ref <309>: DATABASE ENTRY DATE: 2002-08-28
atatcaaattctacgcacaaactgtagtgcaccagaattttgctaccaatggagctcccaagaatggccagtcgtcgtcttcctctgccactagtagctcaactcgttgtcttgctcggcttggcttgcgggctccggtcgtcgtcggcggcggcggcggcggcgagtggccttgccggtgaacgggttacatatctgcccgggcagccgccggtggacttcgacatgtactccggctacgtcacggtggacaagcgggcggggcggtcgctgttctactggctgcaggaggcgccggcggcggcgcagccggcgccgctcgtgctgtggctgaacggcgggcccggctgctcctccgtcgcgtacggcgcgtcggaggagctcggcgccttccgcatccgccccgacggcgccaccctcttcctcaacgactaccggtggaacaaagtggcgaacatcttgttcttggactcgccggccggcgtcggattctcatacaccaacaccacctccgacctctacgattccggagacaagagaactgctcatgattcctataagtttctggtgaaatggttcgagaagttcccgcagtataaataccgagatttctacatcgccggggagagctacgtagggcactatgttcctcagttgtcccagcttgtgtaccgtaacaacaaaggcgtcaaggagcccctgatcaacttcaaaggcttcatggtggggaacgccgtgacggacgactaccacgactacatcggcacgttcgagtactggtggaaccacgggatcatctccgacggcacgtaccggctgctgaacgcgtcgtgcgtgcacgactccggcgagcacccggcaccggcgtgcctcgccgcgctcaacgcctccacggtggagcagggcgacatcgacatgtacagcctctacacgcccacctgcaacgagacctccacctcgtcggcggcggcgaggcagcggcggctcaagcaaggccactatccgtggatgacagggtcgtatgatccgtgcacggagagatactcaacggagtactacaaccggccggaagtgcagagggcgctccacgccaacgtcactggcataaactacacatgggcgacgtgcagtgacatcctcaacgacaactggagagattcgccaaggtccgtgcttcctatctaccatgagcttattgcagctggcctaagaatatgggtcttcagggacatgctgcacgttcttcagctgcacggtctttcccgaagtaaacttcagatcgaccgtaccaacaccatgaacagccgcaagcgacccgtttcccatcaacaaggaggaacctctcccgacctgataagaagaaaatagagaaatgtcagcacatacatgaatattagcaccagtgtccacccaccaatcaggtgaatgaaaaacagagagaactgtaggtaatattttaccgtaccccgatgttcctccgccctcgctaatgatcatgttggcagacttcctgtctttgcgctcaggacagtccttggcccaatgcccagacttgccacac

SEQ ID NO: 9871 - DNA, 1335 bp, Oryza sativa
  ref <308>: DATABASE ACCESSION NUMBER: AK107219
  ref <309>: DATABASE ENTRY DATE: 2002-08-28
gaattcctcacctcacctcacctccaggcggcggcgaaaccaccagccgcttcgcttcgcctcgattccaaccctagccctacccctatccgaatcccatgcagacggaggcgcgggtcggggtcgtcgtcgacggcggccgcgccgccatgggccgccgccacatcggcaccgtcgcccacctcgccgccgggggcttcgccggcgccgtcagcaagacctgcaccgccccactcgcccgcctcaccatcctcttccaggtggcaggtatgcattcagatgtggcagctctaaagaagtacagcatatggcatgaagcttcacgaatagttcgagaagaaggatttggagcattttggaaaggcaatctggtgacaattgtgcatcgtttaccttattctgccatcagcttttattcatatgagcgctacaaaaaatttctccaaagggttcctggccttgatgaagactcaaattatgttggtgttgctcgtttacttagtggcggtttggcaggaattactgctgcatctgtaacttatcccttggatgttgtccgtactcgtttggcaacacagaaaacaaccaggtattacaaaggcatctttcatgcagtgtctaccatttgtagagatgagggtgtcaaaggattgtacaagggccttggggccacattattgggagtcggacctagcatagcaatcagctttactgtatatgaatcattgaggtctcattggcaaatggaaaggccccaagattcccctgcagttgttagtttgttttctgggagtctatctggtattgcatcatctactgccacatttccccttgatcttgtaaagagacgaatgcaactgcaaggggcagctgggacatcgtcagtctgtaaatcaagcataactggaaccatccgccaaatctttcagaaggaaggccttcgtggcttctacagagggatagtccctgagtacctgaaggttgttcctagtgtagggattgccttcatgacctatgagaccctgaagagcttgctctccagcatagacgaagacgacgagagctgagatctttacaaaatggctacacgcttcaaagagatttctggcaatgagttactgtgagactgaactgtatcagagtgactacaggccagacagttttgtaggtgttgataggataaagctttacctgatatgtgtcttgtgttgtaccatataggtcaagaagagcaaatgagtattccatccgtgtacacctctgagcattatgctcaaattttgtgtcgtaagatgtaacgccccttgcaaggatgggaaaagaaactctcaaggt

SEQ ID NO: 9872 - DNA, 2363 bp, Oryza sativa
  ref <308>: DATABASE ACCESSION NUMBER: AK107220
  ref <309>: DATABASE ENTRY DATE: 2002-08-28
gtattcgccggtgttacatgctgcggtgcgccggtgatggatgccagcatgcgcgtgagccccggcagtgcggtttgcggtgctcaaaaagaacgtggcaccctcttgcggtgcgctgctggaccttgtccagacgtcctgcctctcgcacttgattgattacctatctgcgttgcgctattgacaccgtgccccccttgcctacattgctagcctggtgacgaaagcctgtttcacaccatggattctcccgccgacgacccttatgggcgccgtccgcacgcttcgtggcagactatcaggtctaccaacacctggtcgtctaacgatacatactcgatgatggacaacaggccgatctctgacttggaacgggcgaggctgaggccgttgtcgacggaggaatttccttggatctcgagagaggtcgatactgacaacccgtcattcgcacctatccgtgctgcctcaacacgaaaacctccagcttggttccaagaggccagagaagagggctcgagtacggagctttcgcgaggaaattcaacccgatctcacaacacagctcgtgagagtattgtcgatctcgcatatctagtctctgatcttgatttctacgctggcgctgtccacgatttcgggcacgatgccctcagcccagactcttggactgctcaagatgaacaagactggccattaccagaggacgccgatggagccacattcggccaaatctccatcctacgcaacaagtccaatgcaaagtcgatgggacgcaaaccatcaacaagatcgagacgatccgagaaagacacatccttggtgacgtgggacggacctggcgatcctacgaacccgaagaactggagccgacagaggaagtgggcagctaccatcaccgtatcgcttttcacattcatctcgccagtctcgagttcaatgatcgcgcctgcgctgtttgacatcgccacggagtttggagaagatccaggttcaagcactattcccctcgcgttgtcggtcttcgtgttgggttttgctatcggaccgctgttcattggacccatgtctgagctctttggcagacgtatcgtactgcaaatcagcaatctgttttactttgcgttcaacttgggctgcggcttcgcacaaaatactcctcagcttatcgctttccgctttctgtccggcttaggtggcagtgcgcccttgggcattggtggcggcgttctcggagatctctggatgccacaagagcgtggtcgagccatggctctctactcgctcatgcccttgctagggcctgccattggacccatcgctggaggcttcatcgccgagtacagtgactggcgctgggtcttctactcgacatgtattgctgcaattgtcatccagatcatgggcttcttcttcttgcaggagacgtacgcagctgagatccttcgtgtcaagaaagtagcgctgatcaaggcgactggcgactcaacactacacaccgagttcgagacgcccaaccgtaaactcagcaaacatctgggtgcagcgttcgaacgaccattccgcttgctcttcacacagcctatcgttcagatccttgcgttgtacattggatatgtctacggagtcatgtacctcgtgctggcatccttccccatgctctggcgcaaccagtatggcatcaggcgaccaagcatcagcggtctcaactatatctctcttggtatcggcttcttcatcggcacccagatcgctgcgttctctgcagacaagatttacaagggcctcaaggctaagcacgggggtgtcggacgaagcgagttccgtgtgcctctcatggtccccggatctttactcgtccctatcgggctcttcatctacggatggactgcacaagaacacacgcactggatcggaccaaacatcggcgccgccatcttcgccgccggcaaccaaatggtcttccagtgctgccaaacatacatcgtcgacgcctacacccgctacgccgcatctgcaatcgcggctacgacagtgctcagaagtttgggtggcttcgctttcccgctgtttgcctccgcaatgtacagaggtcttgggtacggatggggcaatagcgtgctcgggttcgtgggactggcgatcggattcccggcgccgattctattgtggtggtatggtgagaagctgcgcaagaagagtcagtttgcggctggttaggcgtgcttatttaatcgatgagatgagatttgggggccgcgattacgagagacgacctttatttgtaaatatgattcgtggacaatctcgtttcgatatttttagcgctgtgaatagtaatcttttttggttgctcaactttt

SEQ ID NO: 9873 - DNA, 1658 bp, Oryza sativa
  ref <308>: DATABASE ACCESSION NUMBER: AK107221
  ref <309>: DATABASE ENTRY DATE: 2002-08-28
cgctaccaaccccacatcgaccatcctgccttgtacgtcatccccgccctcactaacggatcagtgcctgggcgttacgacctccacctattacactcgaatgccgagagctggatcagcaaacggggcttgccacgtccacattcaatgtctcacggcgaccacagttttgccaaggtcatcactgttggaggagaagctggcaccataggctgggttgacctctggaagggcatcctcttctgtgacgtgctcaaggacaacccagtgttcctctatgtctcgctcccaccccccctcatggcaaccaggaagctgcgaggctgcccaagaaatactcgtgacgttagtgtcatcaaaggtcttatcaggtatgttgagctgcagattcacatcaagccaggctcgtttacccgaggcaactacatttccaatggctggacagttgccacatggagcaggatcagctctaatccttttgaggattggcaccagaactgtaaacttgatgcttctcaggtctcttttgaaaataacccagtgcattatgaaaagctgcctgagctgctagacgaccaaggcatacctcagctaaccatggtgcggctccacacaggtcatcctgttctcagcatgcacgaccatgacattgtttacctcatgactaaggtcaactacttagatgacaaagcatgggttcttgccattgacatgaggaacagcacattacaaggtgttgctgaattcaatgcggaaagagtgatcgccttaaggtacgcctttacgcaaagtgggatctctgaatatctgaacatgcttccaggtataaagggaaaccgaaaaagataaaggatgttgttgctggaaccctcttgcaaggaggagtgtaaaatccgcatggtacataatatggtggatggtatgaatgttgattaatggataaggtaaaggtctgaaggctgggatgaaggcaagtttgctctcctcaatgttcgtatcaagaaagagagctaaagctcgcaagcagctcccctcgtatgctgtatccatcactgcctaccatgctggcttgctgcttggagccgccttcctcacctcttgcctcgtgtccttgtctgcaccttggtcagattttgtcagcgccagagcttggaggagccgccttccttgccacatggaactgcctgcgttgtatccttgtctatgctcggagtgggagagttcacttgaacctgcgctggagctctgaggaggtggatcttgccattcgctcccgttggggcttactggtcactgcgtgagaatacatgaaggtccaggctctagtttggggcaattaatctggatagatatggtccagactccagatggataaggtagactattaggtgcgggattatgttagtgttctgagtaggcattcttgctaatgtgggaattgtagctgtacgacatggaaaatgtagtcccaaatgtatgggaattttgcatcattttcaataagttatgaatgagtgagattcagtgaggtactttttcccttcagttgaatctgtattactgctttgagaagatgttctctagaagcatagtgtaatcttgtcaaaatatcgagtctgggatttttaggcagttgtaaaatatgattgcatcctcac

SEQ ID NO: 9874 - DNA, 1578 bp, Oryza sativa
  ref <308>: DATABASE ACCESSION NUMBER: AK107222
  ref <309>: DATABASE ENTRY DATE: 2002-08-28
atacctctgcatcccaacctacttgtgacagacagcgagcggatatgatttctcgactgctttcgcgctcgacgctgtcgcgcggtgtacgcggctttgcgtccagctcgtcggcgctcgatgcgtcggcgaagctcaacaagcctgcgcgctttgccacgcccatcgcagcgtccgatattcccaagggctttgtggtctcgtcgacctacgcgggcatcaaggcggccatctcgcccaagcccgcggacggtgctgcggcggcggcgtcgaatccgaaccccaagcccgatttggcgctcatcgtgtccacggtgcccgcggcggcggcggggacgtttacgcgcaacgtattcaaggccgcgcccgtggtggtgtcgaacgaggtgctggtcgagggcgccaaggctgcgtcgggcgcgcgcgtgcagtcggtgctggtcaactccgggtgtgccaacgcggtgacgggcacacagggcatgcaggatgcactggcgtgtgtcgagctggtcaagaagaacctcgcgccgcacccggggcttgcacagtcggcagagggcagggagacgttgctgctgtcgacgggcgtgattggtgtaccgcttcccatgccggcgatcaagcggtgcatcccgcaccttgcgaatggcatgatcctgcgcagcgatcccgagtcgtggcgcgagacggcccgcgccttcatgaccaccgacaccttccccaagctgcgcgccaagacgttcaagctcggcgataccgagtgccgcatgattggcatcgacaagggtgccggcatgatccaccctgccatgacggcgcccggtggcggtctgcacgccactatgctgggtctgattgcgacggatgcagccatcgcgccagcagcgctgcagactgcgctcaaccgcgccgtcgcgcgatcgttcaactgcatctcggtcgacggcgacatgtcgaccaacgacacgatcctcctgctcgccaacggtcaagctaccgcgcgacgcaccgccgagctcgatgaatccagcgcgcactttgacgcctttgtcgccgaactcaccgcgttctgccaggagctctcgcagctcatcgtgcgcgacggcgaaggtgccgaaaagtttgtcgagatcagctgcacgaatgcgccgagctttgatgttgcgcacggcctgctctcgcgactcgtcacgtcgatgctcttcaagtgcgccatccacggcgaagacgccaactggggccgcatcctcgcgtcggtgggtggagccgaccccacgctgacggcgcacatcgacccgtccaaggtgtcggtgagctttgtcgaccctgttggccaattgcctgccatcacggtgctcagcaacggcaatccagccaaggtggacgaggccgagatcaacaagctgctccaaaaggaagacgtcaagattgtcattgacctccagaacggcgccgagcagtgcacgtactggacgtgtgacctgagccgcgaatacatcgacatcaacgccgactaccgctcgtagccacccctcgcacacactgccacaccaaaattgcaaacactttcacacg

SEQ ID NO: 9875 - DNA, 1376 bp, Oryza sativa
  ref <308>: DATABASE ACCESSION NUMBER: AK107223
  ref <309>: DATABASE ENTRY DATE: 2002-08-28
tgggtaggtctgaaatcagatgtggctaactttgttaagcagtgtcagatttgtcagcaggccaagtctgaacactgcaagctccctggcttgttaacaccattaccaattcctaaggaagcctgggtggacatatcaatggattttatcgaaggtcttcccaagtctgatggattcactgtcattcttgtggtagtggatagattcactaagtttgcccattttattcccttgcgtcatccatttactgcttcccaagtggccaatgcagttgacaaaacagttttcaagacacatggcatccctcattctatctcagatcgggataaaattttcaccagccgattttggagtgatttgttcaaagtgtgggacactactctgagtatgagcttcgcttatcatcctcaaacggacggctagaccgagcgtgttaatcaatgtcttgaaatgtacttgcgttgtatgactcaagcaacaccaactaagtggaacaaatggctgcacttggcagagtactggtacaatacctcttttcacactgcattgggttgttctcctcataaagctttgtttggagctgatcctcatgtcagtcaagtgctagtacttctctcctcggtccatcagtcagtggttgatcttgtttctgaacgcaatcagctatctgctttcttacaacaacaactgcaacgggctcagttgcgcatgaagcatcaagcagacaaaggccggtctgaacgatcctttgcagttggggatcatgtgtttctgaagttgcagccatatactcaatcttcggtggtgaatcgtccataccccaaactagctttcaagttctttggcccatttgaaattctggagaaaattggtcagtcggcttatcggttacagttaccagactcaagtttgattcatcccgtctttcatgtctctcagttgaaagcacatgttcctgatcatacaccggtctttacttctcttcctcaccctgtggttttggatgccgctgacgtttggcctgaagaaatactcgaacgtcggcttgtgaaaaagggcaatgcaacacatgttcaggtgttgattaagtggtcttctttaccggcgcatcaggctacctgggaggattatgaagtgctcaagacccgctttccatcagcaccagcttggggacaagctgtttctccggcgggcggtactgtcacgcctgtgccacacgcgtgacgagctacaacgccaggatgacgtttacagtaacgtgtcgggtaggtgtgtgcgcatgtgtgttgtgtgattcggccaagcggccaggatggcatgtatgacctttataagtaaggaaccctgtaatgagagaggtgtgaaatgaagaaagg

SEQ ID NO: 9876 - DNA, 1141 bp, Oryza sativa
  ref <308>: DATABASE ACCESSION NUMBER: AK107224
  ref <309>: DATABASE ENTRY DATE: 2002-08-28
atcacccgcgctcactttactcccgctccgaccaagccaaccaacgcgacgtcgcagccagagcgcgaaggaatccgcaccgggcgcgcggcgcgccaccgctttgatcactctcgtcgcgcgcggggcggccatgtcaggcggcgtagggccgacgtgcgggggcggcatcacgctgccgtcgacgggcgcgccgctccccccgctgcacccgacgccgacgtcgccgacggcgcggcctcaccaccactactacctcttctccatcaagcagctcaactcgttcggcgccgcggccgtgctcgccttctccaccaccgtgccactctccgacatcgccttcgccctcctcgtcatcccttacctcgtcgtcctctccgtcctcgccttcccgcagaggcccggcaagcccaacccgggcgcgccggtcttcctcggccgcggccgcttcctcctcagggcccacgacgcgctcggcttcctcgtcggcgccgcgctcccggcgctctacatcctcgacggcctccgctcgggcgacacggcgggcgtcgccgcggcgtccccgcacgcgttcctcctcgccgcgcagatctttaccgagggcctcgccgcggcgtggcccgggaggttctccctccccgtgcgtgccgccgtggtggtgatgtacggcgcgcggaggatgttcgcggcgtcggagtggctccgccaggagatggagaagcgggaccagttcggcggcggcgtcggcggcgcgcccgccgtggcgcgccgcagggtggtggcggggagggtgctggcggtggcgaacctcgcctactgggggatcaacctcttcgccttcctgctgccgttctacctgcccaaggcgttcaacaggtactactgcggcagcgacagcaaggaggacgacgccaccgccgccgccggcgccattgacgccgacgacgccaagaagaaggattcctagagtgtgtttgatcgttcgtcgctgctttctcactcgcgtttgtgcagcttggtgtattagctcttcttcttaattttttttttcttttgaaaaattcacgcatgtattagctcttttttttctcgaaaatttcacgcatgtattagctcaacttgcgtttcgtttggtgaagac

SEQ ID NO: 9877 - DNA, 1297 bp, Oryza sativa
  ref <308>: DATABASE ACCESSION NUMBER: AK107225
  ref <309>: DATABASE ENTRY DATE: 2002-08-28
aacaacaactaagttgttggatagtaaaacctagctttgctatagcaacaacaacaacaacaaaaaatctctctcacatggtggggatgcgtggagcttatggctacaatgacaacggcaacgagggtggcgtagtagttggagggggggaggcggaggcggagatcgcggcgatggcggtgctacacaaggtggcggcgccgccggcgcagagcacggcgagcaagctgaaggcgagggtgaaggagaccttcttccccgacgacccgttccgcgggttcaaggggaagccgctgacgaccaagtgggtcatggcggtgcagtacctgttcccgatcctcgactgggtgcccagctactccttctccctcttcaaatccgacctcgtcgccggcctcaccatcgccagcctcgccatccctcagggcattagctacgcgaagctggcgagcttgcctccgatcatcggcctctattcgagctttgtgccgccgatggtgtacgcggtgctggggagctcgagggacctggcggtggggccggtgtcgatcgcgtcgctgataatggggtccatggtgcggcaggcggtgagccccgccgccgagccgctgctcttcctccagctcgccttcacctccaccttcttcgccggcctcgtccaggcctccctcggcatcctccggctggggttcatcatcgatttcctgtcgaaggcgacgcttgtcgggttcatggccggcgcggcgatcatcgtgtcgctgcagcagctcaaggcgctgctcggcatcgtccacttcaccaccgagatgggcctcgtccccgtcatggcctccgtcatccaccacaccaaggagtggtcgtggcagacgatcctgatggccgtgtgcttcctggtgctcctgctcacggcgaggcatgtggggctatattagcggcggttttggcgtttctcttggacatgtttcgattcgcttcgtctgtagtacgcaggatatatatatagcttcgtatatatgttgtcgctatcgataatcatgcagccgggtgaagtcaggcatgaaatgatgcatatatatggccgacgatccatcctttggaaggatgtgcgtgcctttcttgatcaatttggtcacggacatggatctctctctgcaggttgttgcatgcatgtatgggtccatgtctagctagtctttttattttgacagtccaagctaagtacagtattttagtaattaccagcaacttgttgcagtaaaagtaacatgtcaaaagtcattagaaaattactggactt

SEQ ID NO: 9878 - DNA, 1439 bp, Oryza sativa
  ref <308>: DATABASE ACCESSION NUMBER: AK107226
  ref <309>: DATABASE ENTRY DATE: 2002-08-28
actgagctgtggcgttgcgagtgatggcgcggcgaggaggcgcgcttgccgccgccgccgtcgacgtcgtcggcagcgtgctggtggtttgctgcctctgctggtgcgccgtgcagccggcgttggccggtggcgtcggcggcggcggcggcgatggtgggatgaggtgcaagtacaacgccatgttcgtgttcggggactcgctggcggacacggggaacatctgcgtgaacaagtcggcggcggcgacgctgctgctgacgttcgcgcagccgccgtacgggatgacctacttcggccaccccacctgccgctgctccgacggccgcctcgtcgtcgacttcctcgcgcaggagctggggttgccgctgctgccgccgtcgaagcggagcgccggcggcggcgacttccggcgaggcgccaacatggccatcgtcggcgccaccgccctcgacttcgacttcctcaagtccatcggcctcggctacccgatctggaacaacggcgccatgaacgtccagctccagtggttccaccatcttctcccctccatctgcgccacacaaccacagggttgcagagcctacttgtccaagtcactcttcctgttcggctcgctcggcggcaacgactacaacgccatgctgttcttcggcttcaccgtcgatcaggccaggaattacacgcccaagatcgtcgacaccatcatcaccggcgtcgagaagctgattgcgatgggcgcggcggagatcgtggtgccgggggtgatgccggtggggtgcttcccgctctacctgaccatgctccggagcagcaacgagtcggactacgacgagcacggatgcctccggccgctcaacgatctggccatccaccacaacgcgctgctgcaggcgaggctcgccggactccaggccaggtacaggtcggcggcggcggcggcgccggcgccggtgaggatcatgtacgccgactactacaccatggtcgcccagatgctgcacacgccggcgcgcttcgggttcaggagcgggatgacggcgtgctgcggcgccggcggcggggagtacaactacgagttcgaggcgcggtgcgggatgaagggcgcggcggcgtgccgtgacccgtcgaggcacgtgtgctgggacggcgtccacacgacggaggcggcgaaccggctcgtcgccggcggctggctcaggggaccctactgccaccctcccatcctgcaccactagaaccatcgatcaactgcaccacctgccgccgccatggatggatgcatgaaccaaaccaagaaaacactaggcttaattaataatcaatcaattaatcatcatctcttgatccaagtcaagtgtagccgcagaacgaactgcaaatttgcaaaatcgatatggaagaaatgattttaattagtccgtactaattggacactt

SEQ ID NO: 9879 - DNA, 1472 bp, Oryza sativa
  ref <308>: DATABASE ACCESSION NUMBER: AK107227
  ref <309>: DATABASE ENTRY DATE: 2002-08-28
tgaacctcgacctgcttcacggctccgccaaactgctgtgacctgcatgcttcaccgacaactaacctcctgactgttccgcaggcaggtcatctgccctttgccgatccaactcagtgtcggagtcgctcccgaaaccccaccaacgcttcttctcgcatccgtgccgagttcgatttggtgtcccgtgggagcggcgcgcttcctcgcctccgaactcgagttcccacaagcctttactttctccacgacgcttgacgctgagcatcgtgactcgcgaccatcatcaccaccaccatcggaaacaccggcacccgtgcctgttcgcgcaatcaccccgtggcgctcgcttgcagcgtcgtcgagctccttctctcgaaactagtcgcgcacaatctcatgtcctggctcaaggctcggccaccacacaaacattcgggactttctatctcaagcgagaacagtggatccgcaacgcgaaggagcacagcatcaacccctcgcccatctatcaaattcacactgccagcgacgcagcacgtcgcaagccttgcatcgccaacatgaaggaggcacgcgtcgtcattatgggaggcggaggagtcggcaagtcggcgctgaccgtgcagttcgtgcgcaacgtgttcgtgagcacgtacgacccgacgatcgaggacacataccgcaaaatgctcgtcatcgacggccagcagtgcatggtcgaaatcctggacacggcaggcaccgagcagtttctggcgctaaaggagctctacatcaagtccggacagggcttcatcctcgtcttctcgctcacgtcgctagccagcgtcaacgagctcggccccctgcgcgaggcgatcgtacgcatcaaggacaccaccgccatcccgctcgtgctggttggcaacaagtcggatctgcgcgccgatcgtcaggtgcccagagaggtcggcaccagtctttcgaaagcatggggcaacgtccccttctacgaggcgtcggcgcgcaagcgcatcaatgtcgacgagatcttcgccgacgtcgtgcgccagattcgcgcttttcaagccatcaattccagaccaggcacccgaccgggcacctcctcgggcgcctcgggcaagcacggctttggcgccaacggctcttcctcccattccggctccaaggactccaaactcgcaggcagcagctttggcacctcttccaaagcgcgcgatcgcaaaaagtgcgtcatcatgtagcatttgcgcagggcagctcgtctctcggcagacgttgcggcgcggacgagcaacccttggatacccccgctccgcgtagcgagctggaaggaactcgatagatataccccattctcgcggacccttttgttccgccagcttagcggcggctcggcttgcaaatggccgccgatgcacgccttgcttgtgcgcaatgaccgcgcaatcccgcgcatttctgttccg

SEQ ID NO: 9880 - DNA, 1187 bp, Oryza sativa
  ref <308>: DATABASE ACCESSION NUMBER: AK107228
  ref <309>: DATABASE ENTRY DATE: 2002-08-28
aacgcctttctctcccttccatcatctcagcgcttcttacacccaaaaggatccacacgttgttcgcagctgcaagcattctcctagcacccggaagccacaccagaaccgctcactcttcctacacaagcaaccatggctgccaaggacaacaagcccaaggtggcgccgtccacccacctcatcgccggtggtattgccggctttgcggaagcatgcacctgtcatccgctggacacgatcaaggtgcgcatgcagctgtcgcgccggggcaagaaggctggcgaaaagccgcgaggattcatcgctacgggtgcgcacatcatcaagcgcgagacgccgctcggactgtacaagggtctcggagcggtggtggcgggcattgtacccaagatggcgatccgctttatgagttttgagcagtacaaggctgcgctcgccgacaaggacactggcaagacgtcggcacgcggcgtattcctcgccggtctgggcgccggtacgacggaggccgtggcggtggtcaacccgatggaggtggtcaagatccgactgcaagcacagcagcactcgcttgccgatcccctggaagtgccgcgctaccgcaacgctgcacatgcactctacacgatcatccgcgaagagggcttcatgacgctgtaccgcggtgtggcgctcacggcggcgcgtcaggctaccaaccaggccgccaacttcaccgcctaccaggagctcaagggtcttgcacagcgcgtgcacggcacgtcggagctgccctcgtacgaaaccgcgctgatcggcctcatctcgggagcgctcggccccttctccaatgcgcccatcgacacgatcaagacgcgaatccagcgcgcgtccaaggtggagggcgagacggcggtgagccgtgtggtcaaggtggccaaggacatgtttgcacaggagggcgccagtgccttctggaagggcatcacgccgcgtgtggcgcgtgtggctcccggtcaggcggtggtgttcacgatctacgaaaaggtcaagagctacatcgaggctgccaagacgggcgagttcagcctcaacgacacgcgctccgacgagtagatgttgcgcacccgcaccgtgtagcgtcccccaagcccgtcccaatcagcttgccatgctcatctctcgctaattcgaaccccaaaagc

SEQ ID NO: 9881 - DNA, 1666 bp, Oryza sativa
  ref <308>: DATABASE ACCESSION NUMBER: AK107229
  ref <309>: DATABASE ENTRY DATE: 2002-08-28
acttcacgggattcccaagccaaccacttttttacctttcccctttcccggtgcttctctctcccattttccccttttactggtgttgagccgaagcggagaggaggcggcgtcgtcaggctcgtccttgcttcaagcggtggtgacgacggcgccacggatctggagcggcggcggcggcggcggcggcggcgcggatctggagtggagcgacgtgggaggacgacgccaccgccgctcgagatccgcaaccggggcgatggccggcggtgttgtcgacgggttgacgatggcgtcgtcacgggctgacgggagggaggcgcggtcgtcagcggcggcggtgacgtggtcgtggcgtgccccggtggcgactccaccagctgcacgagctcccccggtcggtgcccctcctctccattcatggcggcacccgattactctcccctcaaccctcagtggcaccggcgccaacaccgtctcgcgcgcggagaagcctagaaggccggcggtcgaggagctcccccggcgacgcggcgatgagcatcgagcggagcagcgggcgggccttctcgacacggagcagcgacagcgtcctctggcatcttcagcaagcgccgagcggagcagcaaggggccatctcgacgcagagcggtggcggtccggaactccctcgttccgagcggtgacggtgacggccgcatcagcgccgccggattttctcaggtgggggacttggatgaggcttcaccagcttgggagaacaacggcggccacactagtcggcgctacaacatctcccaactcttctcctcaccgagtcctcaccaagtgggtcctgtgccagagtttttttgcgcgaggtgttcgttcctttggctgtgtttagattcaaagtttgtatctaaactttaaacttcagtcctttttcatcatattaacttgtcatatacccataactttttagtcatatcatttttaatttcaaccaaaatctaaactttgtgctaaactaaacacagcctttgttgagatacggagaacccaacgtagctatagaccccactgctttttccatcacgtagacgaattcacgcgctacgtaggagcactatcagcgtaggtgtttctcaggcatcctttcccctaggctgtcggggagaccgcagagggtatgcaagaagtgtctgacttggtgggcactattatgtcctttgttaatacgaggagaagagagtgttattgattgtgttaaacatatctagtagaccactctaaaactataattttggagataaattattaagctaaaattatatactcttctaaaaaagatagagtaatcaacaaggacatggagtattttaaaaaagagcattgtcgccgttaattacggtcatgatccgcttcaagaggagagggtccaagagtgtcccagccttggcccatcttatcccttatttacagctactccaggaccagcagaggatcaggagaggagacacgtatgtacacatatctacacgtgggccccacgcagatgagctgccacgtactccactccatgctcgatttgaatccattctccaaagaaagggatttaattaatcaaccagtacattttcattggcgagtgaataataaattattattattatatgatgaatc

SEQ ID NO: 9882 - DNA, 1988 bp, Oryza sativa
  ref <308>: DATABASE ACCESSION NUMBER: AK107230
  ref <309>: DATABASE ENTRY DATE: 2002-08-28
aaagcaaacagctaatttgtgtagcgatccagctacagacagacgacaccacaaacatagctaagtagcttaggcttaggcttagctaagtacaagtgcacttgcgcttcaaattttgccggaaaagcgaccactaattaagctactggctagaatggcgatcgttgacttggtcaatgccggagagcagcagcagatgggcagcaagagagcggcggcggaggatggcgacggcggcgtggacgacagccgcgagtactactgccggcgaggcgtccggcacctgtgcgacagcggcattaccaggcttcccggcaactacgtcctcccggcctccgaccgccctggccaagccgccggcgccgccgccgccgccggggggtcagtgaagctccccgtggtggacctgtcgcgcctccgcgtcccttcggagcgcggcgcggtgctccggacgctggacgcggcgtgccgggagtacgggttcttccaggtggtgaaccacggcgtgggcggcgaggtggtgggcggcatgctcgacgtggcgcgccgcttcttcgagctgccgcagccggagcgggagcggtacatgtccgccgacgtgcgggcgccggtgaggtacggcaccagcttcaaccaggtgagggacgccgtgctgtgctggcgcgacttcctcaagctcgcctgcatgccgctcgccgccgtcgtcgagtcatggcccacctcgccggccgacctgcgggaggtggcgtcgaggtacgcggaagcgaaccagcgcgtgttcatggaggtgatggaggcggcgctggaggcgctgggcgtgggcggcggcggcgtgatggaggacctggcggcggggacacagatgatgacggtgaactgctacccggagtgcccgcagccggagctgacgttggggatgccgccgcactcggactacggcttcctcacgctggtgctccaggacgaggtggccggactccaggtgatgcacgccggcgagtggctcaccgtcgacccgctcccgggctccttcgtcgtcaacgtcggcgaccacttggagatattgagcaatggacggtacaggagcgtgctgcacagggtgaaggtgaactcgaggaggcttcgggtgtcggtggcgtcgttccacagcgtggcgccggagagggtggtgtcgccggcgccggagctcatcgacgaccgccacccgcgccgctacatggacaccgacctcgccaccttcctcgcctacctcgcctccgccgccggcaaccacaagtccttcctccactccaggaggctctactgatcgatccattcttaattggatcatctctacactataattaactggatcggagtactcctgtaattataattataattatattagctactactactcatgatccacccccggtaattataattgcggaattgccttggctaagttagctccaaacacagcccacagatcatcgatatgattgatcaaactcgatctcacttaattaattatataactactatattcacctatatagctagcttgctgttagcagcttaattgccggagtaaaattaaatcaaatcaatcgatcgattgatcgacaagagaacaagtcaacagcagggcccaactccctgaacgaggcagaggcaggatttgaccggtcaaacctagcttttcagcttaattgccttcccaacaattcgattggcgcgcattgactagctaataatatccatacatatgagagtatactataattaagttgtcttgttctcatcgatcgattggtcgtctgaaaaagccaaagccagctgtgggtttgcgtatgtatgcatgtagtatattttttttctagttattaaaatagtaagttgttgttttgacttttcaaagtcaacgtgattgtaccttgacgtacatagtactgaatcatgtacgtcatcacatatatatatatattccgaaagagtgttcatct

SEQ ID NO: 9883 - DNA, 1630 bp, Oryza sativa
  ref <308>: DATABASE ACCESSION NUMBER: AK107231
  ref <309>: DATABASE ENTRY DATE: 2002-08-28
aatgaagtactccacttctgtaaccatggataaggcctacattgccgtcttctccatcgtcatcctcttcttgctcgtcgactaccttcgtcgtcttcgtggcggcggcacgagcaatggcaagaacaaggggatgcggctgccgccgggtctaccggccgtcccgatcatcggccacctccacctcgtcaagaagccgatgcacgcgacgctgtcccgcctcgccgcgcggcacgggccggtgttctcgctgcgcctcggctcgcggcgcgccgtggtggtgtcgtcgccggggtgcgccagggagtgcttcaccgagcacgacgtggccttcgcgaaccggcccaggttcgagtcgcagctgctcatgtcgttcgacggcaccgcgctggccatggcgagctacggcccgcactggcgcaacctccgccgggtcgccgcggtgcagctgctctccgcgcgccgcgtcggcctcatgtcggggctcatcgccggcgaggtgcgcgccatggtgcggagcttgtgccgccgcccagccgccgccgcgccagtccagctgaagcggaggctgttcgagctctccctgagcgtgctcatggagaccatcgcccagagcaaggcgacccgacccgagacgacggacacggacacggacatgtccatggaagcccaggagtacaagcaggtcgtcgaggagatcctcgagcgcatcggcacgggcaacctgtgcgactacctgccggcgctccggtggttcgacgtgttcggcgtgaggaacaggatcctcgccgcggtgagccggagggacgcgttcctccgtcgactgatctacgcggcgcggtggaggatggacgacggcgagaagaagagcatgatcgccgtgctgctcactctgcagaagacacagccggaggtgtacactgacaacatgatcacggctctttgctcggtgagtacaagtctaaaagtctgctctccgatggatcgggaccgtacaactgatcacaggttgatcgaacggctaaaaaatattgattaagcttgacggtcaatcgggagaaagctaaacagtaaattaggcacagcgggtaacgcgagaagcgccccagcccgggtttgaagaggttttatctggaaaaatcaattcaacctttaagagtattttttttatgtcacttaaaagtttataaaaaaattaaataaatttagtaagatagatctatatgtgatatgtcacttcacaaacatataaattcaaattcaacttataagtagaaaaaaataaatttaactatcaatagaacttataattcacggtcaaatttattttttttttcaaattgaataagttgaattttaactcgtatgtttgcgaaaagatatatcatatattgatctatcttgatatttttttaatttttttaacgacatgaaaaaaaacaggatgttccctagagggaaaaaatccacttccattttatgtgcctgcctattgaagtattgattgccataatctatacctgcctatcttttctatgcaatcctggatatagtactggtgcaccagagtaacttttatacgaagaaatatcaataagtaatggtgtatcattttcttaaaaaaaaaact

SEQ ID NO: 9884 - DNA, 1019 bp, Oryza sativa
  ref <308>: DATABASE ACCESSION NUMBER: AK107232
  ref <309>: DATABASE ENTRY DATE: 2002-08-28
acaagacatcatcatcacaaaaatccgccggccgccgttggcccaagcgaacccgtcgccggcgttgtcgcactcgactcgaggttgccgtcgtcatccttgaagtggccgatgagaaccaccaccgccggatctgcctcaacgccgctgcagccgagccctgtcggcctccaccgcctccgcctcgacgccgctgctgccgagccccaccggcctccaccgcctccgcctcgccactgccgttgcagagccccgccgcagcctccaccactccccgcgtgccagatctgagaaagggagagggggtggtgacggcaggggaaggggaggagggaggagcggggacttggctgcggtggatccgccgccggatggagttgccgccgccacatccgtcgctggatccgccacctcgcgcactccctgtcgctggatccgccgccctgacgtctcctccggatccgctgcctcgtgcctccccatcgccggatccgccgccctcatgcctccccgtcaccggatccgccgcccgcgtcatcctcttcctccaccatgacgccaccccgcgcgccgctgtggccgagcaccgccaccccgcaccgccgccgagccacccctcccccgctgcctcgtgacgcaggccgctgcccaccgaatggagagagagagagagagggagagggagctgcggagagaccgagggagattggggcgcctcgggtgttgaggcggagtgaggcgtacacgctgctcggcacgaggattgaggaatcactgacaactttgatgaggaacggggagctttgtttggctccgcgttcttcagtttctagcgggagaagtatacgtggctgggaatctctgatgtggaagggggaaggcgaatgccatgtcacgcactgtggacacccttaggccagtcacaatgggggtttcactggtgtgtcatgcacatttaataggggtaagactgaataaaaaatgattatttgcatgaaaaaaaaaaaaaaaaaaaaaag

SEQ ID NO: 9885 - DNA, 1808 bp, Oryza sativa
  ref <308>: DATABASE ACCESSION NUMBER: AK107233
  ref <309>: DATABASE ENTRY DATE: 2002-08-28
acctttgcgaccgagactgttttgcaccctgatcgcaaccagcgtcttcgccaactatcccgaccatctatactttctcttgcttcgacacacccaacatgacccagcattacgacgccgtctgcgtgggaggcggctccgccggaatttatcatctatacatgctgagaaagctcggcttcaacgtgcatctcttcgatgcggcgcctgattttggcggcatttggaggctcaactgctatcccggagctcgagtcgacagcgaagtcccgctgtacggtctctctttccccgaagtctggagatcgtggaacttctcgtgcaagtatccggactttaaggagcttcgccagtacttcaaccgcctcgacgagaagctcgaacttcgcaaggattgcagcttcaaccaccgcgtgcgcagcgcgcactgggacgatgctgcacagaagtggacgctgaccgcaggcccgagcgaggacaagaccgtcaccgtcacggcgcagcacgtcatcttctgcctcggcttcgcctccaaagtcaacatccccaagattccaggcatggaaaaattcaagggcaggatcgtccacacgggagagtgggaggagtcgatcgactgcacgggcaagaaggtcgccgtcatcggcaccggtgcttcgggcatccaagtgagccaggagatcggacccctggtagaccgtcttaccgtctttgttcgcacgcccaacctcgctttgcccatgcgacagcagaagctcgaggcgagtgctcaggaggcattcaaggacatctatcccgagatctttgaaaagcgcaaaaagacctttggcggcttccactacgactttgacccacgcgagacgctctcggtctccgccgaggagcgagagaggctctacgaggagctgtgggcacgaggtggcttccacttctggctcgagaccttccacgacctgcatgccaacaaggaggccaacaagaccgcgtacgacttttggcagaagaaggttgccgagcgcatcaaggatcccaagaagcgcgagatcctttgccccgaggagtggccgcacacctttggcaccgtccgcccctcgcttgagcagaactactacgaggtcatgaaccaggacaatgtcgggatcgtctcgatcaagcgtggaggcgacgaaggaatcaaggagatcaccgagaccggcgtcaggctcaacagcggacgcgaaatcgggctcgaccagatcatcctcgccaccggcttcgatacgcacaccggtggattcaagcagatcgacatccgtggcaagcagggtctgccgctcaccgacaagtggtcgcagggctgcaactcgctcaacggtctcaacacggctaaattcccgaatctcttcttcctgtatggacctcatggtcctacggcatactcgaatggtccctccaccgtcgaggtgcaggccgagtgggtgtgcgagttcatcaagtacatgcgcgacaacaagatcacgtcattcgacgtcgacggccaggccgaagccaaatttggcgagcacatcaacgagctctcggccaagacgctcttccacgagagccacggctggtacatgggccgcaacatcccaggcaagccggtccaggcgctcaatttcaccggcggcatcccgctgtacgtcaccgagctcgacgagtgcaagaaggccggataccagggatacgacctcgtaaaagcctgaacaagctcgttcgtgccttgatagctcgcatacgcttcctttccccatttgtggttctttaacttattcggttgcattctcgcg

SEQ ID NO: 9886 - DNA, 1138 bp, Oryza sativa
  ref <308>: DATABASE ACCESSION NUMBER: AK107234
  ref <309>: DATABASE ENTRY DATE: 2002-08-28
atccatcccttctcacgccgcacacactgcggcccctgcatcgctagcgtgagcgagaacgagaacgagagacgcacgtagtggtaccttttgcgaacggtagcgagagcgagagatcgcgtggttttttttgatcgctagctgtgttagccatggcgccgggtgctgggtcgtcgtcgtcggcgaggaggggcaggcgcgtcgccgccgccgagccgccccgccgcgcgctcaggatgcgcgcgtcgtcgccgatgtactacacgtccgacgacgaggacttgccggagattgtcctgacgcccccggctccggcgccgccgcgcaccggtacccgctcgctgcggatgcacgcgtcgccgcccgactatgggcgccgccgtaccaaccgaccccgccgcgtggcacggacgaggtcgccgccggtggtgcaggaggcggagagggagccgccggcgccgcagcagccggcggcggtggtggtggagcgcgtgttttacatggtgggcagcccgccggacgtcatcacggccacgggggaagggccgggggggcgcacggtggcgggcttccgttgcaggaggctcacgtccacgcgcaccctcgtcgacggcgaggacgccgccgcccgcgccgccgccatcagcggcgcccgcgccctggtcatgtgcagctgccacggcgcgcccttcacccacgccgagttcctgctccacgccggcggcaccgacctgggccgcaacgtcaccggctacccgtggcttggcgacgagatggagctgactcctcccggcgccggcggcccccatctgtaggttcgccgcggaggtggccagccgtcgtcgtcgacgacgacgacgaccgcggagtggcgtctgcggcggcgcgcggcggaggcggcggcgagcaacgcatggtccggggagagctttgatctgatgcagtgtgtccgttttcaatgccagtcttcgctcttagctacttgcagttgactgctgtctcagtctgactgtcaagtttatctttaattttcgcaagtttactttcatgtttctaaattatcagttgtaatcgtcgatcgatgtaatagctctagatctcccggatcaataatatgaaaactgcatctttgtttttt

SEQ ID NO: 9887 - DNA, 1755 bp, Oryza sativa
  ref <308>: DATABASE ACCESSION NUMBER: AK107235
  ref <309>: DATABASE ENTRY DATE: 2002-08-28
ctatccccgattcgcacaaccaatctcttcttgcttcctcctcctcctcctccagccgccgccgccgacgacgattcttggtagagagattcttgcgttgttttacctgcgtcttgttcttcttgggagttgggtggatcgattgatcgaggttttggaggttggaagaagtgtgtgttgtggtggggggtttgtagagagagagagggcaaaggcacgcaaagagggagagagtgaggagagatggcggcggagggagggaggtgtcagaagagctacttcgacgtgctggggatttgctgcccgtcggaggttcccctcgtcgagaagcttctgcagccgctggagggcgtccagaaggtcaccgtgatcgttccccccaggacggtcatcgtcgtccacgacgtcgacgccatctcccaatcccaaatcgtcaaggcgctgaatcaggcaaggttggaggcgtcggttcgggcttatgggaacggcagtgagaagatcaccaacaaatggccgagcccgtatgttctcctctgcggacttcttctggtcgtgtcgctgttcgagcatttctggcacccgctcaagtggttcgcgctggtggctgcggccgccggcttgccgccgatcgtgctgaggagcattgcggccatccggagactcaccctggatgtcaacatactcatgctgattgctggtaagaacagcctataattcacctgtgacattaatgatgtttcctgttattggtaccttgaaaaaaaaagaagctcccttttgttggaggatggccctgaccatcacctccgacgatcgaagaccctttgatctttaggagataactgaattataaaattttaaataggcttccttcatctggtggcctaatgcatgcattttggcttgtaccaaaacctactttctctctttaatgaaatgaaaagcagaggtcccaccatactttttgaaaagaaatgaacgtttaaatagtatcgaatggtagcaaacacatctgccattaaggatatcctccaattgaatagtctcatttgaaataagaaaacaaattattgacacagcttagtagtagagcattgagttttaacgttgatgccatgggtttgaagctttttttttctgtattaaaagggcaacagtatacttgttccttttttttaccatagtattctcttgtgtgtagaagacacaaatacaacaccactttgggtaaatattcaactacggattgaagttgtgggtattattgatacctgttctaccagtgtgacaatgggttgtgaaaaaaaaagagacaaaagcaagtttcttcacgaggaccaatatggtgggtgattagtgggagagcagaagcagaaatccatctctcaaaagtttatgtctcacttgcataaacttttgctttcttttcttttctagagggtccctcactttccatcacatcaaaaggatatgttgctgtgatgctaatatacgtgctagatgaacaattctgcttcttttcctccatgtggcgatgtcacctcagatagggcatcagattccttttagaacaagcaacatatttcttatcaagaagctacacatatttcgaataattctttctagactaatatcgtggcattgagatagctctattgtgatatgcatatgggaatatgggatacatgaaagaatcatcaaaagaaacaagaaataccttgtttcaaaaagaaaaaaagatttggaagatttggt

SEQ ID NO: 9888 - DNA, 1700 bp, Oryza sativa
  ref <308>: DATABASE ACCESSION NUMBER: AK107236
  ref <309>: DATABASE ENTRY DATE: 2002-08-28
atcacctaccgcaccgatcttgctccatcagccggaccgatccgacagccggcgccacctctgttccatgtatcgtccgctcccacgcgccgtttcggcgcttccgaaacggctcacccgcgcttcggcacgttccgtcatcacaccatgccgcccggccatcgcatcgtctgtgccatcacacagcgtatcgatcgggcgtctgctgtccatctcgcgcgcaagccgtgccgaagccgcagcaaagccggctgcgcccacagcgtcgtcgagtgcctcggcgagttacagcgacggtgggcctgcagtgccgggtgtcacgacggacgccaagtcgcgcgcagtgtacatcacgtgggcaagcggcatcacgagcaagttccacaacatctggctacgcgatcactgccgctgtccacagtgctaccacccaactaccaagcagcgtctgctaaatacgtttgagatcgcacccgacgcacagcccatctcggccgaagcaacgacagaagggttgctcgtacactggcctttgctcccttcggaacgagctgctcagcccgcagcacccgaaccagcacagggcaccgaggaggcggcaggagacagcgccgcggggccacagcatccgtcgctgtatccgtggcgatggctcatgcgcaactcgtattcgcctctgctctccgaccccgtcaccgcagccagcgacgacacaggcctcaagggcatcgaaaaggtgctttggggcaaaggcatcggctcggcccctccgacagtcaggtatgacgaggtcatgggatccgacgagggcgtgctcaagtgggtcaccaaaatcgcgcaatacggatttgcattcgtttccggtgtgcctccgacaccgacggatacggaggcgctcattcgacgtatcgccttcatccgcgagacgcactacggcggcttctgggactttacctcggacctcgcgcatggcgatacggcctacaccgacctggcactgcaggcacacacggatacgacctacttcaccgatcccgctgggctgcagatgttccacctgctcagtcacactgcgtcgaaaacctccgcaagtggcacaaagggtcctagtggcggagaatcgctgctcgtcgatggctttcttgctgccgcggtgctcaaggacgtgcatccggatgcgtacgatacgctcagcagggtgcggatccgcacgcactcggccggcgacgaaaataccatgatccgcccactccttgatggcggctatcccatcctgcagcacgacgaggccacgggcgagctcgtgctggttcggtacaacaacgacgatcgctcggtgctgcgcatcgacgccgacgatgtcgaaccgttctatgacgcgctcacaaagtggaacgccatcctcaccaatcccgagggcgagtatcgcgtgcaactcaagcctggcaccccgctcatctttgacaaccaccgcgtcctccacggtcgtgccgcctttgtgggcaatagacgcctctgcggcgcctatgtcaaccacgacgactaccgttccagattggccgtcctccgcacccagctcgccgaaaacagatccactagaggcgtctgggatgacggcctctagccactctagcaccgcaaacacactctctttatgctagtcatttttatacaatcggaatgcatcgccttatactatc

SEQ ID NO: 9889 - DNA, 1922 bp, Oryza sativa
  ref <308>: DATABASE ACCESSION NUMBER: AK107237
  ref <309>: DATABASE ENTRY DATE: 2002-08-28
gtgcagcatcagcaggcagcagcagcagcttcctcctcctcctcctcatcttcaccgacgacaccgcacgctccgcttgctcgtctcgccggcgccatgtcgtacaaccattcgccgtccatcaccgcagagaccataaaccagaaggtcaggatcttcacctacgagccatgtggggagattgtccgccacgcacggcggttagagaaggagatatacgaaaatccaggctctctcccttttcaagagataatatactgcaatcttgggaaccctcaggctcttggccaacgaccaatcaatttctttcgcgaggttctttctctgtgtgacaatccatctctcatagacagagacgaagctcgtgcattattcagtccatgtgcgctaaaacgagccaggaagattattgaatcacttccaggcagagattctggttcctatactagtagtcagggagtcagaggtttgcgtgaagcagttgctgatggaatagctgccagagatggttttccatcaaaaccagataacatttttctgacagatggagcaagttcagcaatcaacatgatgatgcaaatactcatcaggtcccatgaagatggcattttgtgcccgctgcctgaatatcccttatactctgcttctattattcttcatggtggaacaatggtaccgtataatcttactgaagacagtatttgggggcttgagattttcgaagtcaagaggtgtttagaggacgcccgtgcatcgggtttgactattagagctatggtggtcataaatcccggcaatcctactggccaggtactgtctataaccaaccaggaggagattgtggaattctgtaggaaagaagggttggttattcttgctgatgaggtataccaagaaaatgtctatacagagaataagaggttcaattccttcaaaaaggtggccagatcacttggttatgatcaccatgacctctctatagtgtcatttcactcggtctctatgggatactatggagaatgtggtagaaggggaggctacatggagatttgtggttttggagatgatgtgatcgatgagatgtacaagttggcttctctaactatttgtcccaacatagctggccaaatccttatcagccttgttatggatccacctaagctaggggatgaggcttttgagattttcatggtcgagaaggaagagacttattcatctctactcaagcgcgcaaaggctttgcagaaagcgttcaacggtttggaaggcgtgtcgtgtaacaagttcgagggagccatgtacctcttcccacggctgcgcctgccacaggcggcgatcaaagcggcgcagctggagggcgtctcccccgacgtgttctacgcgcaccgcctgctcgacgccacggggatcgccgtcgtcccaggctctggatttcacccagtctccgggacatcgcacatccggtgcaccatcctccccggcgaggagacgatcacggcgatggttcccagcctccaggcgttccatgaggcgttcatggacgagtttcgcggctgatcgattgagcttcgtgaagcaacagaatttggcagatcacaagatcggcagctgtgccatgccttgagttacacaggagatacagctagcggagctgttgcttgtcgtctggcttgcttagcttcctgtttgtgtaatgtccatcggtccattggactccatgcatgtgtgccgtattataactgcaagtgcgttttagttatgcgcctatatgcaaaactcgtggaattggtgttagtgtttgatcagtttgttactatgatgtaaggagttatcagactacgatctagtactgtatggctgtaataatcaagtaatcaactaccccttgagggacaagtcctatttgtattgtattacacctt

SEQ ID NO: 9890 - DNA, 1667 bp, Oryza sativa
  ref <308>: DATABASE ACCESSION NUMBER: AK107238
  ref <309>: DATABASE ENTRY DATE: 2002-08-28
gaaccagcccaagtttccaataacatcctcaaatagctatggcgaccatagctttctctcggttatctatctacttttgtgttcttctcctatgccatggctctatggcccagctatttggtccgaacgtaaatccatggcacaaccctcggcaaggaggttttagggagtgtagatttgatagactacaagcatttgaaccacttcggagagtgaggtcagaagccggggttacagagtactttgatgagaagaatgaacaattccagtgcacaggtacatttgtcatccgacgtgtcattgagcctcaaggccttctggtacctcgatacagcaatactcctggcatggtctacatcatccaagggagaggttctatgggattaactttccccggctgcccagcaacctaccaacaacaattccaacaattcttgcctgaaggccaaagccagagccaaaaatttagggatgagcaccaaaagatccaccaatttagacaaggagatatcgttgcactgccagctggtgttgcgcattggttctacaatgaaggcgatgcaccagttgttgctctatatgtcttcgacttaaacaacaacgctaatcagcttgaaccaaggcagaaggagttcttattggcgggtaacaacaacagggagcaacaaatgtatggtcgctcaatcgagcaacactctgggcaaaacatatttagcggtttcaacaatgagctactaagtgaggccttaggcgtcaatgcattggtagcaaagaggctacaaggccaaaacgaccaaagaggagagatcatacgggtaaagaatggccttaaactgttgagacctgcttttgcacaacaacaggaacaagcacaacagcaggaacaagcacaagctcaataccaagttcagtacagtgaagaacaacaaccatctacgcgttgcaacggtttagatgagaacttctgcacaatcaaggcaaggttgaacatcgaaaatcctagccatgctgatacttacaacccacgtgctggaaggatcacacgtctcaacagtcagaagttccccattcttaaccttgtacaattgagtgctactagagtaaatctataccagaatgctattctctctccgttttggaacgttaatgcccatagcctggtgtatatcgttcaagggcatgctcgagttcaggtcgttagtaaccttggaaagacggtattcaatggcgttctacgtccaggtcaattgctgatcattccgcaacactacgttgtcttgaagaaagcagagcatgaaggatgccaatacatttcattcaagaccaatgcaaactccatggtgagccaccttgcagggaagaactcaatattccgtgccatgccagtggatgtgatcgctaatgcttaccgcatatcgagggagcaagcacgaagccttaagaataataggggagaagagctcggtgccttcactcctagatatcaacaacagacctacctaggcttctcaaatgagtcggagaacgaggcctcagagtgatgtactaatgaaatagtataggtgtatcaaaaaaaaataaaatgccacaagtatgtgaaactttgtggcggttctgttctaagtttatgaagcactaataaaatgctacaactgttttattcatgc

SEQ ID NO: 9891 - DNA, 1618 bp, Oryza sativa
  ref <308>: DATABASE ACCESSION NUMBER: AK107239
  ref <309>: DATABASE ENTRY DATE: 2002-08-28
gctttgcctcgcgcgcccgagctgagacacggcgagcaacacgatggccagcgtcgacggagcgacgcgccgcggcggcggcgatggaagcatcaggcggcgccgggtgctggtgttcccgcttccgttccagggccacatcaacccgatgctgcagctcgccggcgcgctccacggccgccgtggcggcggcggcggcgagctgtccgtcaccgtgctccacacccgcttcaacgcgatcgacccgtcgcgctacccggagctcgcgttcgccgaggtgcccgacggcatcccgcccgacgtcgccgcgaatggtaacatcgtcgacatcatcgtagccctgaacgtcgccatggacggcggtgagtcgtcgccgtccttccgcgacgtgctcgcgtcggtggtcgccgccgacgacgaggggcggaagccccgcgcgtcgtgcctcatcatcgacggtaacctcatggccgcgcagaagaccgccgccgagctcggcctccccacgctcgtgctccgcaccggcagcgccgcctgcctcggctgctacctcgcctaccccgcgctcctccaaaagggctatttgcctcccaaagagtcgcaactctatgaaccagtggaggagctaccgccactgcgagtaagggacctgtactacacgagcaacgccaaccaagaactggtccgtaaagttcttggttggatcgccgaaacggcgagaaactctaacggtgtggtgatcaacacgttcgacgagctggagccggccgagctcgagaggatccggcgcgagcttgacggcgacggcgtcgccatcgtgctcgccgtcggcccgctccacaagctctcccccatgaacgccgggggcagcctgcacctgtgcccggaccggagctgcatcgagtggctggacacgcaggcgacgggatccgtgttgtacgtgagctttgggagcttagcgtcattggactccaacgagttcttggaggtggcatggggattggagagcagtggccagccttttctatgggtggttcgaccagaccttgtgaagggtttggataaaccaagtttgccggatgggttcgagcgtgcggtggagggtaggggtaaggtgattaagtgggccccacagcaagaggtgctagcacaccacgcagtgggagggttttggacgcacaatgggtggaactcgacgctagagagtgttagtgagggagtcccaatgatatgtaaacctcaatttgcagaccaaatgttgaatacaaggtacttagaagcggtgtgggctgtaggctttgagcttgttggcaagctagaaaggggtgaaatcaagaaagcgattaagaggttgatggtagaaaaggagggagctgagatcagggaacgagcaaaagagcttaagaagaaaatggaccaatgcttggaaagtagtggatcttctcaaattgccatcaacaggttagtgaattatataatatctctctaacacttgagtttaattatgtacttatcgtgtgaatactaccatcgacgaattgtgaagaagttgaaggtttcctttaattttcttatttatatgtatcaaagcaagtgatatagatgtcctcattctccc

SEQ ID NO: 9892 - DNA, 1793 bp, Oryza sativa
  ref <308>: DATABASE ACCESSION NUMBER: AK107240
  ref <309>: DATABASE ENTRY DATE: 2002-08-28
aacactcgagcacttggttcgcatcattgcggtttcgcaaagagcgaagaggattccaagcgacggcaagccatacaaactgagtacgataaagcttctattgccgctgctcaagctcaagcacaagttaaagttgctgaaccacctcccctcgcggttcgccagccttaaacggcgatccaaggacagccgccaaggcaaggtcaagctcccatgacctggagaaagttcagaaccgaccgcgcgggcaaggctgtgatggccgtcgaagaagtgcaagccctccgcaaggagttcgacgcccagcaagcgagcaaccatcaacagccggttcgtaaaaaggttcgaaaagacctttactgtgcctttcacggacgctcttcgcataccacagagcaatgccaaaacatcaggcaacgtggcaacgcgcaagatactagatcacagcaaggaacaactatagaagcacctcgcgaagcagcccaagaacaaacacccccggtcgaacaacgtcaagacgcgcagcgaagggtaatccaagtgattacgagggctgacccgccaggccaattatccaaaaggcagaaaaagatgcacatccgagcggtccacagcatcacttcggcgggtaagagggcgccacagtatgtgaaccagctgatctctttcgggccggaagacgccgaaggagtcatgttcccgcatcaagatccgctggtaatctcagctgagatagccggctttgaagtctggcgaatcctggtcgatggagggagttcggccgacgttatcttcgtcgaagcatatgctaagatggggttgccaacccaagctcttacaccagcaccagcgtcgatccgggggttcggcggagaggcagttcaagttcttggccaagcacttttgctgatagctttcggctcgggagaaaacagacgcgaagagcaagtactgttcgacgtcgttgacatcccgtacaactacaatgccatcctcggccgtgcgaccctgaacaagttcgaagccatttcccaccacaactatctcaagctcaagatgcccggcccagcgggagtgatagtggttaaggggcttcagtcttcggccgcgtcaaaaggcgatctagccataatcaacagggctgtgcacaatgtcgaagccgaattgcacagccggccgaaacacgtgccaaagccaaccccgcatgacaaaatagtaaaagtgcagattgaccatgccgaccccgcaaagctcgtatcactgggggacggcatgggcgaacaagaagctgagggcatcctagcggtgctcaaaaagaacattgatattttcgcctggagctccgatgaagtgggggggtgtttcggcagacctcatcatgcatcacctggcagtcaagccggatgccaagccaagaaagcagaagttgcgtaagatgtccgccgatcgtcaataggcagcaaaagccgtagtccaaaaactactcagggctggggttattcaagagatcgaccacccagagtggctggcgaacccagtactggtgcggaagtcaaacggcaaatgacgcatgtgtgtagatttcacggacctgaacaaagcatgtccaaaggacgatttccctttgccgtggatcgatcagctcatggattcaacaactgggcgaggatgcctagcatactaaatgattgacacaattcatgctatgttactcctttcgtcccattttaagtatagttgtgagagtttctgtgttcaacgtttaacctttcgtcttatttggaaaacttacg

SEQ ID NO: 9893 - DNA, 3153 bp, Oryza sativa
  ref <308>: DATABASE ACCESSION NUMBER: AK107241
  ref <309>: DATABASE ENTRY DATE: 2002-08-28
gttgcggtgatgaagaagaaatggcgaaagcagcgcctgcagagagccaaggagcgcaaggcgagggcggcaggcgcgagcgtgtttggatcgtcttcgctgggcaagggaaccgttgggtcgctcttctcgcagcgttctgccaacatggcaacggccgtatgggacgtggttcagatctgcccatcttcacgccccggcgagtaccgcatgtggatctcgatcgaccaacacctgcaggcgctcaagctcaaggtgccgcgccagttttacgtcaacttcaagagcaacccgggcaacgaagtctttctgccgggcgtgtacgaggcggagcgactcgtcaagacgctgccgcgcgatgcgccgtgccgccacctctaccgcatcaccgtagacgaggacgtctaccaggagcaggaggcacactttagcaatctcatccaccatcccaacgtcgagggcgtgtacgagaagcagctgccgctggatgtgcgtgcgctgatccagctcggatccagctgcgtctacgggcgcaacggcgcgtcgcagaagctgagccgcgcactggatacgggcttccgcctgcacgatctgtcgccgcccacctcggtcgatatctcgcccagccacagttacctctcgggcggtgcaggtatccgctacttctacctgtaccacgctcatcgcgatgggcgccacgtgctcagtgtctttagccccgagggcgacgtcaaggtgcacattgtcgacagcgccgggctgcgccaggtgcccaacctggagaccatgtatgcggaccgcgtcgcgcacatgcgcaagcgcggcacgctcgccgaggtcaagggtgtctttgagtacagcgacacgatgcgcgtggatgtgcgcatccacacgtcggcatcacgcgcgttcaaggcgctggccaaggatctgaccacgctgcgcacggccaagcagggctcggcgctgctcgccatgtgcacgtccaaggaccaggcgtactacgagacgcacgtgcccagcgtcgccgagttccccatcatcaagatcgccgcggcggcgctcgaggacgagctgccggcgctcggatggcagctgtattcggcccgccgcatgttccagtgctacctgcgcgcggcgagctgggtgcgcggatggatcgatctagcgggccactttgacctgccgctttgcaacctggagaaggactttacgatctttggcgcagacatcgactttgcacgcaggctggtcaagcaggacatggtgctgtggtggtcgccgcattcgcagccggatctgggcggacgcgagcaggatatccatgcgcagtccaggtgggacgagcaggagtcgctcgagctcagccatccgggcgcgtatgcgaccgtgtgtctcgaggtcggactggtggatctggcggtcgatgcggtgctccagtctggaacggtcaacgacatggagggcagctcctctggcgtggcgttcgagggtgcatcacacaacctggacgagtactcgcgcggcaccgtcgagagctcgacgattctgggcgactcggtgctcacgtcggcggtgttctcggcggtcaagggcatggtcaaggcgtggttcatgaccaagcggcgcggccggtcgcagttctcctcgctgctgtcggacaacttttggcgctgggcgtcgtcggacgcatcggccatgttcgagcccgcgctgcagcgcttcctgtttgggctcatgaagaagacgctgctgcagctgctggccgagttcaagcggctgggcgccagcatcgtgtacgcgtcgttcaaccggcttttcttgctgacgaccaagccgagcgcagcgaatgccatggcgtactcgcgctacctgctctcggcggtgacgagccgcgagctgttcaagcacgtccagctcgacatcatccactactgggagtacctgctgtggatggacacggccaactttggcggtgtgattgcggatgtcgactcgctcgtcgcgccgaccgaggaggcggaggccgaggcagcgcgaacgaccaagtcgggcatgccgacgttcaacgtggagatgaactggaacatccagacgttcctgccgctggcggtgcaggacaagttctcgatcgcggtgggatcgttcatctttagcatgtacgagcacaagcagcaggcgacggtggcgggcgacctggaccgcacgcctctgcgcgcggtggcggagcccaacacgccggcgaacggcgaggcgtccaaggacgacgccgaagacggaggcaaggatcgcgacgaggtggtgggatcggcggcagcggcggtggccaagtttagcacggatctgatcaaccacacgatgactcggaagatgctcaagcagctggcgtcgctcaagacggcgatgcagacgtcgtcggacgagatcaatgcggcggtggcgcgcgacgaggacgaggagtatgtcgacatgctgacggccgagcacaagcgcgcgtgggcgttccccgtgctcccgggctcgtggttggccatgtcgaatccgctgctcgagtttatcaagacgacgacggcggtgctggcgctgtcgcgcgagaatgcgatcgaggtgcagatcctcaagcgcaacctgctcgacatgatcaacgtgcgcgagtttgcgcccgaggccgaattccgcaatccgtgcgagccgttcaagctgccgctcgtcatctgcgccttctgcaacgacgaccgcacgctggatttgtgccgagaccctgacctgatgcccaatccgacgcggtggcacagacgcccaagtggaagtgcgccaaatgcgcgttcccctacagcgtggcgcagctcgagatgaggctggtcaacattgcgacgagctacctcgagtcgttccatctgcaggatctgcgctgcaacaagtgcggtgcgctcaagtcgacgaatctgcagccgcactgcgagtgctcgggcagctttggattgatggtgacgcgcaaggagacgctcaaaaagctgcgctcgctgcatacgattgcgggcttccattcgctgcacaccgtgcaggcggccgtggaccacatcatcgccatggtctagaagacttgttttgctagcatttgcattgcttagaatttgaccattgtgatacgag

SEQ ID NO: 9894 - DNA, 1636 bp, Oryza sativa
  ref <308>: DATABASE ACCESSION NUMBER: AK107242
  ref <309>: DATABASE ENTRY DATE: 2002-08-28
aactcgatcgcttaatttccagcaaccaggaaccagcactcgtcggagttcttcgttctgacctgagcaagcccctgatcaccatggccgagagtgttgtctctgtcgatgctgtcgacggcgagcaggagcagcagcagcggctgcagcaggaggagttgcagctggctgacctgcccaacgacgccttgcggagcatcctgctccgccttccgtcggagccggggtacttggctgtcgccgccgccgtcaccaagaactggcgccggcaggtcctcggcagcaacggcagcttcctccgcgccttccgcgcggcgcacggcggagtgcctcccctccttggcttcttctgcaacaggagaaatctgccctgtccgttcttcaccagcacggtggatgccggcgtggtggatctgtccccaccggccgggaaacagcggccgttcatccacgacgtgcgccatggccgcgtgctactcgacgacggggaggacggccagctcctggtctgggaccctctcgcccgccgccgggatatcatccccacgcccagatgctacttcaccagcgatgacagctgcggcgctgccataatctgcggctgcgatggcctggaacacgtcgtcggcgccagcgtcggtggtggtgactgccatttggcgccgtaccgtgtcatcgttgcattcaatgaccggcccaactatcgttcggacgagtggaaccatgaatgcatctgcactagagtctggatctcggagaccaaagagtggagtgaggtatactccatgagaggaagttgcgactttgatttcatgccgagcgccctcgtcgccggtgccatccactggctggtgggggacaccaatagtgttcttcagttcaatctcattaccaaaaagcttgccttgattcagaccccattggacatctcggaattcatgctctttccaactaaggatgggaagctaggcttcaccggtgtgctgggctctcacattatcttcttccacatggacattgccggtgatgccctcaccactatgaggacctggagtattcagaacgttattcaggtggaccacttcttgccaccctatattaacattcttaggactcgtcgttctttagcttctccatgggtggtggactattacgtctctgactctgatgaaggagaagaagaacacggtgttgatgatgatgatgagcctagggaaattctaccaacaatgcaacatgacaatgaggctagtggcagtcattccccacagtggagtgagtcatggtatgatgaagattttgaccaagagaaggacgcattgatcccaacagtcagcgaaaatgtaaatgttattggttttgtcactgaagcaaatgcagttttactgtatgcagctggtaggggggtgtacaccattgacgtcgagaccaaacacacccaaagagtggctgcttgtgccaactatagccatgtttttccctacaccagcttctacactgcaggtataccatatacataagctagaaagcatgtttgttatggttaggaaccgcaagattttcttattttaactagctaggcaggatagtattatcactttcagtaagtaaaataaagcacataggaattaacttc

SEQ ID NO: 9895 - DNA, 1458 bp, Oryza sativa
  ref <308>: DATABASE ACCESSION NUMBER: AK107243
  ref <309>: DATABASE ENTRY DATE: 2002-08-28
gctcagaaatcaggactagcaagggagcagcacgaccgtcgcaggtgcagtccgttggcgaaaaggtcatcgcacccacagctcgacttggcagccgcacagcttcgtcgacggctaggtctgcctcaactccagcttggagcacaatatcatttcgaaacctctacgtccacacgactttgttcagctagctctcaacactccatcatgtcttcttgtgcttaccgagatggcgatgttaacgggaagaagtatgactccaacggcaatgtctgctcgaccatgacgcctacgctcaagtactctctgatcgccgtgtgctccctgctcgcggccgccctcgccggactcggcgtcttcttcgtcgtgcggctccgtcgcaatcgcgccaaggctaagcgcatctcggccgtccccgctcgtcccttgtcggcctggggagggccttcggtgctcgctcgagcgaggcagagcacgatccgcagtgatcagagccgcttgtcccggatggacctcgttcgcggggactcgtactcgacggcgccaaccagcccgagcccgtacggatctggcggatacggcagagagcgctcggcgtcgttcctcctccctccggggactgtcgatgcgaggggtctcagctcaccgagcgagtcgtcggtctcgagcggaagcggtggtggaccgctgtctcccatgtccccgctggacggcaaccagttccccgttctcgaagccgaccgtacccgtgtcccgtcaatcatcatcgctgaacccagtccacgaggagcccgtcctaccagcacctacctcgaggtcgaccgcgaccgccgtatccccgtgcagcaagtcagcagccagcgacccgtcagtatccacgctgctgccggtcaggtcgccgaaatcgctcaacccgtcccgaacaagcgtcagtctgcccttgcaccggcctggaagttcccgcaggcgagtcggcccgagcccgagcgctctccgagccctgaactctcgctgagggaggaagaggagctttttggtctcgccagccagcctgccgaacacgtcgaggtactcaatgatgactccggccacgccggcaacgcatacgactactcgccctaccgcccagcgcgtgaatccgccatctccacccgctccatgtactcggcgaggagcagcctgtacggtgagccggcgcattatgacgccgtgggcgactccagcctcgatgaggaagacatcgtgtcgcccagctcgcagcggtacgagcagaaaacgctcagcttcatcccgaacttggaggagatgcgagcgaacggcgatgtcggaacgcggcggttctaggaagcgacaagacgatgaacaagagaaagcatgtgatggacatttggaatttcgtcatgccctgtatgtacaagcatgttgtcgctcgaacgatgtgaatctcgttgcggttgg

SEQ ID NO: 9896 - DNA, 1490 bp, Oryza sativa
  ref <308>: DATABASE ACCESSION NUMBER: AK107244
  ref <309>: DATABASE ENTRY DATE: 2002-08-28
actcccgtcactcgtccatcccccccctcccctattcctcaccgaggttccgtcgacatgtcgttcgctcgttccgccgcgcccgttcgcaccgcgctccgcaccgccgccaaccagcagcgcgccttcaccaccgccaatgctgccggcgtcaagaccgccgctgctgacgacggcgccctcacctccaccgtcaccgtcgccatcaaggccggttcgcgctacgagtccgcccccggtgtcgcccacgtgctgaagaactacctcttcaagtccaaccagaagcgctccgccctgcgcctcgtccgcgaggccgagttctacggcggtgtcctctccaccgccctcaccaaggagcacctgctgctcaccgccgagttcctgcgcggcgatgaggaattcttcgtcgaggtcctcggcgacgtcctctccaagtccaagttcgctgcgcacgagttcaacgaggaggtgctcccccaggtgcaggccgagtacgcccaggcgcagtccaaccccgccgtgctgggctacgacagcctcctccagaccgcctaccgccaacgcagcctcggtcactcgctcttcgcctcgcccgcctcgcccatcacccaccgccagaccgtcgactttgcgcacgccgccttcgccaaggacaacatcgccgtgctcggttcgggcatcgactcggccaagctcaaccagctcgtctcggcccactttggcgagctcgccgcctccgcctcggtctcctccacgcccgccaagtactttggtggtgagcagcgcgtagccttcgccgcccctcacggcgccgagaacacgcgcgcctcccacggccacttcttcgtcggcttcgagggcgccggccacaaggacgccgaggcttcggccaacctcgctgtgctgcgtgcgctgctcggcggcgagtcgtcggtcaagtggagcaacggtgtgtcgccgctctcgcagatcgccgagtccatccccggcgctcgtgcggctgccttcaacctcaccttctccgactcgggtgtgtttggtgcgcacgtctcggcgccctcggcttcggtccagcaggccgcatccaaggtcgcccaggcgctcaagaacatcgccggtggtctcaaggagaaggccatcaaggcggctgtcgccaaggccaagttcgagcgcgccaccgtgctcgagaaccgcacggctgcgcacgagctcgtctcggcccagctgctcgaggccggcagcgtggctacgctcgagaacgcctttgctgccctcgacgccgtgaagccggcatcgctgtccaaggtcgcagagaagctgctcaagtccaagccaaccaccgtggccgtcggtgacgtccacaagctcccctacgccgacgaggtgctttaaagcttgggtctcaaccatacactttgttttcaacttcgtgtcctcggataccacccaggactgcttcacaagccgtaaattgaatctgcctttccctt

SEQ ID NO: 9897 - DNA, 1287 bp, Oryza sativa
  ref <308>: DATABASE ACCESSION NUMBER: AK107245
  ref <309>: DATABASE ENTRY DATE: 2002-08-28
aatttccatttccccctcgatcccacacaattcgatcccaatttccggttttcgtgtgtgaatcttttggagagatcgatgaagttcggcaagagcctgagcagccagatcgtggagatgcagccggagtggcgcgacaacttcctctcctacaaggacctcaagaagcgcctcaacctcatctccggcggcgccgccggggagagggcgagcaagcggcgtcgcgtcggtggcgcgacggcggtgacggtgacggcggcggcggcgggcgggatgacgctggagcaggccgggttcgtcggcctcctcgacgccgagctcgacaagttcaacttcttcttcctcgagaaggaggaggagtacgtcatcaagcagaaggagctccgggagaggaagatggcatcggcggaggaggtgatgcgcgtgaggaaggagatcgtcgatctccacggcgagatggtgctgctcgagaattacagcgcgctcaactacaccggattggttaaaatcctcaagaagtacgacaagagaaccggctccatgatccgtctccccttcgtccagaaggtgctgcagcaacccttcttcaccaccgacctcctctacaagctcgtgaaggaatgcgaggagatgctggaccagctcatgccgacgaacgaacactcggtagcgagcgaagatgggaaagatgacagcgaaggggaggagaagggttcaaagcccagctcctcctcctcggccaacggtggagccgtcccgggagaggccgaggccgaggatgagaggagcacggacatgaagagcaccgtcacggcggcgctcagggcgctgagagagatccggagcgggagctcgacggtgagcgtcttctccctgccgcctctgcacggcagcaatgggcaggatgaaccggggaggtgaaaacgagaatgggaaagaaaaggaaatgatcttgacgctgcgttcggtatcgttgtttcgcctgcacttctgctcaaatgctcagtgatcttggcacttggtaggagtttgtaactggctatcagttcatgtttcgttttaacttgggtatttttcgtgtaatctgtttgtttcccacctgctgtaaaaatgagagggaaaaatagattagtataaagttcagggtaaacatagatctcaatgtgcagcctgactactttgtcacttgatgggatgatttttttttgtttatgtgcttctgtgtttgttagatggtttgtatggctgtatatatatatatatttttagtaaattgcagtttgggtc

SEQ ID NO: 9898 - DNA, 2049 bp, Oryza sativa
  ref <308>: DATABASE ACCESSION NUMBER: AK107246
  ref <309>: DATABASE ENTRY DATE: 2002-08-28
tttgcgcctagttgcggttatcggatatttttcttcaagcggatttctcgaagatttgtgaagcttcgtgaagaccctgagtaaggcaagccacctttgaacatattgagcctatatttgaacttaattatattgcttgcaaaatattatgcattgataggattgcacttaatctgtttgccccgtctgcaaggcagaccggtgggcctacctaacttgttgcatctgatccttccattgttaattgttatatcatgttcccttgtaaccacctagttgcgcctcggtattcgtgcactctgcacgagtatcgacggttgccttcaaacttaaaatctgagaaacatcttgggtaaaacttggtttacaaaagctttggaaaacccgacgcctgggacggtgccttgtgaaagaaaatgagttttaaaaataaaactcgcgacacaaggccattcctgggcggaatacttgtgcggtctcatctaaggaccgattcctttggaattacatccgagcatacaatagtgcgaccacatgggtggaatgggacgcccctggctgagtaagtagctaatcaggggtgccttgatgccaagagacatgtggattcaacggggtggtgtcggggagaacccccgggcttcctggcacagtatggtctgggacctaacctgttgttggtctgggacccctctcgttggcatatggcaaccctgtgtcggctttggaaatgccttgtcgtgaaagcctcaaagtcgccagacgtggctgttctgcacgggttgggtgacccgggttagtaacgtcgtgtgggtaaagtgtaccccctctgcagaggttaacaaactgttcaaacagccgtgcccacggtcatgggcggatgtgaggtgattccttagcgtagtttttgttttaccctgttttatgaaaaggtgttaagttttggaaacctaatgcttgggaagcatttagctatccgggggacagtgggaccgggagtccctggaagtgattggtcgtttggggaccactattatcgggaagtttggaaaattggtttggtttgggaaaaccagatttgaagccaactctgggagttgtgcaaatcttgataaataaatttgttacttctcacctcccgaccgagctgagacttgtctcgctctggttgtggaaagcacacacttagattgttgaaaacttgaaaacaaaactgtttgcaaaataacagccttcccttgaagcttgcattaaccacctaagttcccctagcttgctgagtacgtaagtactcacccttgctctctatataaatatagttctgccagctctgaagatgaagttgaagtgaagtgaatattaggatttcgtcctagttccctgccgttgcctgtggcgttgggtgttagtccgttggttggttccgctgctgctgttgttggtgtttgcctcgtccgtgtcgtcggttgcattctcgggctgtttgagctgcaatctaagttaaggtaaataagtcttctattaattataaggatttgtaatgattcatgtttgtcaccgtgggtaccagcgctatgtcctgggactggtactgagatcgcggtttcgtaggacacggttcatgccgttttcctacgacacgctcctgtcaggtgccgttgtacggcggtgccagattggggtgtgacaacaacccaatgttttcaatcctttggattgtttgcaacttaaccataggaaaatttcatatgttttttaatctataggtttgcacatgtattcccacattattcctatgtattttctattcctacggtttgaaaatcctacaaatcgaataagccctcaagctgaaccaaaaaaaaaagattggggtgtgacaacaacccaatgttttcaatcctttggattgtttgcaacttaaccataggaaaatttcatatgttttttaatctataggtttgcacatgtattcccacattattcctatgtattttctattcctacggtttgaaaatcctacaaatcgaataagccctcaagctgaac

SEQ ID NO: 9899 - DNA, 1510 bp, Oryza sativa
  ref <308>: DATABASE ACCESSION NUMBER: AK107247
  ref <309>: DATABASE ENTRY DATE: 2002-08-28
atccaacctagtccgtccttcatcatcaacaatggttcaagctattcgaggtcttcttgcgctgctgccgttcgcggtgcttctgctcgccacgctgcaaaccgtcacggcagctccttccgaggctcgtcctgcctcgaccttctcccaggcgatgcgccgccgtcgcgctctggccgctcgtcaggatctcgtcccgcgcgccacgcccgacgagatcgagcgtgcttttgagattctcaagcgctcgcagttctggagcgccgacctccagaagcgcgccgcatccactgctggcaagtcgggcaacaaccagtggactgtcaacgatgacgatcagagcatctgcttctgcgtcaaccgcaacgctgctggtgctgccgcatcggctcccgccgcctctgcccccgcgtcatcgggctcgtcttcggactcgtcctcgggtgcctcctcgggtggtgcctcctcgggcgcttccgcgggtgcgtcttcgggcgcctcgtccggtgccaagtccggatcgtactcgtcgtctgggtccagctcgggctcgtacgccgcctcgggctctagctcgggctctgtctcccactctggctcgggctcctcgtctggctctggctcctcgtctggttcctcgtccggctccggctctagctccggttctggctccggttcgtcgtcgggctccggctcttcgtccggctctggttcgggctccggatacaacccgacgtacgtgtacaacaactcgtacgacaactccaagtccgagtcggtgacgaacaacaacacgaccaacatcgaccagtctacgcacgactcgcacgacacgtacaacaccaaccagacgacgacgaacaacaacatcgagcagacgaacatcgcaggtgaccagaacaacacgcagaacaacgtgcaccagacgaacgtcgcgggcgatcagagcaacacgcagaacaacacgcagaacaacatcgagcagacgaacaacaccgacaactcgagccacacgtacaacgatagctcgaccaccaacgtggacaagtccaagaactaccaggacaactcgcagaccgacagcaacaacgtcgacaactcgcagaccaacagcaacaatgttgacaagtcccagacggacagcaacaacaccgaccagtcgcagcattcgaccactacgaccactacaaacgagggtggtgcgggtggtgagggtgggaacaagaacacgggcatcgatgcaagtggcagcaaggctaatgtctgcattctcgcctcgtgcaagtaaagcccgcctcccttggcgacacaaagtatgcgtcgcatttcgggcctagagcacaatcctccacctcccaacaaaggtcggtctggatcgcacgcccaggcaccaattcgacccgcactctttgcatcctcgacgtcccttctctttcactgcactgccttcccttcttgtcatggacaccatcgtttttgcttgcaatcacacactctctttgaaccttgg

SEQ ID NO: 9900 - DNA, 1646 bp, Oryza sativa
  ref <308>: DATABASE ACCESSION NUMBER: AK107248
  ref <309>: DATABASE ENTRY DATE: 2002-08-28
aaccctagccgtcaatccctatctccatttggatctctccctctcgactccatgttgccgccgccgccgctgcgttccgttgcggcaagcggcgacgggtggctctccctctccgtctccacggagtccacggggtcaggagagagcaacaagcgcctcaagcgaggcggcggcggcggatcggtcgaggacgatgggttccccctccacgacgaggtcctcctcctcgtgtttgcggctagctcgctggatcttcacgacctcgtccggtgcaccgccacttgcaggcggtggcgccgcctcgtcaccggcaacgcggagtacatctgccgctccatgctgccctccagccgcctcatccgcgacctcgccgtcggcttcttccaccagagccacgaggacgaatcgtcttcctctgtcgtgccgcctcggttcgtcccgttgccctcggcctcctccaggttcggcggcggcgagcttgacagggtgctcgacaaccccggcctcttcaagaactcccgcctcgtcgcatcacggaaaggccgcctcgtcgtcgagctccgccgcgcctcccgtgccgccgcccttaggctcgtcgtgtgcaaccccatgaccggtgacatgtccgtcctccccgtcctctccgggaaggacaggcccgggctctacgcgtgcgcgctgctcaccgccgacgaccttcaggactccgccgatccgctcccaccgggtcccgccgccttccgcctggtggtcctctacaagcgccgcagcttcacggcgtgccggtcctactcgtcggacaccaatgcctggagcaccgagcgcaagctatccggcgtcaagatcggcgggaagcgcctgggcgacatggccgccggtgtgaccttccgcggccgcgtgttctggctggtgaacagcgtggtgttcgtcctccacttggacacgctggtggcgaccaccgagaacatctcatggcattggaggtggaacggcaagccatgcttctgcctcggtgacccggtgccaaaccgccgtctcgccgtctcgccggacggacgtctctgcgtggtgcaggtgggtcgaaacttgaggacctacaacccggtgatcaacgtcttcgctcgccatgacagtggcggctgcaatgggagcacggcgcagaagatcaggtggaaggtggaggagggcacgacgtggagctgagccacctgattccattggcgaacgtgaagagggtttgtctgaggggcgtctgcgagaagagcgggctcatcttcctcgccatcggcgcagacatgtacgccaagaaaccggacctggcgctgtacgcgctggacatggagaagaaggaggcgaggctggtgccggcgcccccgggccgctgctgcgttcgccggtcgtcgtggagcttcttcgggtacgagttggaccgtgtggactacctcgcctccctcgccggtggcgattccaccgctagatgatggaacaagcatccatctctgcactgaggtaaggagaagaaatttgggtcagattttactgttgtcacctgctgaagacagcactgtagctcgtcggaaaaaaccaaatcaggcattatgaaacatattttcatacatcttaattacatcatattgttatagttt

SEQ ID NO: 9901 - DNA, 1379 bp, Oryza sativa
  ref <308>: DATABASE ACCESSION NUMBER: AK107249
  ref <309>: DATABASE ENTRY DATE: 2002-08-28
ggaactttgttatgttcaattaattcatccaagtggtgagaaaaaacagcaaataaataaaaggaaaaagaaggcaggtgactgtggcctcgtcgccgagacagccaactacgccgcggtggcagggcgtagatccggcaatagcgggatcctgacgattttcgccgccatcagtacgtccggatccggcaaccagaagcctgaggccaccagatcgagctcctgggctctggatctgacggaagaagggagaggaagagggcccgatgcagcagctatagacgaaggcggtggcgatggtggcggtgacagcggcgactaggaggaagatccgggcgtcagcagtgacaaccctctctcgtcgtcacatctggattcggatgaagaagagcaagtggcatctttggtaggagccggattcgacttcgacggcttcaagcggggctggatttggcggcggcggcggcttcgaggggaggggctctagcggttctggttgaggaagcttcgatggctttgtcgaatatggcacgatgatggagatgacggcgacggtgcggcgatggagacgggaggcaccgagcgacaaatgagatgggaaggtgagcagaagctggaacccctctcgcctcctgcacctgcgcgtccccgagcttgcacccacgcgtcccccgcctgcacgcgctcagcccggatgaggagcgaagctcagatcgaccgtttctctcggacctggctcggaagcccgatttgcacgcgtggagccaggctcgggtggccgtgcaggcaaccaaacaccaaaggcctgcacccgtggatgcgagccaggtgcgatgcagagaaccaaacacaccctaagtcaatccagtggtatgaatgtctggctttgcctggcgatggtgattttcatatcaccatttgttcctgatcatgtctgccctcttctctataacagccaggtgactgatttacggcaagacctcttgacatctacaccacagaacatctcagggagaggacatcaagacaagattcattgtgctgattctgcatgtacagtgagcttctgaaaaatcaacttcaattcagcatccagatcgcccttgccaatcttgtgcaaatctttgataactctagtgtaagcagaatggtcaggcaagagtgcctccttgtgaattatttttcgagcagaaatttcgcctgtgaatgtgatttcctaccacattacacttcaacacagattcactattctaatcagtgatggaaaaggaaaacagtgtcacacaaatgttcacctgtccttaaccatctacaggctgaatgtaatggcagtatggaacacaagtaattttcctatcaaagaatttgcatattcaagt

SEQ ID NO: 9902 - DNA, 2512 bp, Oryza sativa
  ref <308>: DATABASE ACCESSION NUMBER: AK107250
  ref <309>: DATABASE ENTRY DATE: 2002-08-28
gactcccataaacaaaactaggctctcctctgccctccctttcctaaaaggtcaactcatctctccattcccccccgatccccaaaatccaaagcccgagagagggagagaggagaatgggcaatggcatcaccaagaatccgtgcttctccggcgacccgtacgccgccgccgtggcgtccgaccctctcccggacgacagccacggccactccttcacgtacgtgccgtcctccgcggccgccttcgaccactccccgaggtccgccgcggcgtcctccgagacgtcatacttctcgctctccggcgccgccatcagcgccaacccggcgacgtccgcgtcgatgccgtcgttccgcctctacaacgagctgacgtggccgccgtcgacggcctgcaccttcgagagctcccgctccttcgccgcggcgccgctcatccaggccgcgccgcccaggctgtccatgtccgggccgctccacgcgacgtcggggcgcttctccgaggcgtcgggatcggcctccaccgcctccgaccgcttctccgaccacccgttcatggacggcatgctcgaccgcgcctcgtcggcctcctccaccgccaggctcatgcccagcttctctcacctcatgtctgagccccgcgtcgcgcagtccggcctgagcaatgagcgatcgctcatccgatcccttgtcagggtcgcctccaagctccggtttggggtgccgctctccggccgccggtcgaatggacctgccgaaccgacgaccaagagcgacggcgactaccgctccacgcccaagggcaatgtggagtgggcgcagggcatggccggcgaggaccggttccacgtcgccgtctccgaggagcacggctgggtgttcgtcggaatctacgacggcttcaacggccccgacgcaaccgactacctcttcgccaacctctacgtcgccgtgcaccgcgagctcaagggcgtgctctgggacgacatacaaggcgtcgacgtcgtcacggacaacctcccggaccctgctctggccaatgccacacacctctgtttccttgacgcaggcggcgtcggcggcggtggcgacgacgaccccgacgcagagcgcaaggcgaagagggggcggatcgagcgcaatgccgatgacgacggcgcgtcgtcggtgcaccgcgacgtcctgaaggcgctggcgcgcgcgctggcgaggacggaggaggcgttcttcgcggcggcggaggagcgcgcggcgcagagccccgagctgggcctggtcgggtcgtgcgtgctggtgatgctgatgaagggcaaggacgtgtacctgatgaacgtcggcgacagccgcgccgtgctggcgcggcggcgcgagccggacttcaaggacatcttcttcaggcccgaccaggacttgcagctgctcaaggccgaggtgatgcgcgagctcgaggcgcacgacaggaatggcctccagtgcgtgcagctcactcccgagcatagcgccgccgccgaggaggaagtgaggaggatcaggtcccagcatctgactgatcggcaggccgtcgtcaacggcagggtgaaggggaagctcagtgttaccagagcatttggtgccggctacctgaagcagccaaaatggaacgacaggctgcttgaagccttcaaggttgattacatcggcgccgagccatacatcagctgcacgccgtcgctgcgccaccaccggatcagctccaacgacaggttcctcgtgctgtcttctgacgggctctaccagtacttcaccaacaaggaggtggtcgatcaggtcgccatgttcaccgccgagcagcccgacggcgacccggcgaagcacctcgttggagagctcgtcctccgcgccgcgaggaaagccggcatggattgccgcaggctgctcgagatcccgcatggcgacaggaggaactaccatgacgacgtgtccatcatcgtcatgtcgttcgaggggaggatatggagatcgtccgtttaggctttgccaggcctgaacaaacgccagaagcttcagaagagagtcggatgccttgcttcgtttaggctatagtaggctacagtagacatcggaaaaggcaaaacaaaacagtagtagtgcccaagcacatgtgctcaacacctaaaaaaaaaaaagagcacatgtgctgatctcctaaaaaaatctaaaaaaaaaaagagaaagaaaaccaacaagtgcataagctgatgtgccatgatcgaactgcctagttcgaatcatgtgttcttctttgtttgtttgttttgtttttttttttttgccgaaactgctgtacatagttcggcaggaggaatgatggtaggttcatgtaattaggtttttcggcatgatggcgatataaagaagaagaaagcatatgcccaataataactgctgtgtttgtcggtctcaacaagccaattctggaatcgattcggattaccttagcagcaatgggcaggattcctattgctgaaacc

SEQ ID NO: 9903 - DNA, 1612 bp, Oryza sativa
  ref <308>: DATABASE ACCESSION NUMBER: AK107251
  ref <309>: DATABASE ENTRY DATE: 2002-08-28
gatgccaagctatagctagagacgacgcggagacggtgtgagagaaacgagacgatgctgctgaggagctcgtcgacgccgttcctgcactccttcctctcgccgtcgtcggcggcggctgcgccgtcctctctccagctgcggcgagccttctccgacggccacctgccttccctccacccgtcctccgacggtggtggtggtagcaagaacaataccaccggcctccacacggagctctccttctccatctacaacaccttcaacaagatggcgccgccgccgccgccggtgcaggagcaggaggaggctgagcagcagcaggcccccggggagccgaagctgccgctgttcttggcgagaggcctcgggatcgaccgcatcgcttccggcctgttcaccgccggcggcggcggcgacggcgacggcggcaacggtggcgctgggaggatgagcgccgtggaggaggagcacgccgagaaggtggcggcgctcgacgcgcagtacaagaggatgatggacgagcagccgggcgacgcgctgttcctgcgcaactacgcgcagttcctgcacgaggtgaagggcgacgcgaggagggcggaggagtactactcgcgcgccatgctggcggatcccagcgacggcgagatcatgtcgcagtacgccaagctggtgtgggaggtgcaccgcgatctggacagatccctcacctacttccacaagtccgtgcaggccgcgccgcacaacagcaatgtcctcgccgcgtacgccagcttcctgtgggaacaggacgacgacgacaacgacgacctcggagaaggcgggcaggacgtggccgtggcggcgcagccggggcatgtgaggcagctggcttccgtggccgtttgatccgtgcgagacgggctgacaacgtgctaaatgcgctgtgctttctactactaaatgcgctggtgcttacaaaccgaagaataaataataccgcggttggaagttggatgtaactatatcatgaagttctctttttcctttcacgaatcaaaaccgatgaatgtattttgcatctaccccaaagttgtttgcttttgcctcgcggtggaatctcaatgtttcgcccggcaaaagaagagtatcgcccattactggttctaccgcgaggcaaaagaagagtctcgcccattcctggctataggacgccggagaatggcacggagatgggcgcatgcatcagtcgtcagcgcatggcttcatgcatcaaggcagctagcgagtgagacctgtgcgtgcgactaggcggtagatggacaccggccatgtgattgttcgccgcccagtgcacgagctcgtgccaagtggcactgctccacgcacaaattagaatgaagcagtgaaccaacatactatgttaagagtctaagagataacatgagattttataagctaatgtaaaaggtttatcaagctatttgcaagcaggaatcgctcctgccgctgccggtgtgaaacaagacatggcagcaaaaggacaattcctaaaacatatcactgagactagaacttttcaatggtgttctcaacggacaccaattcagcgataacattatgaaatctttcc

SEQ ID NO: 9904 - DNA, 1237 bp, Oryza sativa
  ref <308>: DATABASE ACCESSION NUMBER: AK107252
  ref <309>: DATABASE ENTRY DATE: 2002-08-28
gattcgtgaaagagaagcctccttccaccaccgatccacataagtccaggaagccgcctcctcccaccggcgccgacgaggaaagccgccgatcgacgggaaggccgccgcagcgccgtcgatctgcgagacctgaggtgttgctgcgcgaccgcgggcgatgatgtcgtcgccgactccagcgccgctgctccccgtggccccgcttgacggcggcggcgggtacctccggtggaaggagtccgtgctgctccgcctccgcaccctcgacttggcctacgtgctgtccgagcaccagccagaggacgggaggagtgattctgccaagaagaagcgggcgcgcgacgacgagctctgccgcggccacatcctcgccacgctctccgaccgcctcctgccggactacgcgcaccacgccaccgccgcggccgcgtggcgcgccctggcgcgcacctacgacatggacggcaagttgcccaacttgccgctggaccgcttcttcgcatacaggttcgtggacggcgagcccgtcctggagcagctcgcgcacctggaggccatgggcgttgccggcaagctcgatgaccgtacaatgtacggcctggtgcaccagaagctcccgccggctctggtgaaggccatcgctctcgcgtcgccgccgtacccggaccctccatccatggaccacatctgggacacggctcgacttgaagagaggatgcgtttgtgcggcgaaattcgccgtggcgagcacactcaggacaaggaagacgacgacgaccaaggaggaggagactacccagatgaagatcaccggagcccgaaacggaagaggcgatacgatcgcgggccgtgctacaactgcggcgagccggggcacatcgccagggattgcagaggatgagctgggtctcctgagctttgcattacctaacttcagcttattttggatgtagaaaccacaagggaatgctcaaggatgataggcatgttggcaacttagttgctagagcaaattaggcttattttggttgtctagttaggtttctctttgatggcttctttagacatagtacttatgggccatgggagctattttattctcgactcgtagttatgggccatggcctcatgcttttggcaaagacattgcaattgcatgttggtcacgctgttgcaaacttgtgttctgggaatcggggaagatgctgggtgcatggaagatatacttttgttc

SEQ ID NO: 9905 - DNA, 1737 bp, Oryza sativa
  ref <308>: DATABASE ACCESSION NUMBER: AK107253
  ref <309>: DATABASE ENTRY DATE: 2002-08-28
atcgcttttgagagcaattgagttgctagtttagttagggtttcgagtttagtcgagatttttataaggagtgctgttggtgcactttgtaaacacagagagaagcaataaagttgtcatctactttgagagttcttcgatttgtgtttcaccgggtttcgacggtctaaccggtgactcaccggcggtcagaccggcgacacaccggcggtcagaccggcgacgacttcacacgcagcaggcaatcttcaggcggttggaccgagtgatcaacaccggtcagaccgacgacgcgagcgtggtcagaccggcagatcaatctcggtcagatcgatctccatcgattttgagggtaactttcatttccgctaaaagttttcggtttttgggtataccaaccattcaccccccctctggttggcttagttcgtgtgattcgatattacagaaagttttgatgtgatggaaaaattggaagtttgaagaaaaaatttagaactaaacaaggccataaaggacggacaattcatagcatttaagaattgcctatagccatccgataaaaaaaatcaataactgaatcacatgatgcaacaaaataagaataaattttataaaactgcatatactatgatcaaactatcacaaaactacatatttaactcagtgtatcacaaaactacacatttaacactaaatttatcacaaaattatgcatttaagatgatgtgtcataaaactacatgtttagtaactaaattattacaaaactacaggtttagaactaatttagtcacaaaacaataatgtttatagctgcagcataataatggtgctatgaatttaaactctaaaagctgtagttttgtggtaacttcaatattaaatatgcagttttgtgatacttaaccttaaatctatagttttatgataaacatggtgctaaatctgtggttttgtgatacaacgccttaaatatatagttttgtgatagtttgataaaaaaaactgcagttttgtaaaatttactcacaaaataatcctccctgtgcttctacctgccattgctacagggaaaataccaaaataacatgcactagttactttagcacctaaaaaaccatatctactttagcactagttactttctatcactattgtatttttttagggaatgggcgatgaattattacgggcatacattttaagccattaactgctacgaattttgccaaaacaaaaatcatcaagcatttctcatcgaactatttaaaatcaaccattttaactctataatatcttgctcattcctttataccctcaaataattatcatcaatttaggtccatccatcattcaccgaccaaacacctcaggtccaacaaatatttctctgaccatgtagtagcatatgcggctctgttagtttgagcaggttcccaactcctctctctcgtctatcgcacgcaccttttttaaactgctaaacggtgtgtcttttgtaaaaaatttttatacaaaaattgcttaaaaaatcaaattaatctattttttttaaaaaaattagcaaatatttaattaatcacacgttaatgtactgcttcgttttcccaaccgcctgaagcaaacggagcaagatacttgcttgccaagattcattttgtgtactccttcatccacacaagatggtcaaaaacgtctctgcccatgaccactcgcccaaaactttttcaaaac

SEQ ID NO: 9906 - DNA, 1377 bp, Oryza sativa
  ref <308>: DATABASE ACCESSION NUMBER: AK107254
  ref <309>: DATABASE ENTRY DATE: 2002-08-28
ctcgctccggcgacggcgacggcgacggcgagcatggcggcggcggcgccggagttggtggacgacatgacctacgagatcctcctccacatcccgccggacgatcccgcgtccctcgtccgcgcctccctcgtctgcaagcgctggcgtcaactcctcaccgatcccgccttcctccgccgctaccgcgcattccaccgaacacctcccatgctcggcttcatccacaacgttgaccacagcagcaacagctcctacatcccccgcttcgtcgccaccacctccccctctccattctaccccgatttccctccaccgagcatcgagttccccacctactggtgggcgctcgattgccgccatggccgcctcctcctccaactcttcaatcccatcgacctcatggtctgggacccgaccaccggcgaccaccgcatcttccctcagcccccgtacctggacttctactgcactggggccgtgctgtgcgctacacgcggctgccgccatgttgactgccatggaggcccctacctcgtcgtcttcgtgggcacaggagaggatgaccactcatgggcgtgcgtgtactcgtcggagactggagagtggagctcgcaggcctccattgcgttcgattcctatgttgagatgttgcctggcctcctcgtccaagacacgctctacttcagatgtgagcgtggcaagagaattctggggtatgacattggcaggcatgagctctcggagatcgacccgcccccattggggcatgaggttggcatcctcatggaatcaggatatggtgggctgggatttgctactgtggaagattgcagcatcctactgtggtcgcggtatgtgggtgatgatggcattgaggaatggaaaaaatcctgggtaattgggttggtctttctgaatccggtgggtaacccgtcgttgtcgtgggaactggccggtttcgccgaaggcgtgcataccattttcatctcatcagagattggtgtgttcacaattgagctcaaatcaggccaagtgaagaagctgtgtgaggagggctactataccgtcgtcccctacatgagcttttacacttcagatattgctatatggaggccggaggaaccagctgaagactgaagtgcagtgacccatccattaagcttctggtatcttacagagctagtcctcttattatcttttaagatggggagttgaagtaagaagagagtactatgtgaccgtgctcagataagatgtttgatttcagtttgtaatgcaactgagaaaggatggctcacacagtgaacatttgtttcttctcatttaactgcttatgatcgttaccatgcatatatatctttgaagtttacatct

SEQ ID NO: 9907 - DNA, 1429 bp, Oryza sativa
  ref <308>: DATABASE ACCESSION NUMBER: AK107255
  ref <309>: DATABASE ENTRY DATE: 2002-08-28
attacggaaaacccccaccagcagcagctacgcgaggtcggatcggatggcgtccagcaacgagaagccactgcccacaccgatctctgccgccgccggcggcagcggcggcaacgcgccgccggggaggccgacgacggtggattcgatgctgctggacaagggcgcggcgatgctgcaggcgctgcgcccggtgaagcatatcaagcagcacgtgtgcacgttcgcgctgtacgcgcacgacccgcgccggcaggtggagacccaccacttcgtctcccgcctcaaccaggacgtcctccagtgcgccgtctacgacgccgacgacaagcacgcccgcctcatcggagtggagtatatcgtgtcgcggaagatcttcgactcgctgccggcggaggagcagcggttgtggcactcgcacgcgcacgagatcaaggcggggttgtgggtgagcccgcacgttcccgggatgctggagaaggcggagctggagaagatggccggcacgttcgacaagttctggtgcacctggcaggtggaccgcggcgaccgcctcccgctgggcgcgccggcgctgatggtgtcgccgcaggacgaccccgcggcggacgtgcgccccgacctcgtgcgcaaccgggacgacaagtaccgctactccacgacggagctgcgggcggcgagggccgacgtcgcggtgccggcggagccgcgaccggggcaggccgactactggctccgccaccgcaagggcttcgccgtggacgtcgtgccgcacgagatgaagtgccacgcgccgttcccgtaagctgtgaacagtacgctggcagagctgtggcacacgactcgtgtacgtgaacgtagtagtgtaggaacgaccgtgggtcgttgtatcgtgtgtacggctccgtcgtaaactcgtaacaccaactgctaccacgtcttctgggcaaaaaatggcggcggcggtgagaggggcacacgttgatggtagcgggcgacagcaagtgcagcggctgcagacggcacctctggcgagggggtaggtggcgacgggctaggtcccgcaacggccggcggtgggtgacaaggggatggtgggaggcttgggcttggctcgtggtggatggcagtgggcgacaggtggcttgggcttcctaagggcgggctcgacccacaactactgacggcgggtgcctcggtggccgaatccacctccgccgatctcgtgacggcgcgatccgtcggcgtcggcgctgtgaccgtcagatccgcgtcgccgtcgtcgggattactagggttttgattttttttaagatatctttttttacttttatatatggatgatataagcacccgcgcatgaaaattatcatagaccacttgggacggacggtccgtcttttacatgtgagaataggttttggtctgc

SEQ ID NO: 9908 - DNA, 1727 bp, Oryza sativa
  ref <308>: DATABASE ACCESSION NUMBER: AK107256
  ref <309>: DATABASE ENTRY DATE: 2002-08-28
cattccaccaaaccaagccaagcaagcctcacaccctcgcccgcgtcgtcttcctcctagccgccgtcgcgcatggctcagttcggcggcttcggtggctggtccgccatggacgttgccgctgccgccgccgctgctctgggcaacgtcagcggcgcggtgtaccacgccgatcctgctgctgccgtgtacgcgtctctagtccctggcatggctgtggtccccgggcgtgctccgccgtccgccgtgcagatcgaggcggcgaggcggtggaaggagctggagaagatggccctgcggtcggtgaatctcatggtgacgtgcgccggcgccatccaggcgggcgactacgcggcggcggccgggagcctgtccgacgcgcgcgagatcttcgccaagatgcccaccacccgcaccgggatcggccgcgtcctcacccacttcgccgacgcgctcgccgagcgcctgttcccggcgttcccgcagtccgcgccgccgccgcccccgccacgcggggagcagcgcgagctcttccgcgggttctacgaggcggggccgtacctcaagttcgcccacctcgcggcgaaccaggccatcctcgaggcgttcgaggggtgcaacagcgtgcacgtgatcgacttcgccctcaccgatggcatccagtggccgtcgctcatccaggccttggccgtccgccccggcggcccgccgttcctccgcatcaccgggatcggcccccacgccgccggcaaccgcgacgagctccgcgacgtgggcctccgcctcgccgagttcgcgagatcttgcagcgtccccttcgccttccgcgggatcgccgcggaccagctcgacgggctccgcccgtggatgttccaggtcgcgcccggcgaggccgtcgccatcaactccgtgctccagctccaccgcctcctggtcgaccaggacgccgccgccgcggcgtcgttcccggcgcccatcgacggcgtgctcgactgggtcgcgtccatgaaccccagggtcttcacggtggtcgagcaggaggcggatcacaacaagtcgtcgctgctcgagaggttcactaactccctcttctactacgcctccatgttcgactcgctcgaggctatcagccgccatggcggcggcgacggggcgggcaacccgctcgccgaggcgtacctgcagggggagatcgccgacatcgtgagccgcgaggggagcagccgggtggagcgccacgagcagatgccgcggtgggtggagaggctgcggcgcggggggatgacgcagctgccgctcggcgccaccggcctctggcaggcggcgatgcagctccgcgagttctccggcgccggcttcggcgtccaggagaacggcggcttcctcacgctcacctggcatagccagaggctgtactcggcgtcggcgtggcgcgcgaccgcggggaagaagatgacgatgatggctagcggcgccgccgacgccatggaggagagtcagaacagcaacaccaacggcggcggcggcggaagcagtggtggtggccatggtgctctcaaccaaatcatgcagtgaagaagagggatgtttgggtttcgaagtttatgtgggggaaacaatgtgatcgattttgatgaaccagattaaaaagttgtaataatattgcatttagtctgagagagcaacatgttggttttcgaattaataataaaatgtcgtttctagct

SEQ ID NO: 9909 - DNA, 1629 bp, Oryza sativa
  ref <308>: DATABASE ACCESSION NUMBER: AK107257
  ref <309>: DATABASE ENTRY DATE: 2002-08-28
acacacaaccaccaccaacactcctcactcccactcttgctgccctcatacgctcggccttgcacattgttacctatcactgatagcactccctctacgctatcacagaatctaactcgcactcacactccaagaaacttccatcaaacaaacaccaacaccccacgccactccacaatggccggcaagaagggcgttcactttggcggcggcaacatcgggcgtggcttcgttgccgaattcctgcacaattccggtttcgaggtcgtgttcgtggatgtcatggacaatcttattgagactctccaaaagaccccgagctacgaagtcaccgagattggcgatgacggcgagaagaagttcaccatcgacaactaccgtgccctgaactccaagtacagcatggacgaagtcgtccacgagatcgccaccgctgacgttgtcacttgtgccgtcggccccaacatcctcaagttcatcgctgagcccatcgccaagggcatcgaggctcgcaaggagagcaacccacttgccgtcatcgcttgcgagaacgccattggtgacactgacactctccgtggcctcatcgagggcaagctctccgatgagaccaaggccaacatcgctcccaggctcgcttcgccaactcggccattgaccgcattgtgccggtgcagcctgagggctctggcatgaacgtcctcatcgagaagttctacgagtggtgtgtcgaggagaagcctttcgacggtaaccctcccgccatccagggtgttcacttcgtcgaagacctccagccctacatcgagcgcaagctgttcactgtcaacaccggtcacgctactgcagcctactacggccataaccgcggcttcaagtacgtccacgaggtgctcgctgacaaggagctccacgacattgtacagaacaccctcaaggagactgctcacctgatctgcaccaagcactcccacatcagcaaagaggagcaggccgaatacgtccaggcgattgtcaagcgcatctccaacccgactctcaaggacgttgtcgaccgtgtcggccgtgacccactacgcaagatcggccgcaaggagcgtttcatcgggcctgccgcgcttctggccgaggctggcgagaagtacgacaacctcctcggtggtatcgagatgctcttgcgcttccagaacgtcgagggtgacgaggcgtcggtcgagcttgccaagaagctgaaggagttggacgccactacggcgaccaaggagctgactggcctcgaggaggaccacccactcttcgccgccgtggccgagaaggtgaagaaggtgcaaggtgagaaaggtgagagctcttagttggggtcgctcgcgtcggccttgcctgctgcgatcaagattgatctgtcactgaacgcctaaggtccatctcgaagaacgccgcggaaggcgctttccttactttgatgattagcatgatttacgaaagcatggagttatgggtgcccaaggagttgaacgatatcaactcgtggcggaacaggtgcatcatggcacagggtctgcttgctgttttaagtgtttcctttaccgatgagcggaagatagccatcaacattccagtttttcaccg

SEQ ID NO: 9910 - DNA, 1620 bp, Oryza sativa
  ref <308>: DATABASE ACCESSION NUMBER: AK107258
  ref <309>: DATABASE ENTRY DATE: 2002-08-28
aaaaaaaatcttacccgccagcgagcgcgcggccgtggcggcgatcgcattggcggcgacgcggcgagctccaatcccctcctatggcggagggggagggctcctcttccaggaggtgggcgttgggcgatccggatgtcgtcgaggtgtcgccggaggcggcggcggcggcgcgttggagctccgcgcgcctgaagcggaagcgcacgactgttgctcacgaaataattgatctcgacgccaatgatgatcctgatggagttatgataatttgtgagaaggcgtcgagtcacaagagtaatcattctgttagtcatccttcggattggccaaagcatccaaagagtggcttggctgaggatgttcctggtccaagccatcaacctggcacgagcacagttctaccatggggatgcacaactcctgggagaccacggaagcataaggaaattaaaaccgtggataataaaattgatgagaagtataaggcatttaagcagtttgatactgttaccgaccacagtgatcactattattcaatgtcaggcaaagggaatgttcctgaagtcaagaagccatccaaggactgggtgaggcggattcaacatgaatggaaagttctggagaaagatttgccaggtacaatttttgtacgagtttatgaggataggatggaactacttagggctgtcattgttggaccggcaggcactccttaccatgatggacttttctttttcgatgtatatttcccttcccagtatcccaagaaacctccactagtgaactaccgctcgggagggttgcggcttaatccaaatctctatgatagcgggaaagtctgtcttagcctattgaacacttggtctgggcatgggtgtgagaagtggaacccatccaattcaaccatgctgcaggtcctagtctccattcaggccttggtgttgaatgcgaaaccttattttaatgaacctggttatgcagcttctgctaacacaccccagggggagaaaatgtccatggcttataatgaatcgacatttctcctatcctgcagaacaacgctgtattctcttcggaatccaccgaagcattttgaagacttcgcaagggttcatttttgcaagtacgggcgcaatatcctcgtaggatgcaaggcctacatgaatggtgcccaagttggatgccttgcaggaaacggagtgcaggatgttgatgaaggcgacaaaagctgctcagcgaacttcaaaggctccttgaagacgttatttgatgaactcatcaaggaatttacccggataggagttcattgctatgaattccagcctcagagggtgaatcctgggtctaccagagccaaggcggacaccacattgaggctatgataatagtaacgataggtggtcaacatgaggttgacaattttttttttgtttcttggggatcagagatatagttgttggtgctatcctcagaaatcaggaggataggagggcaaaaggcctgcatcagatcatgtccaattatctaaaccatcatgcggttagttggtttttgtgtatatccctgttaaacatgtgggttctattcatctaagaacagtagtttaccacattcatc

SEQ ID NO: 9911 - DNA, 1934 bp, Oryza sativa
  ref <308>: DATABASE ACCESSION NUMBER: AK107259
  ref <309>: DATABASE ENTRY DATE: 2002-08-28
atcctctcaaccgctcctcttctcttgactcaacatgcggcttgcttcagtgtggctgctggctgcggcggctgcgatgcgcttggtcgttgcacttcctgccgccacctcttgctcccagcccacggtccacctccctcagggcaccgtcaagggtatggtcgacgacgcctaccaactcgaccagttcctgggcattccgtacgccaagccgcccgtgggcgatctgcgcttcgcacgtccccagcccgtcgacgcctcggacgccgtgatcgacgcgacgcaattcggcgacatttgcatgcagccgccggcgggattcaacatgagcgaggactgcctcaacctcaacgtcatccgtcccaagggcgtggtggcgggcgccaagttgcctgtgctcgtgtggatctacggcggcgcgttcttcgccggaagcgcgcccgcgtacaatgcgagcgagctcgtggcgcgcagtgcggccatgggcaagccgatcgtgttcgtcgccatcagctaccgcgtcggaccgtttggcttcctcggtggcaaagaggtggttgcggatgggacgccgaatgccgggttgtacgatcagaggctcacgctcaagtgggtgcagcacaacattgcgcgcttcggaggcgatgcaggcagagtgacgatctttggacagtcggcgggcgcgatgagtgtagcgctgcagacgttcgcgtacgacggaaacacccacggcctgtttcatgctgccattatggactcgggtggtatcgcaccgggtccgctgctcaccccggaacatccgaccgtacagagcacgtttgaacagctcgctgcgggtgtcggatgcacacaggcgccgctgctcaagtgtctgaggagcgcaaatgccacgcaggtccagagcaccggcatgcagttgaccgccaaggcgggcgggacattccccgtccccggcgcacttgcgtttctgccgctcgtcgactacacgctcatcaccgactatccgagcgtcaacctggcgcagggaaagctcgccgacatccccgtgatctcgggcaatgcgctggatgagggtacgctcttcgcgcagaaggcgctcaactcgaccgccgactttgagacgtgggtgcgcagcgctgccgtcatctacaacacaacctacaccgagcgcgcgctacagcgcgtattcgagctctacccggacgaccccgttcagggatcaccgtaccccaacgagggcacgagcacctcggcggctacgctggatgtggggtcgaggatgtacgcgccgctggagtcgaaccagtacaagcgcagtgcggcgttctttggcgactttaccttcaacgcgcatcgacgcacttacctgcacgctgcggtgggcgcggccaggaagaacagccgcaacgtgtggtcgttcgagttcaggcagaacgatatgtaccccaacggaacgggttcggctctgggcgcgttccacggctccgaactcaagtacctcttcatccgacccgatgggaggcaaaaggatccgcagctcgccgagcagatgcccaggtcgtacgttagctttacgtactatcacgatccgagcaggctgtcgagtttgccctggaccaggtatacgacgggcgaggtgctgcagctcaagggcggcaatgtcaccactgtgcccgatacgtttaggaaggacgctatgcatgcgctcaccaacccgcgctcagccgccgtgtttggattctagcgctgcgattgcaatcagggatcgtggtggaagtccgagtagtcggtctcgagacgtggcgggatgacgaacagctcggcggtgtcgtcgtcggcgcgcgaaagcaccacctcgtccgtgtcctctaacgcgggatccatgggctgtagatactgcgccaccgctcggaatgccacacagtctctctgtc

SEQ ID NO: 9912 - DNA, 1616 bp, Oryza sativa
  ref <308>: DATABASE ACCESSION NUMBER: AK107260
  ref <309>: DATABASE ENTRY DATE: 2002-08-28
ctaaaatcaattaccaattcaaccgcgatgcaactataactaccctatttaaagtccgatttactattgtgcttttcagcgaaatgatatataggttacatataatctaatattatctttttcttaatctttttgcgccgcatatatacattgcaggtgcgattgcaagcggtgattgccatcatcctgtccacctcgcgggctttggcgtggccatctgcgccaacgccatcctcctccagatcatcagatggagggccaggcgggcatccatgtcagcagcacaggaagaagaggaagctcgccgtgctcccacacaggcggacctcgagaacgctctacctccaccctagtccagcttggcagagcccagtcacccccacctccctttggtttggtttgtacatatatggtaacatacaatttaatacacatagtagcatgcgtgtatattacttgttaccatatagtaccccctccagtcaagtgtatttgacattgggagtatatatatataatactcccaacgtcaaatgtgtacgtgaccggaagaagtaaaataggtagcttgtttgtctaaatatatgcctggccagttttgttaatattagaattgtttgtttttgtctctgcgaaatcaggagttatgttttattaatgagtagttggagtacagtcctttctaagcataatacacgaaaatccaagaccacaaattaagctagatacgccatttattattattagtaggctagtagcctctgctttgcacatagatgagcaacaacattgcacatttgcactctatgtgaggtgaaattcaaggaaactccgaatgagctccacaacatcaatggaaatcgctgaggctttgttacgaaggatatattctattccacgttgctataacaagcattgtgactccatgtacgacctaggtcgggtcgggcaggagagaggagcagtggcgtgcggcgcggcgatggggtagaggagcggtgcgacttccacctcctccctctccgagcactcgccaacctcctcgacacctctctctccgagcgctcgccaacctcctcgccggcatcccaatctccttcctctctgccggcgcggacctcctcgcagccaccgccggccaccacgacagtcgtgtgtgggcaagaaagaggggtgggacatctgccgccggctgcatctggcgctcatacgcgcccgccgctgtgcccgctgcgctcgctgccgcccctaccgccatgccgcgcgccgctcctctcctgagctggtgcgcggcgcgctgctcctctccgccgccaagctcgccgtagcgccggcccacatctccttctctccctccgccgccgtcacgctggccgcctctctctccctctcctgccgccatcgtccccactctgcccgaggtggcgacggagacaagtaggcgatggagggagagaggatcgaaggggagagtgtgccactcgctggcgagctcgccgtcgcgccggccgccacctctcctcctctctcgccgctgccgtccccgctccaccgccggccacctctctcccccattgccgccgtgcccgcttgagagaacccagagagaagagagg

SEQ ID NO: 9913 - DNA, 1322 bp, Oryza sativa
  ref <308>: DATABASE ACCESSION NUMBER: AK107261
  ref <309>: DATABASE ENTRY DATE: 2002-08-28
agagctcagatcagcaattcagcatacatacgacgtcgacgtacgacgacgaggaagaagaggagatcggaggaggcaggcagctgccgagatcgatcgaccgccatggagacgctgagcatgctgaaggtggggtacaccctgctgcggagcgagacgccggcgacggacctcgtcaacgccttcatggactgggcggcgcgccgctcgctgctcctcctcgccgtcttcgtgccgccctacctcgcctacaggctcgcctcctcggcgctagccgccgcgtcgccggaggacgtcgccggcaaggtcgtcctcgtcacgggcgcctcgtcggggatcggcgagcaggtcgcgtaccggtacgcgcggaggggcgcgcggctggcgctggtggcgaggagggaggcgagcctgggggaggtggcggcgagggcgagggcgctcggctcgcccgacgtgctcgccgtccccggcgacgtcgcgaggcccgacgactgccggcgcttcgtccaggccaccgtcgaacacttcggccgcctggatcatcttgtgaacaatgctggcttggccaacgtgtgctggtttgaggaggtgccagatgttgctaatttcaaacaagtcttggatgtgaacttctggggtacggttcacccgacgcacgccgctctcccccatctcaaggcgagccgcgggaagatcttcgtcaactcctcggcatcggctgtgctcgccatgccaaggatgagtttctacaatgctagcaaggccgcggtgcacaacttcgccgagacgctgcggatggagctccacggcgaggtcggcgtgacggtggcgacgccggggtgggtggactcggagatgaccaaggggaagcacctgtccagccatggcgcaatggaagtcgaccaggacaccagggatgctcaggtgggggtgttcccggtggagcgcggcgagcggtgcgcggaggcgatcgtggacgcggtggcgcgcgggcggcggcgggtcacctcgccggcgtggtacggggcgctgttcctgtggcggacgatggcgcccgaggtggcggacgcgtgccagcgcgtgttctaccaccggcggagctccgccgccggcggcggagggagggcgagggcggcgctggaggccaccggcgccaaggccgtgctgcagccgccgtcgctgcgcagctcggagatcaaagtggagtagatgacgatgtgaaggcgcgcggcttcttttgctgttgcaagctttgtgttgagaaagaaaaaatggggaataaaagtttgggaaaatgtacgtgcttgtggtgatcgatc

SEQ ID NO: 9914 - DNA, 2071 bp, Oryza sativa
  ref <308>: DATABASE ACCESSION NUMBER: AK107262
  ref <309>: DATABASE ENTRY DATE: 2002-08-28
ctaatccccaaatccagccgccacaccatcggggcgccgctctaccagagccgccgccgactaccgccgcaccggagccttcccccgcaaccccgtcgacgacgaccgctgcgccggagccttcccgtgcaaaccgatcgacgacgaccgctgcaccagatccgtcccctacttcctcgtcgtcgacagccgccgcaacgacgccttccgctgcaaccccgtcgacgacgaccgctgcaccagatccttcccccactacgccgtcgacgacttccactgcatcggagccggtaccccgtcgacgactactgccgcaccgaagccatctcccacaacaccgttgacgcctaccgccgcaccggagccgggtaccccatcgacaaggtccctgcaccgtcgccgtacctagctgatgggaagacgtcgacgtccagtagcacgagtaccctcgacaaactagacgaaagaagtgtgcgacgaagaagaaacctaccctcaagatgccaccaggagtaaggatatcaaagagagtgagggcgggtgctccaaccgaaatgcctcctggagtctcaacaaggtcagcgaaaaggcaactcatagcagaacaaggtaaaggtaatggccatgaagaactgcctctagaaacagaaaacaatggtgatgaagatgtgggcagtggacatttgcttcaagataatgatgtgaacaggcccccgagcccggtgatggactggtcatatggacatgatgccaaccataaagagcaacctgcacagcaaaccaattctgatgttgaagtacctatacgaagaggcacaagaaaatcaaggccaccaactgcaggaataatgcttgacaagatgaccaaagctatgggaagaatgcccattgctgttgccgaagggaagaaaaggccagatgaaccggtgcaagctgccaagtttgcatcagaggctggtgttatcattaggactaaagttcctgtcttccctcattggaagcagtacaaggatgatgaaggctatattaacaacttcatgggcaagttatctgtcaggttggccattaaccaaaaaaaccagccaacaagggatgcttgtgctgatgtattgcagaaagggatacgacaaacacggtataatttgaagaaggcctacttcaatggagtacctgctaacgagattagaactacctctcccataagtagcatgactgatgaacagtggctggaacttgttgcaaagtggtcaaatccaaagaatatgcaaatctctgaacagaacaagcaaaaccggcttaatgttaggttccatcaggctacgggatctcgcagctatgctgcacacttgcacgcttacaaggagaagaacaaggttgtagagcttgatgttgtggatgcctttgaggactgccataccagtagggaaaaaggtctaagtgatgctgccaaagatgcaatttcaagtatgaaagctattatggaagaacctgtacctgatggtgagacaccaagaactagtgcagaagttgtgtccaaggttctctctcgggacaattccaataccacgtttttgaaaaatgctggtctgcagatgagctccaagaaatcagtgacaccgacagaagcagcacttcaggaagaacttgcagctgaaaagcaaagttcagccattctccatgcagaagttgtcgaactaaaagaacaagcaaatcttgcaaatgaagcgctggcaaagactcaaaaggagttggcagagttcaagcagcagcaggaagagaacaatttgctccttcgacgtatcttgagcctttcccagggtaacttaaatctgtcctagtctcctttatgatcttctgcactgtgatgaactccatctacttatattagttgtttgatggttctgtgaacttattgtcatgtggtggacttgattatgtgaaatgatgtttggtgctatggtggacttaatgtcctcctatggcaaacttttgtggacttaatgtgaacatatgtgtgctaggttctgaacttttttgtaatatggtgctatgtgaagttggtatatgtgat

SEQ ID NO: 9915 - DNA, 1294 bp, Oryza sativa
  ref <308>: DATABASE ACCESSION NUMBER: AK107263
  ref <309>: DATABASE ENTRY DATE: 2002-08-28
tggcctactgggaggaaggaaggaggtgcaagctgaccacatgattaagatctagtccaccaccatcgataccaagaacgcctcgctgcctcgaccatgccggcggcgacgcctggatccggcggcgggggatcacaggcacgcgatgaggtggtcgcccccctgccgcgccgccgcctaggctgccgcctcttgttcgacgaagctgatgccgaaggtggacggccgggcggacgatggagaggcctcctgatccagttgttgccgctatcgcttagagaggagctgcattgatgtgcgctcgatccgccgccgaggatgtagcccaatccacgttgccgtcgaggtcgatgccgccgctcgatctgttgaggcagacctccgcgtcggcactgccgaggtcctcgtcacatccggcgatgaggacaggaagggggcaagggtggcgcctgatggttggatggcggccaccgtcctattgccaactcacaactggacgacgcgccgccacacctccaacgccgacaaccagcccggatctcgcccgccattcgccgatcctaaaaaaaaggggtggacagcgacgggagtagggggcgatggtggcggcgctgcgtggacgggggaggtggcggcacaagggggacgccgatgtggacggggagggtcatctcggcggcgtcgaagccagctctacctcaaacccccgccgctggatccaggcggaggacgaccgccgtcgccggatcgggcgagggacagccccgccgagcccgtcgcccgccgttggcgcaggccatcgtcgtcgctcgctgctggcgcaggccgtcgccgtcgcccgtcgttggaggaagctggagggaccccgccgcctgccgcccggcacaccgaggaggcccaagccggcgaccgcccgccgccgacctgcaatcgccgctcaaccgcctgtcgcacccgcaggccttcatcgtcgctgccgatccgtaaaaagtggagatggaggggaaagtgggtgaacggtttctacgagggagagggagggagtaaatataggcctgtttggatactccggctattaactaatccataattagcggctccgggctattaactaatccataattaacggctgattactatagaatcactgtagcaaatcatggattaatatacctcgttagattcgtctcataaaatagcctagaagttatggaataggttttatcagtaatctatgtttaaatactcttaaatagcaagattccggagcgctatttaatagccctccgaaacc

SEQ ID NO: 9916 - DNA, 1627 bp, Oryza sativa
  ref <308>: DATABASE ACCESSION NUMBER: AK107264
  ref <309>: DATABASE ENTRY DATE: 2002-08-28
aatccttgacccctctcccctctcttccttgcgtttccggctgtcactctttccagcctctccccatctccttttacccctctccccaccaccacagtatccacaatgaagttcaccaccacgctttccgctctgctcacgctcgccgctgcttcgcagtcggccgtcgctactggcgagttccagaaccttcagcttcgccagggcggcgatgccaacgcgctcctgcaggaactgcgcgacaacaacctcacctcgctcgccaacgtgctctcgcagcacccggcggtgaccgagcgcatcctcgccgacaactcggagaagacgctgctagcgcccaacgacgatgcgatcgccatgctgccgtcgtgggtgacgagcaactcttcgcgcctcgaggcgacgctcctccagcacgtgctgcgcggcaactttgagacggacaagctcaacgcttacccgctgcacaccatcggccactcgctgctcaacaactcggacttctccaagctgccgggtggcgcgggccaggcggtcgcgctcgccaagtcgggcaaccgcacctttgtcgccgaggccgtcaacaacgacacctttgtccagcagagcgtcaaggtcgacaccgtcacggtgctgcccatcagccaggcgatcaccgtgcccggctccgtgaccgacacgctgcgcttcctcggctacacgggcatctcgacgctgctcgccaacgtccagaacggcgcgctcgccaacaccatcgacagcctccccggtgtcaccatgtttgtccccaccaacgatgccatcactaagttcaccgccaccaaccccaaccccaccgacatccccacagtccttggccagcacgtggttgctgcgcgcgtggtctactcgccgctgctcattgaccagggctcgctcatctctgcctcgggccaggacattgtcttcgacaacaatgccggcacggtcaaggcgggcaactttaccgccaagatcctgcagaccgacattatcgcgcagcagggtgtcatccaccagattgacaacgtgctcgcctcgacggcgctcgacacgggacgtgccgcgcaggcgcagaagtcggccgaggcctcggtggacgcggagaaggctcagtccatctcgggccccgtgtcgggcaagaacgccatcaccacccagggcaccgacgtgcccgctgctcagcagggctccggcgccaacaaccgctcggccaacgacaacacggacaacgcaggctccggccagaccgagtctgccatcggcaacggcaccaacggcaacaacggcggcgcctcccaggctggcaactccaacggctccaacggcaacggcaatggaagcggaaaccagaacggcaacggcgttgaccaccgcaaccccaacgccgccagcgcttccacggccaacacggcgctcgccgcctcggctgttctcgccgcgtccatccttgcgctcgttctctagactttctccctctctcccccttgcctcactttgcctcgtccatcccatgggttggcgttactgtatccatacccccttcgtctcctacttgctggccccgcgcgggctcagagttgaaatgttctcacgtggttttcttgtg

SEQ ID NO: 9917 - DNA, 1413 bp, Oryza sativa
  ref <308>: DATABASE ACCESSION NUMBER: AK107265
  ref <309>: DATABASE ENTRY DATE: 2002-08-28
gacggcattacggaaaacccccaccagcagcagctacgcgaggtcggatcggatggcgtccagcaacgagaagccactgcccacaccgatctctgccgccgccggcggcagcggcggcaacgcgccgccggggaggccgacgacggtggattcgatgctgctggacaagggcgcggcgatgctgcaggcgctgcgcccggtgaagcatatcaagcagcacgtgtgcacgttcgcgctgtacgcgcacgacccgcgccggcaggtggagacccaccacttcgtctcccgcctcaaccaggacgtcctccagtgcgccgtctacgacgccgacgacaagcacgcccgcctcatcggagtggagtatatcgtgtcgcggaagatcttcgactcgctgccggcggaggagcagcggttgtggcactcgcacgcgcacgagatcaaggcggggttgtgggtgagcccgcacgttcccgggatgctggagaaggcggagctggagaagatggccggcacgttcggcaagttctggtgcacctggcaggtggaccgcggcgaccgcctcccgctgggcgcgccggcgctgatggtgtcgccgcaggacgaccccgcggcggacgtgcgccccgacctcgtgtgcaaccgggacgacaagtaccgctactccacgacggagctgcgggcggcgagggccgacgtcgcggtgccggcggagccgcgaccggggcaggccgactactggctccgccaccgcaagggcttcgccgtggacgtcgtgccgcacgagatgaagtgccacgcgccgttcccgtaagctgtgaacagtacgctggcagagctgtggcacacgactcgtgtacgtgaacgtagtagtgtaggaacgaccgtgggtcgttgtatcgtgtgtacggctccgtcgtaaactcgtaacaccaactgctaccacgtcttctgggcaaaaaatggtgcgtgacttgacttgagcactttcatgtcttggatttcacacagtttttcttttagccagttcaacaaaagcttaatcatgagtctaaaaaaatgaagttgagctagaaaaaatgaagtaagctcaactgttaggtttgagggtttattttggaaccagttcatgatttaacagattaaacacgtttacttgtttttaattatctcagttcatgatcaattttgtcatgtgggtcttctaagggtcctctaatggttcgcacgcaaaactaagtctacactcagaacctatttttatatatagacctcttaaggtatttttatagacagacctcttaaataagagggtcgcatgtatagttggtaagagggtcgcatgtatagttgggtctcttaagatgatcgtctatttttatagatagacctcttaaggtaagaggatcgtctctt

SEQ ID NO: 9918 - DNA, 1836 bp, Oryza sativa
  ref <308>: DATABASE ACCESSION NUMBER: AK107266
  ref <309>: DATABASE ENTRY DATE: 2002-08-28
agacatttgttgtgtacacccaatatatatctggtcctgctaaaccgaaagaagctgcattcgaaggcttctgtcgcatctgatccaagcccacacgcgctaaagcgttcgacacatattcaagatgcaggccccagtgatgtttgtcaacactggcaacggtgagcgccagaccggccgccaggctcagatgtctaacatcaccgccgcaaagaccgtcgcggacatcatccgatcatgcttgggccccaaggccatgttgaagatgcttctggatcccatgggcggcatcgtcctcaccaacgacggccacgctatcctcagagaaatcgaagtcgcccacccggcggcaaagagcatgattgagcttgcgaggacacaggacgaggaggtgggagacggcacaaccacggtcattatccttgctggagagatgctcgcactttcgctaccacaactcgaccgccacatccacccagtcgtgatcattcaggcatacaagagggcgctcgccgatgcgctctcggtcatcgaggaagtctccatccccgtggacgtcgacaacaccgaacagatgaggcagcttattggttcttcgctcggcaccaagtttacttcgaggtggagtgatctcatgtgcgatctcgcgctcaaggctgtgcgcacggtgagccacaacgcaggtggtggaaagcaggaggtggacatcaagcgctacgcacgtgtggagaaggtgcccggtggtgagattgaggactcttgcgtgttggacggcgtcatgctcaacaaggacatcacacaccccaagatgaggagacggatagagaacccgcgcatcgtgctgctcgactgcactctggagtacaagaagggcgagttgcaaaccaacatcgagatcaccaaggaggaggactggaaccgcattctgcagatcgaggaggagcaggtcaaggccatgtgcgatgcaattattgctgtcaagcccgatcttgtcatcaccgagaagggtgtctcagacctcgcccggcacttccttctcaagcacaacatcaccgctctgcgccgtgtaagaaagaccgacaacaaccgcattgcccgcgccactggtgccaacattgtcaactccgtccacgaccttacagagcaagacgtcggcactcagtgcggcctcttcgacatctccaagatcggcgacgagtacttcactttcctcaccaagtgcaaggaccccaaggcttgcaccatccttctccgtggaccctcaaaggacattctgaacgagattgaccgcaacttggccgatgccatggccgtcgcgagaaacgtcatcttccaccccttcctcagccctggcggtggtgctaccgagatggccgtttccgtccgtctcgcacaaaaggccaaggctgtcgagggtgttgcacagtggccctacaaggccatcgccgaggccatggaggtcatcccccgcacactcatccagaactcgggttcttcacccattcgtgtcctgactcagctccgcgcgaagcacgccgaggacgccaacaagaacggcgcacaaggcggcggatcttggggtatcgacggcgatgcgggcaagatcgtcgacatgaaggagtttggcgtgtgggagcctcaggccgtgaagctgcagagcatcaagacggccgtggagagcgcgtgcttgctgctgcgcgtcgacgacattgtcggtgccaaggctgcgaagacggcgggtatgggcaccggcggtgcaggtggcgatgaggactagatatgccttgacgacgtatagaattaaagaaaagaaaaatgaacaaggctgtatgaacg

SEQ ID NO: 9919 - DNA, 1848 bp, Oryza sativa
  ref <308>: DATABASE ACCESSION NUMBER: AK107267
  ref <309>: DATABASE ENTRY DATE: 2002-08-28
aagtcaaactgagttggtcaaagaacaccattattgatcgactgttatatgtgaggcaaactggggaaccaaaaaatacttatatgctgtgaaatcttctctcttttttgttccggtgatttgtgagattatttattattcatttttatctactcgtgcttggcgtacgtacacgagttttgtactcatctctcgtgtctctgcctcttttttccctctcccctccgtctcaattggtacaacaaccatgagattcctcgcagtcgcctcagccctgtggcttaccctctgcccatccgtcctcgcccaagacatttcagcttcaggctctttatccctcaactccaaccagccctcatggacctttgactactccactcaaaacgccaacgaccagaactggatcggtctgtactacacagcaggcggcggtcccgtcgaccagaagaagggctcgtcaaactccatcaagtggaagtgggcgcctagctctcaaggctctgtccagatcgacaccaacagcctcgagcctggtaactacactgctttcttcctcgctcaaaacggttacacgtggttggcggagccgctgcaggtcatcaagggtcgtgagtttggtggggatgtcagctttattgtggctgatgtctcgcttcctaatgcccgtgctggcgacaagtactcccacagcgtgaggggtcttgttcgtggtggaagtagtgatgtgaccttttccaaggagagtggtagtgccgattggatcaaggttagtgaggacggtatcatctctggaacaccttcttccagcgctgatgaagctgtcgttactgtccgagctactggtcgtgattccgccacatccgctgccttcaagatcagtgtcgctggctccggcaatgctctcatcagcactctcaaggtcctctctcttaacatgtggaacggcggtactggtgttaccaactatcacgacaagcaagtcaagttccttgcttcatgtggcgctgatgtcgttggcatccaagaagatcaacaaggtcgtcacgtccctcgtctggccgatgcccttggttggtaccactggtccagcggcggtgatgtcggtattcttagcaagtaccccatcacccaggactatggcgtcattagcggtcctgctcgctccggtggtgtcaagattgctctcgatggctcaaacaaggagatcaacttcttcgtcgctcaccttggctacacaccctacggcccctatgacacttgcttcgaccactaccccgtcgacaagatcatcgagcgtgaagctcagtctggccgcactcctcagatgagggccacccttgctggtatgaagtctcaactcgacaacgctgacgacactcccgttttcttcgtcggtgacttcaacgccccctcccatctcgactacaccgaaggtctcaaggagaagaactgcggctactcaggcatcaagtggcccacctccgtccttcccgaggaagccggcctcatcgactcattccgcgtcgcccaccctgatcccgtcaaggagcaaggcataacctggtcccccatctacatctggaacggtggccgccgtcgtcctgagcctctcgacagaattgactttgtccttcacaagggtaagggactcaaggttaccgactctcagaccgtggttgttggcgagcccaggcctcagcccaaccacaaggagaatgagtggttctctgatcaccgggctgttttgacgacttatgagatttaaataaatggggagtatcgaacgacctcaacgacgttacgattgaatataagtaaacaaatagataaataacaaatatttcaacc

SEQ ID NO: 9920 - DNA, 1366 bp, Oryza sativa
  ref <308>: DATABASE ACCESSION NUMBER: AK107268
  ref <309>: DATABASE ENTRY DATE: 2002-08-28
agaaacccatgactgccccttcaccatcgccaccaacacaccgttaggctcgacaaagatgggctactccgactctagaaagtctgacgagaataatacctcgtcaaagccagcaagtccagtggtgtctagtgatgttgtagagatcaaggaaacatgggaaaatgttgtcgttgcggatgaagagggggaaggtggcgaggatggcttcgctagcgatgctagtgaatctaagtccaagagctcatctgatgaagttgattatgagctcttggatcttttggcaggtgcaagtgaaggatgcagcggaggaaacaacaacgatgaagtgaaaaactttgcctatgcagaccacaagatgcatgttttgagagagagggagagaaggaaggagatgaaaaacaagtttgagattctgcatgccctcatccccaacctcccagaaaagactgacaaggccactatagtggaggcgaccataaactatatcaagaacctccaagacaaaatccataagatggagatgctcaaggtggagcgcgagcatgccatcgctctcgccaccgccgcaaccgccaccgccgctgcctctgcggacaccgcgctgcaggcaccgccgccgtcggaggaggagaatgaggagcacgactccgtggtggctgcagcgacgagggagatggccctggctgacatggtgcacgcctgggagcagcagcaggaggccgccgccaccggcggcagccatggcggccacgccgtgccgccgccgccgcccgctgcttcgctccagacgtggacggggcccaacatgacggcgagcctcaccggcgatgacggcttcatcaccctctccctgccgcatcagggcggccagaagaacctcgtcgccggcgcggtgagcgtcctggagcgccaccacatcgacgtcgttacggccaccgtctcggcatccgagcagggcgacaacctgatcagcctgcactgccatctgagtccagggagctctagctctcagaacctgacgcctctggacaagttcaagctggcaatgtcagagctgatgctttgggtgatctccgtctgagaagaatgcctataaatgccatgaataaaaaagcaaaccttttctgggtttagctgcttccgtcgtcttcgtcggaatgaacaagtctttgatttgcttcaaatttagtcgtcgttgttgaattgaactgctttaaatttaccattcttcgcaagtctggtttgagttttcagacataataagttgtgtatgaggtggaacctccagttaattgtcgtttgcagacaatgtttgtttctaataatttgcagtaattgtgggtttgcttatttggtttgagag

SEQ ID NO: 9921 - DNA, 1461 bp, Oryza sativa
  ref <308>: DATABASE ACCESSION NUMBER: AK107269
  ref <309>: DATABASE ENTRY DATE: 2002-08-28
attcttcacagccgccgccaaggctctaggttttgtcgagctccttcctttgccataggctcagctcgtcaaatatgtcttagagtcgcgaagatcctcttgaaacgcttcggatggggagcgactggtcaaccctgacggggtgcttggtgatgctgatcgccgagcgcctactggccaacgacgtcacggactacatccgcttccgcgccgtgtgcagcccctggaggcagcacaccgaggacccacgtgtcggcgacggcctccgccccaagtacctccccaggtcgtggatcatgctggaggagacccccccggcggcggcgccgttccgcaaccgcctcctcaacaccggcaccggcgccgtcctcgccgtcgacgtcccggagctcaaggaccacgacgtcatgggccccaccctgggcgggctcctcacgctgcgggagcgcggcggcgcccacgtgctccgcctcctccacccgttcacgcgccacctcaccgagctcccctcgctcgtcaccatgatccacgcggcgtcgcacgacccaaagatggtggagcccgagtaccaccagccgacggccatcggcctctccgacgaccacaaggcggtggccgtgttctgcggcctggtaaacaaggtcgccgtggccaggcccggcgacagccactggaagtgggtctacgtcccgcacttccacctggagtcggccgcgtcgctcgccggctgcttctacgccgtctcgcacgtctacatctaccagctcgagagcgacggcgcgcgcggggagccgaagctggtgcccgtggcgtacgtgcccgtggacgccccctcgttccgcctcacgctggtggcggacgacgagagggagaggctgatgctgatgaaggaggtgttctacgtgcacgcgggcgaggaggtgccaccggaagggcccgacatgctgacgatgcccagggtgtgcgtcgcgtacgcggtggacatggcggcgaggacgatcgcgctgtcgaggctgggcgcgcgcgcgctgttcatgggcgacgaccgcgcggtctgggcgtcgccgggggcgttctccccgggcgtcgcggcggacaccgtctacgccggccgccccaacaggctcttcaccgtgcacgagtgcggcatcgaggccgaccgcccgctgacggtcgtgctccacacgcacggcctcgtgagcgggctgacgcggcatgccgtgttcgagagcgacgacggcgaggacctgaaccccatgggcatcgtcgagaccgtctccagctacgtcgccagcgaccgcggcggcgcggcgcgcccgaccatgtatgtcgccagccatgcccgccgcggccgtggccgtggcgtgtagttcggctgataactgtggcggtgatgactgatgaggaattcgctctggaatttcctcctgaaataataaaaatagtggttggttcttcctg

SEQ ID NO: 9922 - DNA, 1608 bp, Oryza sativa
  ref <308>: DATABASE ACCESSION NUMBER: AK107270
  ref <309>: DATABASE ENTRY DATE: 2002-08-28
actatatcaaattctacgcacaaactgtagtgcaccagaattttgctaccaatggagctcccaagaatggccagtcgtcgtcttcctctgccactagtagctcaactcgttgtcttgctcggcttggcttgcgggctccggtcgtcgtcggcggcggcggcggcggcgagtggccttgccggtgaacgggttacatatctgcccgggcagccgccggtggacttcgacatgtactccggctacgtcacggtggacaagcgggcggggcggtcgctgttctactggctgcaggaggcgccggcggcggcgcagccggcgccgctcgtgctgtggctgaacggcgggcccggctgctcctccgtcgcgtacggcgcgtcggaggagctcggcgccttccgcatccgccccgacggcgccaccctcttcctcaacgactaccggtggaacaaagtggcgaacatcttgttcttggactcgccggccggcgtcggattctcatacaccaacaccacctccgacctctacgattccggagacaagagaactgctcatgattcctataagtttctggtgaaatggttcgagaagttcccgcagtataaataccgagatttctacatcgccggggagagctacgcagggcactatggtcctcagttgtcccagcttgtgtaccgtaacaacaaaggcgtcaaggagcccctgatcaacttcaaaggcttcatggtggggaacgccgtgacggacgactaccacgactacatcggcacgttcgagtactggtggaaccacgggatcatctccgacggcacgtaccggctgctgaacgcgtcgtgcgtgcacgactccggcgagcacccggcaccggcgtgcctcgccgcgctcaacgcctccacggtggagcagggcgacatcgacatgtacagcctctacacgcccacctgcaacgagacctccacctcgtcggcggcggcgaggcagcggcggctcaagcaaggccactatccgtggatgacagggtcgtatgatccgtgcacggagagatactcaacggagtactacaaccggccggaagtgcagagggcgctccacgccaacgtcactggcataaactacacatgggcgacgtgcagtgacatcctcaacgacaactggagagattcgccaaggtccgtgcttcctatctaccatgagcttattgcagctggcctaagaatatgggtcttcagtggagacacggacgctgtcgtccccttgacagcaaccagatactccatcgatgctctcggccttccaactactgttagttggtacccttggtatgatgccatgaaggttggtgggtggagccaagtgtacaagggcttgagcttggtaaccgtccgaggcgcagggcacgaagtgccgctacaccggccgcgccaggcgctcatactctttaagcacttcttgcagggcaagcccatgcccgatgcgcctacaaaagtacaaaatgaagcctagatttgttaatctttattgtaattgaaatatttgtagcaataaaatggaaaaaaagcaataaaaatcattccaatcaaaaaaattaaagaaagataatggataaat

SEQ ID NO: 9923 - DNA, 1655 bp, Oryza sativa
  ref <308>: DATABASE ACCESSION NUMBER: AK107271
  ref <309>: DATABASE ENTRY DATE: 2002-08-28
aaaagcattgagttcagtcccacaaaaacatggcaaccatcaaattccctatagttttctccgtcgtttgcttgttcctcttgtgtaatggttcgttagcccaacttcttagccaaagtactagtcaatggcaaagttctcgccgtggaagtccaagagagtgcagatttgatcggttgcaagcatttgagccgattcgcactgtaaggtcccaagctggtacaactgagttttttgatgtctctaatgagttgtttcaatgtactggagtatttgttgtccgtcgagttatcgaacctagaggtcttctgttacctcactactccgatggagcaactttggtatatgtcatccaaggcagaggtataacaggaccaactttcccaggatgtcctgagacctatcaacaacagtttcagcaatccgagcaagaccaacaattggaaggccaaagccaaagccataaatttagagatgaacatcaaaagatccaccgttttcaacagggggatgtagttgcattgcctgctggtgttgctcattggtgctacaatgatggtgatgcaccaattgttgccatatatgtcactgatatatacaatagtgctaaccaacttgatcctagacacagggatttctttttagctggcaacaataagataggtcaacaattgtatagatatgaggcaagggacaattcgaagaacgtctttggtggatttagtgttgaactacttagcgaggctcttggcataagcagtggagtagcaagacaactccagtgccaaaatgaccaaagaggagaaatagttcgtgttgagcatgggctttccttgctccaaccatatgcatcgttgcaagagcaacaacaagaacaggtgcaatcgagagactatggccaaacacaatatcaacaaaaacaacttcaaggtagttgctctaatggtttggatgagaccttttgtaccatgagggtaaggcaaaatatcgacaacccaaacctcgcagatacatacaaccccagagcaggaaggatcacatatctaaatggccaaaagttccccattcttaatcttgtacagatgagtgccgttaaagtaaatttatatcagaacgcactcctttcacctttttggaacatcaacgctcatagtgtcgtgtatattactcaaggtcgtgcccgagttcaagtcgtcaacaacaatggaaagacagtgttcgatggagagctccgtcgtgggcagcttctaattataccacaacaccatgtagtcattaaaaaggcacaaagggaaggatgctcatatattgcattgaaaaccaaccctgactccatggttagccacatggcaggaaagaattccatcttccgcgcacttcctgacgatgttgtagcaaatgcatatcgtatctcaagagaagaagctaggaggctcaagcacaacaggggagatgagttaggtgtgttcactcctagtcatgcctacaagagctaccaagacatatctgtgagtgcataaccaagaaatgtcaatcataggcttggattgctaaggatggttttcaaataaatcataagcaataaaagagtgcatgttgttgcagctatgtaatagtggatggttggaagaataataataaatttgtgttccttt

SEQ ID NO: 9924 - DNA, 1145 bp, Oryza sativa
  ref <308>: DATABASE ACCESSION NUMBER: AK107272
  ref <309>: DATABASE ENTRY DATE: 2002-08-28
aacagcatatgacgacgagagccacacggtatatcgctcctatacttgcaagcactgcaagagtcccatcatcaagctccacaagaacaccggctctacagaaaataggacgtatcaacatgtcgagcgttgcacaagcttcggcagccaatggggggtcggccatgcacaagatcgctcgcaacggcttcgattcgtccggaggttcggggttgtacgatcgcgcgcgtccttcgtacccaccggcggcgatatcgacgatcatcacggaggcgaccaactcggcgtcgccggcgcctcttcgcatcgtcgagctcggagcgggcacaggtattgctactcgcatgctgcttgctgctgccacttcggctgcagccgacggcacgccccctccggggatcgcatcgctcacagccatcgagccatctgagggcatgcgatcgcactttgagacggccatcgcctcgggtgccgattcgctcaagcaccagatgcagagcaaaggtctgctatctccgcaagcgagcatctcggtggaggagggtggattcgagagctttgatgcgggcaagggtaacgatgcggttgtagtggcacaggcctggcattggtgccaggattgggacggtgcactcaagcaggtcgccaacgccctaagggccaacggaatcctggcgctcatttggaacctcgaggacagggaggctgccccgtgggtggcaaatatccgcgatctgtacgaaaagtacgaagacaacacgccccagtacaggcacatgtactggcacgccatgtacaaggctcccaccctggcgagcgaatttgtcgcagacgagccgaggcactaccaccgcaccatcccaactacgatccagggcgtcattgatcgtgtactgtccaagtcgtacatctcggtactgccacaggaaaagcaggaccagctcgcaaaggacattaagagctatctcgatactaccccggacgaggtgctcggccgcaagtggatcgacaaggaagcgggcgtgtgggaatatccctaccgcaccgacctcttccttttccgccgcaactagatgctctcacaccgcgcgatccacacgcgcaatgcttaatctgaatgtgccaaagctcggatctcttgcacc

SEQ ID NO: 9925 - DNA, 1513 bp, Oryza sativa
  ref <308>: DATABASE ACCESSION NUMBER: AK107273
  ref <309>: DATABASE ENTRY DATE: 2002-08-28
tggcctgcacaccaaatcctccctttttgccaaacaaacccgtctccgtctgacccccaatatggccaccgccgccgccgccgatgtcccctcctgccgcgacctccccgccgccgtctccgccttcgccgacgccttcgtcgacttcgctgtctccggcatcttcttcccctccaccccaaccccctcaccccctcctccccctacgccaaccaccttcctcccttcccccacccgcctcgtcgccatcggcgacctccacggcgacctccccaagtccctctccgccctccgcctcgccggcctcgtccctccccacgaccccacctcctggtccgccggccccaccctcgccgtccagctcggcgacatcctcgaccgcggcggcgacgagatacgcctcctctacctcatccgccgcctcgccatctccgccgccggccagggcggcgcgctcctccccatcatggggaaccacgaggtcatgaacgtctccggcgacttccgcttcgccacgccccagggcctccgggagttctccgcctgggcgggctggtaccgcgccggcctcgccatcaagcgccgctgcgcccgcggcggcgatggcggcgacccgccccccaagaacccgttcctgggaatccccaaggagttccccggcgtcaagccggagttctgggatggcatccgatcccgcctcgccgcgctcctccccgacgggcccatcgcgcggcggttcctcgccgacctccccaccgtgctcgtcgtcggcgactccgtgttcgtccacggcgggctcctcgaggccaacgtcgaatacggcctcgagcggatcaatgcggaggtcagcgagtggatccgcggcgagaggggcgccaatgccgtggcgccggagtttgtgcgcggccgcgacgccgtggtctggctcaggaggttctccgacggcgtcaattgcgattgccagcggctcgagggggttctcgggatgatcccgggcgccaagaggatgataatggggcacacgattcagaccgaggggatcaatgcggtgtgcggtgcgcaggcggtgagggtggatgtgggattgtctagaggatgcggtaatgggctgccagaggtgctcgagatcaatggtggcggcaccaatgtgagggtgatcacgacggatcccgcggaggcctggcagtaccggaagcagggggcggagaaggccgccatcgctaccgcggtgaaggagaagaagggggaggtaaaggaagggcttgcattgttggtaagggagagccatgggttgaaagaggtacaagctaaggcggcttaattagttcagtgtggtaacttcagggtaggtaacattttggtgactcaattgggattgcacggtaaattgggtaacaaggatagaaaggatgatatgttgaaactgtttgtggattcaataatggaaagaaaccattatcatcattatttatcgagatgtgctaatcaattgctgatatgtgcaaattgtgag

SEQ ID NO: 9926 - DNA, 1517 bp, Oryza sativa
  ref <308>: DATABASE ACCESSION NUMBER: AK107274
  ref <309>: DATABASE ENTRY DATE: 2002-08-28
atcgacaaatcgacacagccgaagccgtcgtcgtcctgcttcctcctcccccgcagtagtcgccgtcgccgccgcgcaatccccaatcccttggtgttcttccccgcctctcgccacccaaaaccctaacccccctctctcactccacccgtgctgtgcacatggaaatccccaatcagatcagcggcggcggcggcggcggatcggttgttatagaaatcccggccgccacggagatcgccggagtggataccgcgccggcaaaggtatgtgacgatgatccccgtgctcaacccctccgcgaccgcgagtgggtgtcgcagctgcccccggaccaccccctacgctacacctgcggccttccgaacggggtcttcctctccatgtccttcgtcaccatcatctacgccgtgattgctccatggatgctgtggcgcgttgctaccgatcatgtgtccctcatgtggacatcgtcgatcctcgcgtgttcctacggcgcactgtggactatagccttgtccgaacggctagcaggtgccttcttggctatcatcttccgcgtctcctatgttgccttggtggccttcgcgtccacgcacctgattggtaccgccaatgggatctcgatcgtgtatctcgacacgttctacgttgctgggatgctcgggtacgccgtcgcggagtatcgtctccgtcgtggtaccgagcaatgccctagcgccatcttagccgccaaacctcctccattggaggaccaagagcgaggcgacgaggaggccgggctctactacatgggcttcttgtttggttcggtatccctctgtttggtggggaggatggcgtggctgcttctctacccctgcggcggcaagtgtctcatctcttacgtcatcgaggagctctcgtttgaggcatcaatgctgatctacatatgggttatctttgtttcccttactcagttggaaggggctctggtctgttacaacactctgttctgcaagatgccaatttgttttggtgcatggttcgttcttggcgtgcttcttggcgtacctgtgagtggtgctattgagatgctaatcttttggattggcactatggctctggctggattctttggatactgtctcgcggttcacgcatattgcaaaaggaatcagaagacaccagcttagagatttgcgggagctttgatgaccgttttgagaagccaggctttactctttgttgctcttagagaccaaagagcgattttaaagtatgatcaagatctcattctctaggtgtttggttgagtgctcttagaggcagagtaacgccaatgcctattgtgtgtagtattaacttacattgtatggtaaagtttattgtaaatgttgctgattgtgcataattggaaggtggtgactggatgaagaaatacactgtgttaggttcaggacgaaaaaggttaaggatatgcagaagtagcatatctgatgcaggcgtatatatatattgcaatatccgtctttagc

SEQ ID NO: 9927 - DNA, 2661 bp, Oryza sativa
  ref <308>: DATABASE ACCESSION NUMBER: AK107275
  ref <309>: DATABASE ENTRY DATE: 2002-08-28
actccacatctcttctccatcaagaatcaatcactcgctcgtcttctcctccattggagctctcgatcgagcttagctttgcgcttcgttcatccatggcgctcatcggcacggtggcggccgaggtgctcatcccgctcgcggcggtgatcggcatcctcttcgccgtgctccagtggtacatggtgtccagggtggccgtcccgccgcacgacggcgtcggcggcgccgggaaggtggagagggagagcgacggcggcgacggcgacggcgacggcgtcgacgacgaggaggacggcgtggactaccggggcgtggaggcgaggtgcgcggagatccagcacgccatctccgtgggcgcgacgtcgttcctgatgacggagtacaagtacctgggcgcgttcatggcggcgttcgcggcggtcatcttcgtctcgctgggctccgtggggcggttctccacgtcgacggagccgtgcccgtacgacgcggcgaggcggtgccgcccggcgctggcgaacgcggcgttcaccgcggcggcgttcctcctcggcgccaccacctcggtggtctccggctacctcgggatgcgggtggcgacgttcgcgaacgcgaggacggcgctggaggctcgccgcgggatcgggcgggcgttcgcggtggcgttcaggtcgggcgccgccatggggttcctgctggcgtcgagcgcgctgctggtgctgttcgccgccgtgaacgcgttcgggctctactacggcgacgactggggcgggctgtacgaggcgatcaccgggtacgggctcggggggtcgtccatggcgctgttcggccgcgtcggcggcgggatctacaccaaggcggccgacgtcggcgccgacctcgtcggcaaggtggagcgcaacatccccgaggatgacccccgcaaccccgcggtgatcgccgacaacgtgggcgacaacgtgggcgacatcgccgggatggggtccgacctgtttgggtcgtacgcggagtcgtcgtgcgcggcgctgttcgtggcgtccatctcctccttcggcgccgaccacgacttcgcggcgatgatgtacccgctgctggtgagcgccgccggcatcgtggcctgcgccgccaccacgctcgtcgccaccgacgccggcgagctcggcgccgccgacgaggtcgcgcccgcgctcaagcgccagatcctcatctccaccgtgctcatgaccgccgccgtcgccgccgtcaccttcctctccctcccccgctccttcaccctcttcgacttcggcgaacgcaagctcgtcaaaaattggcacctgttcatctgcgtctcagctggtctgtgggcgggattggtgataggctacgtcaccgagtacttcacgagcaatgcttacgggccggtgcagacggtggcgcagtcgtgccggacgggggcggcgacgaacgtgatcttcggcctcgccgtggggtacaagtcggtgatcgtgccgatcttcgccatcgccggcgccatctacgccagcttccggctcgccgccatgtacggcatcgcgctggctgcgctggggatgctgagcaccatcgccacggggctcaccatcgacgcctatggccccatcagcgacaacgccggcggcatcgcggagatggccggcatgccgcggcgcgtgcgcgagcgcacggacgcgctcgacgccgccgggaacacgacggcggcgatcgggaaggggttcgcgatcgggtcggcggcgctggtgtcgctggcgctgttcggcgcgtacgtgagccgggcggggatccggacggtgaacgtggtgagccccagggtgttcgtcgggctcctcgccggcgccatgctcccctactggttctcggcgatgacgatgcggagcgtggggagcgcggcgctgcggatggtggaggaggtgcggcgccagttcgacgagatcccggggctcgccgaggggctcgccgcgccggactacgccacctgcgtgaggatctccaccgacgcgtcgctgcgggagatggtggcgccgggggcgctggtgatggcgagcccgctcgtcgccgggacgctgttcggggtggaggcgctggcggggctgctcgccggcgcgctggtgtccggggtgcaggtggcgatctcggcgtcgaacagcggcggcgcgtgggacaacgccaagaagtacatcgaggccggggcgacggaggaggcgaggtcgctggggcccaagggctccgaggcgcacaaggcggcggtgatcggggacaccatcggcgacccgctcaaggacacctcggggccatcgctcaacatcctcgtcaagctcatggccgtcgaggcgctcgtcttcgcccccttcttcgccgcgcatggcggcatcgtcttcaaccacctctgatgaagctgagctccattgctaataaattaagctgcatgcatgctctcgccatgatcgatcagctgcacctgcatgcacgcatggataaacaagaagaagacgatgagcattagggttccttaaccagttgaaaccgataagagtaataattgtagctcgggataatgcagtgtcagatgtaatccaaagtgtcttgttgcttgggatatgtaatgcggtttgagacttaggatgtaatccaatgttgttttag

SEQ ID NO: 9928 - DNA, 947 bp, Oryza sativa
  ref <308>: DATABASE ACCESSION NUMBER: AK107276
  ref <309>: DATABASE ENTRY DATE: 2002-08-28
aacgccagggcaaatgttacatcgcgcctcgcgtctttacccctcatgtactcgcttcgtttagctagcagcggcagcacgggactcggcttcgcgctcggccggctcggcgggaggagtggcggcggcggcggcggtggtggtttagcgcccgcgtcggcgtcgtcgtcgtcggtggtatccgctcgcacgaggaggaccgtctccgtgacgcccaacgccgcggcgccgactccgggcgagcagggcgtcgcgatggagcagggcaagcagcagcaccagccaccacctccgtcgcagccgcagccgcagcaggagaagcgcggctcccgcgacgacgacatgcacaagaccacaggggacgtgatgacccactctttcggggagggatactagacgcggtcggacgaggaagggttcggtggcgtgtacggacagaacgacccggtgttcaaccctgggaccgaggtgcaccccagccaccctgagtacgacacgtcgcaggggtcggaggtgaaggagaaggagaaggcgcgccaccataaggacgacaagcacgcgacctaagcctagcagttgggggctggattaggtcctaatcgtagtttagtcgggcatgacggggatcacccccatcatcacctgtgcatccacgttgccctatctttgatgggcactagttgtatcttttgcttctgaactgttttgatgcatttgttttattccttagatgtgatgtaaaatctctacagtacttaattagctatgtactggtactgtgagttctccagcgcttgtgtctcctggtgtgtgtgatcatgtaatgatgagtcgattcatatatatactccctcctcctccgtcatcccttctataggattttcaaaaaacatcccttctataggatttgtataataaatctgtaataaaagagattttaggtggct

SEQ ID NO: 9929 - DNA, 1305 bp, Oryza sativa
  ref <308>: DATABASE ACCESSION NUMBER: AK107277
  ref <309>: DATABASE ENTRY DATE: 2002-08-28
ataggaatcggtgaaagcctaagtggatagggctataggagcatgcaaaagcttctacactagaaaagctatagaaatctaaaggcatctctctacccccatccccatgggctattccttgcctaaccgacacataaaggcatgaacgaatggtggcgacaggtgatggtggcggcaacggtacctctcgccaccacctcgtccccatcccccgccactgccaccttcctaccaacaccttcaaccaccgccaccgccattactgtccctgttggctgcttggctctgtcgatctagagaagggaaggggtgaggtgaggagagggagcggcagcatggtggagatgaagagtacgacgccggccagcgtcctcatagatggtggtgcggccaatggcaatgacggctagggaaggacgaagaggtggtggcagcacatgaagagcagcagcaaaggcgaaggcggaagaggatagagcagtggaagatacgaggctcggggatctctccgacgaaggaatccactccaccggcagccgcgccgatgaaatcgccatccgaccaaatcgcctcctctctcgtgcatcagtggaaatcacatgtatgaccgaggagcgcgcgcaacctgagcctagcgccgggatagccggaacgatgaccacagacagatggagctcgtcgccggcgagctcctccttcacgcgcagcgcgctggtgaacgccacaatcaagagggtggtcgtcgtggtgccgtacaacatctctgtgctccagatcagcaactttgtcgtgccatcgggcgtccttacgaggccacaaccgctgctcccgaccgccgtcgctgccgctccccaaccgccaccgccgccaccgttcccctccgcctcgtccccaccgccaccgccaccgttcctgagagagagagataagggagagagggggaggaagaagggagagggaggatgacatgtgggtcccacaatactttttttatgaatgacatatgggtcccacatatttgttttatttttgtttttatcctaatgccatgtatctacatcagagattagcctagacaaacccaatccggtacctacggaggccggcaagagagatctaatgctatctctgatctcatcgagttcatattcgaggagaaaggctacctcgtcgtcgagtacgagttagtgttcatgccgccaagtcgacgatggctagataggttatcccaatcgtctcaattgttgtattctgtgattttctatatcaattccatataaacaggatgtagggttattgcctgtc

SEQ ID NO: 9930 - DNA, 2766 bp, Oryza sativa
  ref <308>: DATABASE ACCESSION NUMBER: AK107278
  ref <309>: DATABASE ENTRY DATE: 2002-08-28
atccctcctcgcggtctttccgagcatcttcgtttcggccgccactcttttacggctgtggccgcagcacgcatctttggcgtcgtctctcgtcgcgaatcggatctgccgtcaccgctgctgtgatcgtcgcgccgccactcagcttggcgacgtgacgaggtctcgcgacccctccgccttgcaatccgtaggcgcccgcgctccaacatgacgtcccctctgcgccggtccacgcgcggcactaggaatgccgacgcaacagcaacctcacccgagccatccgccatgtcgccttcagcatcacctataaagctcgatcgcaagcgtaagcgcctagatgagcccgaggaacagcccgccgagctgcatacacccgatcagcatgcatcggctgcagcatccaacagcgctgccaacggccactcggacgcctcagccccgtccgacagggctgatggcgtcactgacgacactgcgacacaagacgccagccaaaagaagcagcttccaccgaacctgcaggcgcttctcggcatctccagctcgcgcactacacaaccaccagctcaagacaagaccgccgacgaatcatcgtccagcaaggtggatgagctggtgctgctcgaggaggacgctacaaagctgctcgccatcgccgacaccttgaacgtggccgaccttactgcgaccgcaccgcaaccagatgtcaagggcaaatcgcgcagcgccacagcatcatcgacggcatcgcatgcaatccgcgctatcttgcaacccggcacgcccctgcgcgatgtgcgagcacgtctgctcagcgccagggagccgcttctgtccaagccacaggtggcccagcatctgcgcacatcgcagaccgcgactccgcctgagtccctctcaacagacctggcccacctttcgagcctcaccctcatccttggcctcgtcgatcagcttgcctcccgcctgcgcgaatcgcaccccacaccgacgccatcaaagccgagctgctttgcgccgatgtggaaacgcgagcacgtctcttggagagcaggatggcgcagacagccaagacaggcaaggctaccgcaacccagagcgcctgggtccacgtcagaccaccaggagaccgcccctcggacgctgaagcgaccaacagatacgctctgcacatgcgtctgcctcgaggcgactacttcaccaaagcaatcccgctcgattgcgaccagctcaagaaactcgaccccgcccaggccgacattgtgcagatcagcgcgcaaagcgaagagcagatgcgcacgctcaaacgccagggccacgtgcccactcccacgctcggacagaggttgggaagaagcggccatcgacaccgaagcgactccaagcgatccatgcagcccaagcttcagccggtgacgttcctcaactacggcaactacgcttcctttgcaccctcgtacgactcgtcggcatcctccatcagctacgccaccagcgcggcgctttggcgcacctctgccaaagcacatcgctcgctatcgctgacgtggggcgcaaggcccttccaggaggaggctctgctcgcagacgacgacgaagacgacggagaggacgcggaaacttcttctgaagccattgccgctccggctgcgctttgcggtgccgcacatgtggacgctgaaggcgatgttgccatggaagactcgccggaagatgacgttgctgctgcactgcgcgagctgctcgatggcgtcgaccaaggaggtgtcaacgagagcttgcacaagctcagcgaggacgagctgatcacctcgcatctgcgattcaacatgatgctgctccaccgcctgcaggagttccaatgggcgcgtcttcgcaggtcctacggcccaggtgcctcttcacgcaaggccatcctggcgaccgaggaggaatcgccgagcgccgacgaggaggccaccgccgcactcttgttggagtcgctgagcgccttggtggcgctgcagccgcgcgctgttgatcttgcctcggaagcggtcgagagcttggtgccgcatgcgagcaagctgcgtgccttctcagccagcagtggcgccatcgacccggatctgctcggcgacgttcgcgatgggttctggggagctctggatgccaacgtggtcaagtccacgcgcagcagcgtcgtcgcttccgagactcccttgctgctgcgcgacgacgtgactgtcagactggccgatggcagcggatccaaggccaagaagacgtcgcgcaggattgggcccggcggcacgcaggtggaggaacgtggtcgtggaactctggagcgattcgcatcgagccgcacgtatgaccagagcaacgaccgacacgatgttgagccagcgcgaatgaccgatcctcaacacgcaacgctggcccgaagcccctcgaaaggcgatgaagctccctcagcaacgcggacaccctcccaggggccctcgcacgcgtcgccgatgcctgcccacccacacatgcacgcagcatacggcccgggccaagcacagggcatgacgccgcagtcacagcgcctcatgccggggggcaattcgtcgtacgctttcgccagtccctcgggcggtcccaaccatctcggtcgacccatgcagtatcagcaacccgcctacgctcagtcgccatcgagataatattgaagatcgcattgggcatcgagcgtacctacatcctttcccatgcctctgatcagattaccgtgtcaccttc

SEQ ID NO: 9931 - DNA, 1543 bp, Oryza sativa
  ref <308>: DATABASE ACCESSION NUMBER: AK107279
  ref <309>: DATABASE ENTRY DATE: 2002-08-28
acatcactccccagtcctcgttgccctcttgccgagccgtcctccgccatgctccgtactccatctccgatcggcgacccgccctgagccggcggagccgctcgacgttagggccccacctcaccaggcgacggcgtgggcatcctcgattctcaggggtgtggcggcgtcggcggcggcgcaacggtgggcgccgtccatccctcccagccggctcggcctggtgaccggattcagagatgacggcgagatgcaaatttgtcaggcaatgtgattaagtagatatgcatcctggttggtcacaaggtgttatgctcacgcctcgatatggttcttgcgtagccacagaaaggagcagctactatgtgcttactccagccactggagttgtatacaacttgcctgtgaatccagcagaggagcatgtgtaccatgtccagttgatcacctgcacagaccttaccctcatttgcatttgggcatgttgctcccatgggagagtacaaggtgatccatatttacagacctagagctacatcagctctgtgagttcattactgtcaagtgtggcactcaccatgcagacctatgttgaaacacaggcaaacatcaatgttatctcttattgggtggtgtacttgatggatattggattgtgtatatgagctatgataatatgtggtgtaggtaccttcatccatcagtatttcatctgttgtttcaatcttgggatggagcaagaaacgggatgtccagggaccaattagcagcattttattttattttatctttttgagaaagcgattttcctgaggagtatatgtcaattggcatcaacagtttcactgaactgaaaggctacttagttttagtataccaccagcattactgttgaaccatggattaaagagtatacattcagtctggatcattcatccctgttattgagtaggatataaagccaataagccattgttggcgttagatgatgggaggatattcttctgtctaggatggactggattgctaagcatacctgatgagacattttgcacttttccaagaaccagcactttgcagaagtggagatgagacatcttgctggaaatagcacacagcaaaacagatgactttacaaaatggtgatgtagtgcagtattgcaatgtattgctactcccttcagtttgcagttgatgaaatttgcaagaaccatccattgcttttggaattgatcgttgggcagaatcataaattttggctgtgattcttttctactgttgaattgaagcctgcaaagatgtcttcgattcttgaagatgatagttttttttctctttcattttgtactatcttctgagattgtaatataaggtgtacttgtcagcatatatcatagtatctgacataatttagggctgctgcaactttgttttgcagtaaaaaggtgacagattgccagtgccacttgtgttgtaggtgaaattcgctgtgcatgtaaaaggatgcggtttgaatgcttatcatataatctctgttactgtt

SEQ ID NO: 9932 - DNA, 1452 bp, Oryza sativa
  ref <308>: DATABASE ACCESSION NUMBER: AK107280
  ref <309>: DATABASE ENTRY DATE: 2002-08-28
atccatcctcataccggtcgatcgtcacaatgtctgtctacgtagacctccccttcgagctccaggcggctcccgctggcttcaagcccggccagtcctccgcctccaccctcgccgctcccgtcacccacaccctccagcccgttggccccgccttcctcgcccacaagcgtcgtgagctcaacggcctctcgttcgcccaggacgacaagaccatcgcagactcgctcgccgctgccgctgctgctgctgccgccaatggcgacgacgacgccggcgtcggcgaggaggacgagtccgaggagctcctcgcccgcgaccccaaggagtggaagacccaggaccactacgccgtcctcggcctctcctcgctccgctggaacgccacccaggagcagatcaagatcgcccaccgcaaaaaggtgctcaagcaccacccggacaagaaggccggctcctcgggcctcacctcggacgactccttcttcaagtgcatcgccaaggcgcacgagatcctcagcaaccccgagaagcgtcgtcagttcgactcggtcgacgagagcgtcgacgacgaggccgtccccacgggcaaggagcccgccgacaagttctaccagctctggggtcccgtgtttgagcgcgagggccgcttctccgagcccaagaacggcgccgtgcccaagctcggcgacgccaactcgacgcgcgaccaggtcaacgagttctacgacttcttctacaactttgactcgtggcgctcgttcgagtacctcgacaaggagatcaacgagggctccgacaaccgcgacgacaagcgctacaccgaaaagaagaaccgcaacgagcgcgcgcgcagaaagaaggaggacaacgcacgtctgcgcaacctcgtcgacaaggcgctctccgtagacccgcgcatcaagcagttcaaggccgacgacaaggcggcgcgcgaggccaagaagaacaagggccgtcccggcgtcaacggcgccgctgccgtcgacccgcgcaaggcggccgaggacaagaagaaggccgaggaggaggccaagcgcaaggccgatgaagaggccaaggccgccgagcaggagaagtcggccaaggccgacgccaaaaaggcaaaggaggccgccaagaaggccatcaagaaggagaagaaggcgctcaacaagctcatcaccgacaacaactacttccagtccgccgcacccaccccggccgtcatcgaggcccagctcaacgagctcgatgcactctgcgaaaagctcgaggccaccaagctcgccgactacaggaagaaggccgaggctgcctcgggcgccgacgccatcaaggccgagtttgtcaacgccgccaaggacgctggcatcgccacctctgctttcgcctgatcccctttcccccccttagacttgattgactttgcaatccacactgtgtgcctgc

SEQ ID NO: 9933 - DNA, 3623 bp, Oryza sativa
  ref <308>: DATABASE ACCESSION NUMBER: AK107281
  ref <309>: DATABASE ENTRY DATE: 2002-08-28
atcatcatccctttcctccccctccgcccccctttggcgatcaccatccttttcacagagctatcgctagcactgtacacatcaccttgctcaaagagcgatccacacgctctttcatcttttcttctgtgaagaaagcaaaaaaagtcgttcaccgactcgattccctaatcccggtctccgtaactctcttcacatcacagaaaaaaaaaacgctagacatcatggctcccgcacctaccgctgctggtgtccccgccactgtccccgccaagaccgtcaagggctcggctggcgctgctgccaagagcggcgccgccgccgagaagaaggaggccagcgccgagaccgacgccctcctctccggcgacaaggatgccgcccaggagctcaccaacctcgtcaagatcgagggtcccgctgctctggccaacctcggcatcgaggccgtcatcctcaagggcctcggcgacaagaagaacgccgccggccgcgagggcgcctgcgctctcctctccaacctctgcgagcagggtgtcggccacgaggtcgagcctttcctcttcgagaaggtcctcacccccctcgtcgaggccatgggtgacaaggagaaggccgtccagaaggctgccctcgacgccctcaaggctttcgtccaggtcatgtcgccctgggccaccccccagctgctcaaggtcatcctcgagcaggcccgctccgccggcaagtggcaggtcaagatcggctgcatcaccctcctcgaggagcttgtgaccgtcagctccgagcgcatggccgccctcatgcccgagatcatccccgtcatgaccgaggtcatctgggacaccaagtccgacgtccagaaggcttcgcgcgccgccctcaccaagctctgcgtgctcatctccaacaaggacattgagcgcttcatccccgccctcatcaactcgctcatccaccccgtcgaggaggtgcccaagaccatccagctcctctcggccaccaccttcgtccaggaggtcgacagcgccaccctcgccctcatggtgcccctgctctcgcgtggtctcaacgagcgccccaccgccaccaagcgtaaggtcgccgtcatcatcgacaacatgaccaagctcgtcgacaacgagcgcaccgtccgccccttcctcggcaagctcctccccggcttgatcaagatcgagtccaccctcgccgaccccgaggcccgtggtgtcgtccagcgcgccatcaagacgctccgcgaagtcggcaacgtcaccggcgacggctccgacgtcaagcccctcgaggacgtcagcatcaaggcctcgctcgagcaggtcaacaaggcgcttggcgagcagagcctccaggcccaggccaacctcggcgcctacgttgccaccctcgttgccaacctcgccaacgcccgcaacttcgagctcaccgagtgggagggtgccctcatcccctacatcaccctcatcaagggctccaagcccgagcaggccaaggccgtcagcaaggcgcttctcactgctctcgccaaggagaccggtgactcggtcgagatcttcgacgacgaggaggagggtgaggacctctgcaactgccagttctcgctcgcctatggtgccaagattctccttaacaccgccaccctgcgtctgaagcgcggccacaagtacggtctctgcggccgtaacggttcgggcaagtcgacgctcatgcgcgccatcaccaacggccaggtcgagggcttcccatcgcccgaggaggtccgcacctggtacgtcgagcacgacctcgacggctccgagggtctcaccaccgtcctcgagttcattctcgccgacaagcgcctcagcatgacccgcgaggaggccgtctccaccctccacgaggtcggcttcgacgacgctcgtcagaactcgcccatcgccggtctctctggtggctggaagatgaaggtcgcccttgcccgcgccatcctcttcaaggctgacatcctgctgctcgacgagcccacgaaccacttggacgtcgtcaacgtcgagtggatcaccgactacctcatcggcaccccggccaccgccatcatcgtctcgcacgactccaagttccttaacgacgtctgcaccgacatcctccacctcaaccgcttcaaggtgaagcgatacccgggtaacctcgacgcctttgtcaagcgcgtccccgaggccagggcctacgccgagctcaacaccggcgaggactactcgttcaagctgcccgaccctcctctgctggacggtgtcaagaccaaggagaagtcgctcaccaagatgaaggacgtcaccttccagtaccccggcacgcccgctccccagctcaagggtgtcagcatccagatctcgctcgcctcgcgtgtcgccatcctcggccccaacggttcgggcaagtcgacgctcgtcaagctcgtcgtcggcgacaccgagcccggctccggtgagatgtggaagcaccccaacctggtcatcggctacgtcgcccagcacgccttccaccacatcgaccagcacctcgacaagacccccctcgactacatgctctggcgttaccagaccggcgaggatctcgaggagcacatgaaggccaaccgtgagctctccgaggaggagaagctcgccatgaagcagggcgaggtctacgtcgtcgagggcgtcaagcgcctcatcgaggatatcgtggctcgtaagaagctgaagaactcgttccagtacgaggtctcgttcaagaacatgtcgtcggccgacaacgtttggatcccccgtgacgagctcatcaagcgtggcttcgagaagaaggtcatggcgttcgactcgaaggaggcgcagcgtctcggtatgaaccgaccccttgtgcgcaaggagatcgagcagcacttcgaggacttcggtctggagcgcgagttcacctcgcacaacaccatgcgcggtctctcgggtggtcagaaggttaaggtcgtgcttggtgccgccacgtggcgcaagccccacatcatcgtgctcgacgagcccaccaacttcttggaccgtgagtcgctcgccgcgctcatcaaggccatcgagagcttccagggcggtgttgcgatcatcacgcactcgcgcgagttctccgagggtacctgcaaggagatctgggccatgaacgacggtgtcctcgtcgcttccggccacgactggaccgagtccaactccaagggtaccaagatcgagacccaggaggacgacgaggacaagttcgacgctcttggcaacaagctcgagaaggtcaagaaggtcaagaaggaatcggcgtcagacaagcgaaaagcgcgtaaggaccgtcttgccaagaagaaggccggcacttacgacagcgccgacgagctggaggacctttgaacgagatgatggtagcatggcgatgatggtggaggcgtgagtacttttttttttgacaggtgtcgaaaaaaatgaattcccgctccactttttctcccgcacgcgtctctctgcgcttttccccctctccgcatattttcaattttcccctcttcttttttttcttttgtttttccgtcaattgaatcccgtccatctttt

SEQ ID NO: 9934 - DNA, 1312 bp, Oryza sativa
  ref <308>: DATABASE ACCESSION NUMBER: AK107282
  ref <309>: DATABASE ENTRY DATE: 2002-08-28
gacgaaactacccctgtctgtgccacccatctctccagattaggaccagtgaattacatttttgcccgatcccgtcgcgaactccgtcccccctttgcccctcttctttaccgatgctgccaggcacaccaccgtaagagtcgtcccccgtgctcctcctcctcctcctcctcgtcgtggtgcgaccccgcgccaagcaatctccggcgagccggcgtcgccggaggcggcggcccgaggctcgcggcccgcacccccccacccaccgccgcaaacctcgtccgcacccgcggagcctctccctctcttcgttcgtcgtcggtgcctcgaggattccctcggcgtcgactcctcgcgagtgagttcgctcgccccgtcgcctgcgccgatctccatccccgcgagctgagcagggggagggcgccgcctccgtcgtcgtcgtctgtcctgctgcttccgccgcatccccggcaaatcttgtaaaaagcctatgggaaattcaaaaactcctcaaccatcaaagaagtcccgaattatgttgtcagatactgatggccaccaactggacaatgatgagttttcatctgaaagtgcatcaaatcaaatggttctgttcaaccctgaaactgtagctaaagggcaagatgaacttggagagaaccattcaccatctttgcagaaatcagccaataatccgaaccgaggaatgccatctattggggcattcactgtccaatgtgccaagtgtttcaaatggagacttattccgacaaaagagaagtatgaagaaattcgtgagtgtattatacaggaaccttttgagtgcgaacgagcccgtgagtggagacctgatgtaacatgtaatgatccagaagatatatctcaggatggaagcaggctttgggctattgacaaacccaatattgcactacctcctcctggatgggaaagacagatcagaataagaggcgaaggaggcaccaaatttgctgatgtgtattacacttctcctactggaaggaaactgaggtcactggttgaaattgataggtacctcttggagaatccggattatgttgcacagggtgtaacattaactcaattttcattccagattcctaggcctctgcgacaggactatgtcaaaaagcgccctaagatagtgaatccaaatgatgaagcaagtgtagtaacgaccaagtccgttaagccggaagaaggtgtgtaatggcgtataaatgaactcatcataactagttagcacataatcagtattaattctcaataaaaactttccatttgcatgctgaac

SEQ ID NO: 9935 - DNA, 1111 bp, Oryza sativa
  ref <308>: DATABASE ACCESSION NUMBER: AK107283
  ref <309>: DATABASE ENTRY DATE: 2002-08-28
atcacaaaacacataaaactatatcatcatcttccatagctgtacacatcctatattttcattcatggcgatgacaccgcagctagcattttctcgcatgcctccagggtttcggttccagccgacggacgagcagcttgtcgtcgactacttgcagaggcgtaccgctgcgcagccatgcgttactcccgacatcaccgatatcgacgtttacaacgtcgacccgtggcagcttccagccatggcgatgtatggatcggatcatgaccggtacttcttcacgatggcggcccgagaggcgcaggccagacgaacgacaccgtcgggtttctggaagcccaccggcacaaagaagacgatcttcgtcgtcgccggtgggcatgaggtgcccaccgccgtcaagaggaggttcgtcttctacctcggccaccaccaaccatcgggcagcaacaacaacaacaaaacatcatggatcatgcatgagtaccgtctcatgaactctccaagagcggcagtgccgtcgtcttcttcggtgaatcgtcttcccactgatgatctcacggaagagatggtgctgtgtaggatctccaacaaggacctgcctaaaccacccttcatccacaacagcttgttgcagttctcttcagtggggttgaatggtgatgggtataattacttgatccttgatcaccttgagcctccagcaatggagtatcctaatgttggcattggtaatgttgatgatgctgctgctggtactgatgatccgggtgaccttgatgaggagattgatgatagcatgcaaagaaaccatggtggctagaattaaccagtagcatcatgagtgaatggttttgcgggagatttgagttaaatatcagataataaaataataatacaaagaataaaaagaaaaacaaacctgtatagttagcaggttttgattcatttcgttgaactttgtgtgcttgttagctagcctatataccaaacatgccttggcgaggctttctatttgtatatagctttttttcttttttctattgtaaggttcgaactctattgagttgattgaataaacattatgcaatttatgtaacatattgtctat

SEQ ID NO: 9936 - DNA, 1869 bp, Oryza sativa
  ref <308>: DATABASE ACCESSION NUMBER: AK107284
  ref <309>: DATABASE ENTRY DATE: 2002-08-28
tagactacattaccaccaaccgcaaggtcatcaccgacgaggtctatcccgaggtcgtcgccatgttctccgccaacctcttccgctccatcccgccacaggtcaaccccgtcggcgaggccttcgaccccgaggaggacgagcccgtgctcgagctcgcctggccccacctccagatcgtctacgagttcctcctccgcttcgtcgagagcccagacttcaacaccaacattgccaaaaagttcatcgaccaccactttgtcctccagctcctcgagctcttcgacagcgaggacccgcgagagcgcgactttctcaaaaccaccctccatcgcatctacggcaagttcctcaacctccgcgccttcatccgcaggtccatcaacaacgtcttcttccagttcatctacgagaccgagcgtcacaatggcatcgcagagctcctcgagatcctcggctccatcatcaacggctttgcgctgccgctcaaggaggagcacaagaccttcctcacccgcgtcctcatcccactccacaaggtcaagagcctcgccctctaccacccgcagctcgcctactgcgtcgtccagttcctcgagaaggacagcgccctcaccgaagaggtcctcctcggcctcctccgctactggcccaaggtcaactcgcccaaggaagtcatgttcctcaacgaggtcgaagagatcctcgacgtcatcgagccgtccgagtttgtcaagatcgaagtgcccctcttccagcagctccagcgctgcatcaacagccagcacttccaggtcgcagagcgagcgctctacttttggaacaacgagtacattgtcaacctcatcggcgacaacgtccaggtcatcctccccatcgtcttctccgcgctgtaccagaactccaaagcgcattggaaccgcaccatccatggactcgtatacaacgccctcaagctcttcatggacatcaacccggcgctcttcgagatgtgcaccaacgagtacaagcagcaacgccagatggagaagcagaagctccacgaacgcgaagaggcatggaagcgcctccgcgacaccgccatcaagaacagcaaggccatcggcgtcgagccgcccgccacgctcaaggacgagcaggcagcccccgcaggcagcgtcaacccctacgacctcgatgcctttgactcggcggccgatctcaccgccggcgccgagagcctgttcgaggccatgggccaaggcatcaatggcgaggtctccacggcggactttgacgacgtcgaatccaaccgtctcgcgcaggagggcgcggcgcaagaacctcaagtcgcgggcgaagacagcgtcgacgatatgaaggacttcccagagacggcgcgccaacaggtcggcaagcaggagtcgccacacgtccgacgcaagagcgtgatacccatggaccccacggtcctggccgagctcgccggtcacaagagcctggatggtgcggacttgcccaagccatcaggtgatgcatagatgctgtcgcgcggcagtaggctcaagcaggctcaagcaggctgatgggaggacgcgctggaaccgttgtctctggatccacaagccgcatatgcaagtgtgagcgcggtttggaccacccgcccgaggtggggcgaccgtctcctagattgcttcataagacgtgaccgtcgacgcccacagcttgcgcgcatgtgcgaccacaccgctttccatccgcaaccaactctgatgcccgctccctctcccctctttcctttttcctctccatgccctcaattatgttcgttcgtgctgttggttttgttggcgtttggtgttctttcttcaatcccacatggtttttcgc

SEQ ID NO: 9937 - DNA, 1586 bp, Oryza sativa
  ref <308>: DATABASE ACCESSION NUMBER: AK107285
  ref <309>: DATABASE ENTRY DATE: 2002-08-28
cggcggccgccgcaaaacccggggcgcgagcccgggcggagcggccgtcggtgcagatcttggtggtagtagcaaatattcaaatgagaactttgaaggccgaagaggagaaaggttccatgtgaacggcacttgcacatgggtaagccgatcctaagggacggggtaaccccggcagagagcgcgaccacgcgcgtgccccgaaagggaatcgggttaagatttcccgagccgggacgtggcggttgacggcgacgttaggaagtccggagacgccggcgggggcctcgggaagagttatcttttctgcttaacggcccgccaaccctggaaacggttcagccggaggtagggtccagcggccggaagagcaccgcacgtcgcgcggtgtccggtgcgcccccggcggcccttgaaaatccggaggaccgagtaccgtccacgcccggtcgtactcataaccgcatcaggtctccaaggtgaacagcctctggccaatggaacaatgtaggcaagggaatccgactgtttaattaaaacaaagcattgcgatggtcctcgcggatgctgacgcaatgtgatttctgcccagtgctctgaatgtcaaagtgaagaaattcaaccaagcgcgggtaaacggcgggagtatctatgactctcttaaggtagccaaatgcctcgtcatctaattagtgacgcgcatgaatggattaacgagattcccactgtccctgtctactatccagcggagaaattgtccgtgtcgaacacgggctcagtttgctgcagccatatgcatcattgcaggagcaggaacaaggacaagtgcaatcaagagagcgttatcaagaaggacaatatcagcaaagtcaatatggaagtggctgctctaacggtttggatgagaccttttgcaccctgagggtaaggcaaaacatcgataatcctaaccgtgctgatacatacaatccaagagctggaagggttacaaatctcaacacccagaatttccccattcttagtcttgtacagatgagtgcagtcaaagtaaatctataccagaatgcactcctttcaccattttggaacatcaacgctcacagcgtcgtgtatattactcaaggccgtgcccgggttcaagttgtcaacaacaatggaaagacagtgttcaacggcgagcttcgccgcggacagctgcttattataccacaacactatgcagttgtaaagaaggcacaaagagaaggatgtgcttacattgcattcaagaccaatcctaactctatggtaagccacattgcaggaaagagttccatcttccgtgctctcccaaatgatgttctagcaaatgcatatcgcatctcaagagaagaggctcagaggctcaagcataatagaggagatgagttcggtgcattcactccaatccaatacaagagctaccaagacgtttataatgcggcagaatcctcttaggtcggcttgcggataaagaataactaaataaataaattgcaagcaattgttttgctgctatgtactgtccagtctttcgactaatgatgataaagcctctctttatcctt

SEQ ID NO: 9938 - DNA, 1623 bp, Oryza sativa
  ref <308>: DATABASE ACCESSION NUMBER: AK107286
  ref <309>: DATABASE ENTRY DATE: 2002-08-28
aaaaccgacatcgccggagaggtcgccggcggcatcgtcgtcctccccgtcgccggagatcggacctcctccacaagggagttcggcaatctgccatcatgcaaagccccagcaagatctctgatgcctctggctcaatgccccctgccacgtctgtgcgcaaaggttccaagaagaactgcttcactccattgttcctctgttgggctccttcgtcgacattctcgcctttgctggcacctgccattcttggcgtgctgccttctcatcatacccatcaaaatctgcctttcgcaccttactcccaccactcctcgtccgacccaatgtccgcgtcaaatccccttgtatcccttctaccagcaatggtcctcacaagctactacgctcatgtcaggtcattgatctagccaaccgaaacaccccgctccgctgccagattcctcgagaaactctgcagaagatgctttttgcaggctcttctcatggtcaactcatatgctgccgcagtggttactgtctcgttgttgatgtgttcaccggtgctgaggtttcaccaccacgtcttccattcagcaaggaccatgaggagatctacttttgtggcactctgacggctcctatcacgtcacccaactcacatctccttatcagcaaccggtcatctctgttcgattggccggttggaagtgactcctggtctgagctcaagcttcctgttaatcgggtcgatcagattgtggaattcaatggtcagctcatcgccgtgattgaatacaagctgtacactttgcagttggcccccaagcttcgcctgaagaagatgaaaaccctgtggtgggatgacatgagtgaatgtccatatttgagaccatggctagtggtttgcgatggcatgcttctcattgttgaccactacataactttgtcatttggagcaccagtcaactacagaccgtaccgcctggacatgtcagccaagcctgcaaaatgggtggaggtaaagaagctggagaactgggcactctttatcgggggtgatgcgagaagcccgccgtttgctttcaagaacccggagcgctggggagggaggagcaactgcttgtactatgctcactactcccagccatggagccttcatgggttgggtgatgatgcagatgctgtgtgggatcctaccactgatgataaccttgtgttcaaaagaaactggtacagtcagctgcaggccttctgggtgtatccaagcatgttctattcagacggagacggccagtgattggcacacgcacgagtgccctgctcttattagcttcttctaaaattgcccccttgtgatgtagagcagagacttgtgcaacttggcctagaaatctaggagatcctcatggtggtctttatgtctagtttaacacttgcagtcgttttgtagttcagttattagctgcattaccatctgatagtagggtgtgactgcactggatgcaagtgtagttaactagttgttgcttttccactggtgatggtaggtaatgtttcgttctgtaagggtttggaacttttgttcttcttcacagcaatggtttggaacactaatgtaatgcttgtgcactttgtcttgtg

SEQ ID NO: 9939 - DNA, 1931 bp, Oryza sativa
  ref <308>: DATABASE ACCESSION NUMBER: AK107287
  ref <309>: DATABASE ENTRY DATE: 2002-08-28
aaccatcccttcatcctcttttcaggagaaccaagcttacttcttccctgaatccatatcacaacacgaaaactaccgcacatcatgtcttacggtggatacagcaacggtcctagccgcggtggctgcggcggcggcgctcctcgcggcggccccagcagctacggtggcggaggtggcggctacggcggtggctcttacggcggcggttcctcctcgtacggcggtggaggatacggcggcggagctggcggcggctacggcggtggctacggcggtggctttggcggcggagaccgcatgagcaacctcggtgctaacctcggtgctgtcgactggaacagcgtcgacctcgtcaacttcgagaagaacttttacatcgaagacccgcgcgtcgctggccgctccgaccgcgaggtgcaggactaccgcgcctccaagcagatgaccatccagggtcagaacgtccctaagcccgtcacctcgttcgacgaggccggcttcccggactacatcctttccgaaatcaagaagatgggctttgctgagccttcggctatccagtcgcaggcctggcccatggcgctcagcggtcgcgacctggtcgccatcgccgagaccggttccggtaagaccatcggctttgccctccccgccatggtccacatcaacgcccagcccctcctcaagcccggcgatggtcccatcgccctcatcctggctcccacccgtgagctcgccaaccagatccaggtcgagtgcaaccgcttcggtggctcgagccgcctgcgcacttgcgccgtctacggtggtgtgcccaagggcccccagacccgcgacctgcagcgtggtgccgagattgtcatcgccacccctggtcgtctgatcgacatggtcgacgccggcaagaccaacctccgccgcgtcacctacctcgtcatggacgaggccgaccgcatgctcgacatgggtttcgagccccagatccgcaagattctccagcagatccgccccgaccgtcagacgctcatgttctcggccacctggcccaaggaggtgcagcgtcttgccggcgacttcctcaacgactttgcccaggtcaacattggctccaccgagctcgccgccaaccacaacgtcaagcagatcatcgaggtctgctccgagtttgagaagaagggcaagctcatcggccacctcgagaccatctcgcaggagaacggcaaggttatcatcttcaccagcaccaagcgcgtcgccgacgacctcaccaagtacctccgccaggacggctggcctgcgcttgccatccacggtgacaagcagcagcaggagcgtgactgggtgctggccgagttcaagtcgggtcgtagcccgatcatggtcgctaccgctgtggcgtcccgaggtctcgacgtcaaggacatttcttatgtcatcaactacgacttccccaccaacacggaggactacgtgcaccagatcggccgtaccggacgtgccggccgcacgggtaccgcttacaccttcttcacgcccgagaactccaagtcggcgcgcgagctggttggcattctgcgtgaggccaagcaggagatcccgcgtgagatcgaggagatgggccgcttcggcggtggaggaggcggccgtggcttccgaggccgtggtcgtggccgtggccgcggtggctacggcggcggaggacgcacgggtgccaactcgttcgctgtcggcaactcccgatggtagatatgcaccttgctcgtcgttcttctgagctgctttctcggcatggtcgctggtcgcttgaactttgtcgtctctacacccaccgagtcgtttgggtctcactcaaggtatcacgtcgactttagctggctcagctctcttccatgctttcctgtaatgtggtcattttgttcataccattc

SEQ ID NO: 9940 - DNA, 1407 bp, Oryza sativa
  ref <308>: DATABASE ACCESSION NUMBER: AK107288
  ref <309>: DATABASE ENTRY DATE: 2002-08-28
tatgcctgagcggggcgaagccagaggaaactctggtggaggctcgaagcgatactgacgtgcaaatcgttcgtctgacttgggtataggggcgaaagactaatcgaaccatctagtagctggttccctccgaagtttccctcaggatagctggagcccattacgagttctatcgggtaaagccaatgattagaggcatcgggggcgcaacgccctcgacctattctcaaactttaaataggtaggacggcgcggctgctccggtgagccgcgccacggaatcgggagctccaagtgggccatttttggtaagcagaactggcgatgcgggatgaaccggaagcctggttacggtgccgaactgcgcgctaacctagaacccacaaagggtgttggtcgattaagacagcaggacggtggtcatggaagtcgaaatccgctaaggagtgtgtaacaactcacctgccgaatcaactagccccgaaaatggatggcgctgaagcgcgcgacccacaccaggccatctgggcgagcgccatgccccgatgagtaggagggcgcggcggccgccgcaaaacccggggcgcgagcccgggcggagcggccgtcggtgcagatcttggtggtagtagcaaacattcagatcaaagcatgtggacgatgcatcacattgtctgggatataacatacaaaatgcttggaagaaacttgcatattgtatttggggtgagactacaaccaaggatactgagcacaagactgttggtgggctttcagtaatgttcttgggtgacactatgcttactggtgtgaagattgaggactacatttctgttggagaaagtctagcactactggtaagcataggtacaatgcaagctaaaggaaacactgcatatggcgttaacatggagtcacgcctgaaaataaaatattatccaattaatcggttaatgttgttcttcggtttatctctgattaaattgcatagtgcaattgctttgggcattaacttgcagtcacaatacttactcagaaggcattctaagatggcacttcacattggcctaaacactctgcgtaatggacaaatcaatctaaagatgagcacctcaaagatggttcagatagcactcttggggcttgttccattggcaacctccatgtataagagctttgtccattccgcggagcataattagcttattaggtggtcatgagggaaaactattttctttctttgttattacttctttccatcttagcatattttcctatttactcaaccctacttttatttattttcttcggaggatgtgtggagttctgcagtttatattgtgctgccaatgtaaaattgtagtgcttttgttgtaatataagcttttcttaaagttgtcatctatc

SEQ ID NO: 9941 - DNA, 2225 bp, Oryza sativa
  ref <308>: DATABASE ACCESSION NUMBER: AK107289
  ref <309>: DATABASE ENTRY DATE: 2002-08-28
gactctttctccgttcgcatctggcgcactgccgcgatgtcatcgctaagtcctgatgccgtgtcgccgtcgctacctagaactgagaaactggtgctggctgtgacccatcattggccggcctgcctgccggagtccttgtcggctgcaacgcctgacggcctgatcgtctactctaatcagcaatcaggatagccctggttctggagaagagtagacggtgcggtggagagaaggaggaagagaaaaaagttatggtctatacctgtaatttggagggatgtcgtcctcgtttctgtagtagttgtagaagtgagcatgcttaaaaaccagaaaaaagaacgcagcaatgctatcattcgcctgttgcactcgcaatcgaacgttccaaaaagaaaaaaaaaatcctgattgcgacggggagtttagtagtaggtgagacgcatgttgcactgccttggcggcccagtctcaagtagtggagttgtaacatttggcccagtctcggctaggcccatgctgtcctccggccgacgaaagcaaccccactgggatagggtttcctttcatcacgtctttgatacgtaaatccgaatccagtcgagggaagaagatggtgacgccggacaagaagaggaggaagaaactcgcggagccggagccgacgccgacgccggcgccggagccggtacctcgtctcctccgcgttcgtccagggaacaagaagaagaacaagggggcctcacctgagaagcagccgccggtgtacatggtgttggcgcacggagtcgaggaagagcccaccacccactccgtaatcgaggtcgccgcctgcgccgccgcccgccgcctgcttaacaccggcagcggccgcggccgcggccgcggcatgtcgttcgccgcggtggggacacgcaccgtgggcgtcggcgtggagttgaccaccgtctacgaccccgagacatccacggagcgcggcggcccgcgactcatcttccccaaggtgaaccccgtcctcatctcgatctctgacgacggcggcggtgtagtcggcggcggcacgctctacgctctctcccgcaccccggccgtcgtgaggccgctggatttcgagccatggttcttcgtcctcgacgacctcagccacaccgtgtggcgcgaactcccatcgccgccgctcttcccgtgccgcctcaacccgctggagttcctcgacccgcccaagttgcgcgtcgcggcgtacgccctcgtcggctcccacatcctcctgtcggtctcggtgcagcagctgcagccgcagcagcagcaagaagacaagggcacctgcgccttcgacatggacaccgagcagtgggagatggtgcacgacagcaacctgcctttcgacggccaggccttgcctctcggcagcgacgacgaccaccgcttcgtcgccgtcgcctccgccgccgccgacgttacggtgtaccgcatggtggtcgggatctcggccgtcacggggaagaaggagctgaccatcgttgcgttgcgggtggtggtggcatccaactccaagtgccgcattgttccgggcaaccttctgtgcgccatggggaaggggagcttcgcttctttcgagttccggtccattgctgctgcttccatgggaaaggtgggcagagcacgtattgttcatcgcacttactctctggtggatgatggtgaggacgattgggtcgtcatggtgaagaagcaggatcggcaggtttacaagctacgtgatccatccttcttgggcggttgctcttttttccatgtaaaaatttcagagcctttctttgcttcttccaacatcttctgattcgttgtcagcgtctattatatcgctgctaaggccttgtttagttgggaaaaaattttgggtttggttgtcacatcagatataccgacacacatttaagtattaaacgtagtctaataacaaaacaaattacagatttcgcagagatgaatttattaagcctaattaatccgtcattagcaaatatttactgtaacaccattgtcaaatcatggtgcaattaggcttaaaagattcgtctagcaatttacacgcaatctgtgtaattgtttcttttccatacattaaatgctccatgcatgtgtccaaatattcgatgtgacagtgtaaaaaattttgttttggaaactaaacagggcctaattcatcagcagctatcctttcg

SEQ ID NO: 9942 - DNA, 986 bp, Oryza sativa
  ref <308>: DATABASE ACCESSION NUMBER: AK107290
  ref <309>: DATABASE ENTRY DATE: 2002-08-28
atgtgacggcattacggaaaacccccaccagcagcagctacgcgaggtcggatcggatggcgtccagcaacgagaagccactgcccacaccgatctctgccgccgccggcggcagcggcggcaacgcgccgccggggaggccgacgacggtggattcgatgctgctggacaagggcgcggcgatgctgcaggcgctgcgcccggtgaagcatatcaagcagcacgtgtgcacgttcgcgctgtacgcgcacgacccgcgccggcaggtggagacccactacttcgtctcccgcctcaaccaggacgtcctccagtgcgccgtctacgacgccgacgacaagcacgcccgcctcatcggagtggagtatatcgtgtcgcggaagatcttcgactcgctgccggcggaggagcagcggttgtggcactcgcacgcgcacgagatcaaggcggggttgtgggtgagcccgcacgttcccgggatgctggagaaggcggagctggagaagatggccggcacgttcggcaagttctggtgcacctggcaggtggaccgcggcgaccgcctcccgctgggcgcgccggcgctgatggtgtcgccgcaggacgaccccgcggcggacgtgcgccccgacctcgtgcgcaaccgggacgacaagtaccgctactccacgacggagctgcgggcggcgagggccgacgtcgcggtgccggcggagccgcgaccggggcaggccgactactggctccgccaccgcaagggcttcgccgtggacgtcgtgccgcacgagatgaagtgccacgcgccgttcccgtaagctgtgaacagtacgccggcagagctgtggcacacgactcgtgtacgtgaacgtagtagtgtaggaacgaccgtgggtcgttgtatcgtgtgtacggctccgtcgtaaactcgtaacaccaactgctaccacgtcttctgggcaaaaaatggtgcgtgacttgacttgagc

SEQ ID NO: 9943 - DNA, 1688 bp, Oryza sativa
  ref <308>: DATABASE ACCESSION NUMBER: AK107291
  ref <309>: DATABASE ENTRY DATE: 2002-08-28
aagcaagcaggagctcgtcactgtcaattgacaaaattcagtagcaaatcctactctgtctgcatcaatggctggcccaaccatcgtcctcctcccggcctggggatccggccacttcatgtccgcgctggaagccggcaagcggctgctcgtcgccggcgggggcgccgtctccctcaccgtgctcgtcatgcaggcgccgacggagatagaggcgtcggtggtcgaggcccacgtgcgccgggaggcggcttccgggctcgacgtcaccttccggcggctccccgccgtcgagcaccccaccggctgcgaggcgaccgaggagttcatgtcccggtacgtcgagcgccacgcgcaccacgtcaaggcggccatcgccggcttggcgtcccccgtggccgcggtcgtcgtggacctcttcttcacgcccctgctcgacgcggcgcacgagctctcgctcccggcgtacgtgtacttcgcctccaccgccgcgttcctcgcgctcatgctgcggctgccggagctccgggacgacctgaccgtcgggttcgacggcatggagggaaccgtggacgtgcccgggctgccgccggtgccgccgtcgtacatgccggtgtgcctcgtgagcaagacggtgaagaactacgactggttcgagtaccacggccgccgcttcacggaggcgaagggcatcatcgtgaactcctccgttgagctcgagggcgcggtcctcgccgcgatcgcggacggccgccgccccgctccggcgatccacgcgatcgggccggtgatctggttcgacgccacgctgccgcccgagcagccgcacgagtgcgtgcggtggctcgacgcgcagccggcggcgtcggtggtgttcctctgcttcgggagcatcggcttcctcgacgcggcgcaggtgagggagctcgccgcgggcctggagcgcagcggccaccgcttcctgtgggtcctgcgcggcgcgcccgccggcggcgtgcggtacccgacggacgcggacccgggcgagctgctcccggaggggttcctggaggcgaccgccgggagagggatggtgtggccgaggtgggcgccgcagaaggacatcctgggacacgccgccgtgggcgggttcgtgacgcactgcggctggaactcggtgctggagagcctgtggttcggcgtgccgatggcgacatggccgctctacggcgagcagcacctcaacgcgttcgaggccgtggcctccatgggcgtcgcggtcgagctgaggaggacgacggcgaaggacggcgacgcggcgagatcgctcgtggaggcggcggaggtggagcgcgcggtgaggaggctgatggcgccgcagggcggcgggtcgtcggaggcgagggagaaggccgcggaggtgagcgcggcgtgcaggaaggccgtggaggagggcgggtcgtcgcacgcggcgctgcaacggctcgtgcgtgagatcgttcgtgtcgtggcaggcctcactaggccggaatagctggctggttgcggttggttggcccatctcacacggtactcggcccagtctagacgagaaaattatactagaaaccaagacgtcaaccacgtgatgcggcttaagggtgtgtttgattcgtggtagggtatagccatccctacccctatgagcaaatcctggagagattgaagtc

SEQ ID NO: 9944 - DNA, 1604 bp, Oryza sativa
  ref <308>: DATABASE ACCESSION NUMBER: AK107292
  ref <309>: DATABASE ENTRY DATE: 2002-08-28
aacgatgccgactctcaacaagatcatctttggagcggcggcggcggtgttggtgtcgtccagcgccgcgtttccgctgtacagtgtgcacggcgattcgccttggatggcacgtgcggacaactcttcgctcgaatcctgtctgtcgtccagcggcgggtttgaacaggcatatgcatcgtcgggcgactactcggcgctcacgtcgtcgtacaatccgctgttctcgtacaagcctctggtcgtggcggtgcccaacaccgagtcggaggtggcgagcatcgtcaagtgcgtggcggcgcaagagggcaggcagaagctagcgcccaagtcgggcggacactcgtacgaggcctactcgctcgggggccaagacggttcggtcgtcatagacctctcccaccttaacagcatccaggtggatcaagccaacaagaccgcagcggtgggggcgggggtgagactgggtgcgttggcaaagggcatttgggaccagggcaagtttgcgctgccccatggaacgtgtccgctggtcggcgtgagtggacatgcactcgggggtgggtttggatacacgacgcgtgcgtgggggttcctgctggaccgcattaagtccatgcgggtagtgacgagcaacggagacgtcatcaccgtttcggaggacgagaataccgatctgtggtggggcctaagaggaggcggggccaacaactttggcgtggtgacgcagttcacttttgcgctgcaggatgctccgacgcagatcctcaactacaactacgcgtacgccaccaatgaggattgcgccaaggcgattgttgcgatccaagacatggcgaacgatccggacaccagcacgggtttggaggctgggttgggcggcgagctgttggtggcgggctcggcggcgggcgacttcaacggcaatgcatgccagctggcaggacagcatatcaacaccgcgcgcgaggggcacgatgcgctcatggcgagattcaacgcgcgtgcgggcgtccaacctgcaaccgcgtcggtcaagccgttcgatagctggatcgacgcactgacggatctcatgggcaatctgtcggccaccggaccgcagcacgaacagttctacgcaaagtcgctcgtccaacccgccacggcgcgctacaactacacctcggcactcgcactcgtctcagagctcgactcgtacgccgggttgaggggcacgggcaacagtatttcgtttgacttcttgggcgcgctggcgtattcggcgacgatcgaagatgcaagtttcaatgcgcatggtgcgacgctcatcaaccagttctactcgtacggcttccccagcaacgacgaccccaacgcgcagcaggatgtgtggaaggcattcgacagtcttgtgcgcacagctcaggccagcgcacccgatgcggactggggtgcgtacgtcaactacgtcgatgctagactggacgactgggcgcacgcctactacggcgcaggcctggaccggctcaagcagctcaaggccacatgggacccgcagagcatctttgactttccacagggtctagcgcacgcctgatcgcaatccgacgccctttcttatt

SEQ ID NO: 9945 - DNA, 1402 bp, Oryza sativa
  ref <308>: DATABASE ACCESSION NUMBER: AK107293
  ref <309>: DATABASE ENTRY DATE: 2002-08-28
tatttcagtgatataaatctagccactacggaacatttgatgagattcattaccaaggatccagaaggatatgttccgatatcagttgttgctggctttaagaagattaaggctttgatacaaagtaatgcaatgcttgcttcagctcttcggacatcatcaaaactcgttgttagtaatgatggaacaagagtaaaacgtgagcaaccgtttacagagtcagatttagaagagctccaggcccgaatcgttgttgcagaaaatcttccagatgatcattgttaccagaatctcatgaagcttttttcaactgttggcagtgtcaagacaattcgaacatgctatcctcaaaccccaaatggcactggtccagttactaatagatctgccaagctagatatgctttttgctaacaagctgcatgcttttgttgagtacgatactgtagaggatgctgagaaagcgatcgtggaacttaatgatgagaggaactggagaaatgggctgagagttcgattattgaatacttgcatgacaaagggaggcaaagggaaaaagggtggccatgatatcaatgatggacatggtgtagaggatgatgtctccacttctaaccaatcaaatgagaaacatggagaagaagcactgcaaacaccagatgcacagggagagcaattgcctgatgagagcgctggggatatgggacgagggcgtggcaaaggccgtggccgtggaggtagaggccgagggcgtggctaccactaccacaacaacaatcaacagagctaccacaaccatcagcagcataatcatcagaataacaacaaccggaacgccgcccatccagttggaacgccgccatccaaccatcctgccaagaacgagcagcaacagcaggcacagccacagccacagccacagccacagccacagccaccagcaggagcaaacaagcagcctccagggccacgcatgcctgacggaacacgcgggttcgccatgggcagagggaagccgcaaacatctacgacgacacccagcgcatcatccggtagcgaaccttgaaactcgaaacacgcaatgttgctgttggtcatgttgatagaaagagatgcggttgagagacttgtcttttttacaagtctgtccttggaagcgtgcctccttttgttgtttgttctatatatacacgtttttctgccgtgtgctgttgttgtgtagtactacttctgaaacaggtagagcacacaccgtttgtgtgactcggtgtgagtgagtgacctgagtgtgctccctgtcactttgcagctctgtttttttttttttaccatttttgccgccctgactgtaagattgtagtagtaaaagttgattccagaaagataggggaggagaacatagt

SEQ ID NO: 9946 - DNA, 1537 bp, Oryza sativa
  ref <308>: DATABASE ACCESSION NUMBER: AK107294
  ref <309>: DATABASE ENTRY DATE: 2002-08-28
cttttctttcttcttcgtcgtctcggttcactcctccgttcgatcgactttgcttgtttcaagcaagctagatctctcaccaacaggaggtgatcaatggcgagcggcggcgcattatccccggtggaggagaagcccacggtggtgaagacgaccaaggcggagcagcacgaggaggaggcggcggtggcggtgaagagcgcggcggagatgatgaagaagagcagcccgtgctgcccccggtgcaactccatcaagaccaagttctgctactacaacaactacagcatggcgcagccgcgctacttctgccgcgagtgccgccgctactggacccagggcggctccctccgcaacgtccccgtcggcggcggctgccgcaagagcaagcgctcgtcggcctcgtcggcgtcggcgtcggcggcgtctcctcctgctcctgcggtgggcgccgcgccaccggtggtgccggcgctgtcgtcggcgatcagcaagctgctgcagtcggagcccatggcggcgccgtgcgcggacttccccaacgtgctcccgaccttcgtgtccaccgggttcgagctccccgccgccgccggcgaccgcctctcgctggggtcgttcgaggcgttcggcaacctgtcggcggcggtggcggctcccggcggtggtggtgggtcgtcgacgaccacgtcgttcatggacatgctgaggggagttggagggcttttcgacggcgtcggcaacagccatcagatgggcggcaatggcggcggcggaggcagctactacgcgcctctcatcaccggcgccggcaatggcatgctgatgccgccgccgccgctgccgccattttctggttctctgatgcagcatgggatgcaggggctgttcgccaatcatgcgatgggaggaggtggtggtggagtgatgaacgccggcgaggacggcagcgtgatggcggggctgggaggaggccagtggccgccggcgcttggtggtgcagacgagcagcagggcggcggcgacggtggcgaagctgtgatgacgaaggacaccggcggcggcgcatcgtcgtcggcgtcgaggccggactacttctacggctggaacagcgccgccggcggcgtcgtcgctggaggcggcatcggcggcaacgccgccgctgccaccggagcaacgccatggcagggcctcatcgacagcagctcggccatgatgtaagctcaatcaaatcaaccatgccaaggttggagagagatctcatccagaagttgttgctagcttcttggaatgatttttcttcagcttcatcgatcgctttagttcgttttttatccgtggatcaaattagttcgctctttggaaaaattcgtcgaaacagttttaaattttgctagacaaatgaatgtcgtcgtcgtcatcgtcgctcgtttacctgtaattagcttggagttggggttgtttgattgacctcatggaaccatgcaaaaggttctcatgtttaaggggagttaattaaatgtacatcattggtcgtgac

SEQ ID NO: 9947 - DNA, 2439 bp, Oryza sativa
  ref <308>: DATABASE ACCESSION NUMBER: AK107295
  ref <309>: DATABASE ENTRY DATE: 2002-08-28
agtaaacatctctctctgcctctctctccatctgactgctcgaccagcagcaataggctctggtttcctcttcttgcaagttgcatgctccctagtccctagacttgaacagttgagcccttcctgattttgtggttctagaccacctctggcttgcagcgagaagcaacgttcgctcgcatgacgttccagctccaagattagttggaggaactgttctaaacacagaataatactacctctttcgatgcgaaaagtatgccaatttggccgtacattacgccaagttgtgctcttgctctgatgttgatcggtcccctacgaaccaagggataagagttttgcttccttttgtccctccactgtgtttgcgttcggtgtggtgctgcgcgccagcctgcagaagaagaagaagaagaagaagaagagaagatagtggtggtgggttcaatcagagcggttcttggtgtctgaagaaacgcacaaagccgaagtggaaggaagaataaagggtgaggtgagctaagtcgtaggctgtctgccgcgcgcgtaccatgggttgtgggctgtcgagggagaaggacgccggcggcggcccacggcggcggccggggagcgtcggcgacgtggtcgtgttcctcccggggctccgggtgccgaggagcgtggacttctcccaggcgctcgccggtcgcctcgacgaggcctcgtcgaggctgtcgtcgctgcgggcgcgggtcgtcgacatggcaatgcaagaatcggcggcggcgctgaagccgaagcggcgggcggcggcgcggcacggttcgagcactgctaatctcctacaggctctggaagactatctgccagtgctgctaggattggtgaaggaaggtagcgaattgcggcacggagtgcacttcgtctggactaaccaagaggataatgctgaggaaacggccatggcagatgcatggtatgaagtgtcgtccgttctgcatttgatggccatggtctgcttgttgcaggccaattctctgcttcttcccaggtcatacggtgatggttatgcgccaagggtttctgaagagagcagacgagctactgttgatgttttcttgaaggcatctggctacctagactgcgcaattagacaagtactaccccaaatatcgtcggagttaaggagacaacttccagtagatctggctgaaggaaatctcaaagctcttagcctgcaagctctgggtcagggagtcgacatgcaacttggtctggcaattgatagcccaaaggccactctagcggtaaaacggcgcttagcttgcgagatggtcaaatattggcatcaaattcaggagagcattccagaaattccggtatccgatggatgggggaaaaagcatttattgtttgttaagtggaagtatgttgaagcaaaggctgcagcatactatttccatggtttgattctagacgagggaaacacagagaaatctcatggaatggcagtagctgccttgcaagcttcagaagaatttctgaaagaaagcaaaagggcttctgaagccttccatgcaactcctccaacatcaaggagccccactcctttcggaacagctaagtacatgcttgacaagattccaaaagatgcttcaagcaaggtcaagatcaatcaggacctgtatacgcaagagagggtcattgtaacaccgcctccattgccggattttgcgttggctctaaaacctgacgactacgatcttcctccattagatccactttggaacaaagaagacagccgtcagtagcagtatattcagcaagaatgtgaatgttgtctttcagaggttcaggctctagtataccatgtcgaagccagacgtggtacgaatgaagtgtacaaaatttgtcccaacaaattgtggtgtcagcaaaatttaaacaaggcctggagataatctcaagagcattgtacaggcgaatcttattctgacaaaggaaatgctttgccaaaaaaaaaagaagaaaaaaactaaccatttcaaaagattccaatatgactcgtggatccattttctcaggattcccttcagaatggcttggttttgatctatactgagtactgtgaaaactgtcacattttgatcctgctgcagcgactatatcatctagacagtttccagtgttctgagatacaactacacaagcgaacaaaacgaaacttgacacgctcgtttcaaaagcctttgtctgatgttctacaatcggtccaaaaggcaagtatgcgtgccaaataacacaaagaaaaccacgcgaaatggcgcatatatagtttgcctactgccgtgagcacatatatggctacaatttacagactccaaattataaagaaacatcattattgtattatgttatttacatgttactcttaatcatacacgattgctgttt

SEQ ID NO: 9948 - DNA, 1407 bp, Oryza sativa
  ref <308>: DATABASE ACCESSION NUMBER: AK107296
  ref <309>: DATABASE ENTRY DATE: 2002-08-28
ctcttcacattccctgcatccatccatctcaaccaccaccacctcatttcaggagatcatctcctccttttctttgctagggtttgtttgccataactactatctatcgcctcttcttcacctcacctgtcctgtcggccatggagagcttcgccagtctcgcaggaggtggcagcagcagcaccacagctcggttgccggagctgatctcgccggagaacccggaccacatctcgccgcccccgttgctgtaccagctgctcgccggcccggagtcgtcggcgcggcagcatgggcatgatgggcatcaccacggcggcggtggcggcgaagcagcagcagcagctgtgcagggacaggtctcgccggcaggcgcggaggcggcggtcaaggccgagatcatgtcgcatccacagtactcggctctcctagccgcctacttaggctgcaaaaaggtcggggcgccgccggatgtactgaccaagctcacggctgtgccggcggcgcagcagctggacgaagccgacggccaccctcgtcgccggcacgagccacagcgtgatgacgacccggatcagctcgatcagttcatggacgcgtactgcagcatgctgacgaggtacagggaggagctggagcggccgatcctggaagccgcggagttcttcagcagggtggagacgcagctcgattcgctcgctggcacgggatcatcagaggaagagcaagaccctagtgacaagcagctgaagcaccagcttctgaggaagtacggtggctcgttgggcgatctccggcaggtgttctccaagaggaccaagaaagggaagcttcccaaggaggccaggcagaagcttctgcactggtgggagctgcactacaagtggccctatccctccgagatggagaagatgacgctggcgcagacgacggggctggaccagaagcagatcaacaactggttcatcaaccagaggaagcggcactggaagccgacgccggtggcaggcacggccttcccgacgatggaagctgccggaggcggcttccgacactccggccacggcggcggccttgcggcggcggcggcgctgccgctgtacatgggcaggccgttcgttgtggacggcatgtaccggctcgggtcttgaagcctctggggatcgcatggtgtttgcatggtgttttttgcttggtaaatatttgctagcagcttcccatgatcagcctgtgggatggtgaaatggaagaactgatgaatcttcatcacgatctttcctctcatttttttttctttggtgtgtgataaaagctcagatgtaccacgtactactgtctgcttctttgcaaatggatatgtaattgaaagctttaattctaaacatgggactcctccgtttttatatt

SEQ ID NO: 9949 - DNA, 1428 bp, Oryza sativa
  ref <308>: DATABASE ACCESSION NUMBER: AK107297
  ref <309>: DATABASE ENTRY DATE: 2002-08-28
atatcatatcagtgcagtggccggcggcgatatcatgcagcagcagcaacgagactagagctctcttcatcgtcatatcgtcaagctgccatagatcgatcagagctggctgctggccggccggtgatccttcctataatttcctagcttgtgtcatggaaaaaactagtgcaggcaaggaggagggctccgagagtaagacggcggcggccgacaacgatgggagctcgacgagcagtactacggaggaggaggaatccggggagagccagcggcgcacgtcgtcgtcgtcgtcggtgcgcccctacatccgctccaagaaccctcgcctccgctggacgccggagctccatctctccttcgtccgcgccgtcgacaggctcggcggccaagatcgtgcaactcctaagctcgttcttcagttgatgaatgttagagggcttagcataggccatgtcaagagccatctccagatgtatagaagcaagaagatcgatgagtctggccaggtgataggtggtggctcatggagatcttcagatgaacagcagtatcatcatctgcaaatgcaaggtggtggtgacgggggacaagcgtacaaccttggccatctttccttgcctgcagctcttcatcatcgccacatcactgctggctccggtaccatcttgcagtccagggttgccaatgcatggtccccatggagatgccatggatcatactggctccgtgcaggccatcacctgcttgttggatcaaaaccctattacccaccaccaccagctgaagctagagctaataccagcagcaaccatccagattttgtccaaggctcttcttcatctccagatgatcataccatgaaccatcaaagaccagtagtgctgaaagagatgatctacaatgagggtagtaaccatcaaggaggtcctcttaatctcgatctctcactcgatatctgtccgcggggcgagaagaggaagagagaattgatcagctggaggaaatatgaggaagatcatgatcatactactattgctattggtggtgatcaagaagcagagagttgtgctactgggctctctctttctttgttctgatcatgtctcccctgttgaaagatgcatcatcagagtcctaccactactatattgctgtgctgtactggtctggtccctggtgatatatcagatatcactagctagatcatatgtcattgtggatgataaatcaaattaggaaagaagaaaactcatgcaacagggacaagtactcttcatctcaccatatgactacactgtggtgatattttgtggtacttgtccttttacgcatgtatctagaggaagataaacataaatttattgtatttctgttgcacattatcttccgtatcttttgattaatatagctgatcccggttgatct

SEQ ID NO: 9950 - DNA, 1026 bp, Oryza sativa
  ref <308>: DATABASE ACCESSION NUMBER: AK107298
  ref <309>: DATABASE ENTRY DATE: 2002-08-28
atgtccaaccatccaattccaagcactactactcatcactagctcacacacaattgcatacacctagctcaaaagcctttctatttcactaattgtgtgtgttcattgctagttgcattgtggttttctagttaattaacaagctagctatacctagcttataattagctagagtgtgagcttataattagttagttagttgaaaacaagctaagatgaggagcaaggcgtccatgttcttgaagcagatggtgtcgacgatcgtggcggtggtgaaggcgaagtcgacggcggtgagggccaagacgagcgccatgaagacgcggctgctcatcttcggcgtcctccgcaaccggaagctcctcgccaccgccatcaaccacaagatccacgccatcatgggcggcgccgccgcccaggacaccaccaacgacggtggcgtcgccggagtggaggacgacgacggcggcggcagcaagaaggccgtggtgctgtgcaacaccgcgccgagcttcctcacggagcgcggctactacgatcacgccggcgaggaggaagaggaggaggaggacagcgacgagtacctgacgcactcgttgttccaggaggaagacgacgaggacgacgagctggtgaacgcgccggggtcggtgatcgacctggtgcgcgacgccaaggaaggggaaggcggcgagttccggctggaggacgagatcgaccacgtcgccgacgtgttcatccgccgcatccacaagcagctcaagctccagaagctcgactccttcaagaggttctgcgagatgctcgagaggagcgcctaagttcatacccagatcgccaaactttttggctcactgtgcatggtgaagaaaaaaaaaccttttttttaccgttaagccaaggttaattaattgattaattacacacacaacttggtgacttttgatccatgcacgcatgtaagtagagagaataaagtgacaaagatatatacttctcttgtagaaggggttcactactttactt

SEQ ID NO: 9951 - DNA, 1444 bp, Oryza sativa
  ref <308>: DATABASE ACCESSION NUMBER: AK107299
  ref <309>: DATABASE ENTRY DATE: 2002-08-28
caggttagaaaatttggtttacatcagcaatatattttgtttttgtgaaacttataagttgtcaatgtcattttctgcagttcttatgtacctcatactaccaatgcccctcatatttttcctgggctccaacagcccctcaatgatgtctaatgatggcgatacgtaagtgataatccttccttaccaggagtcattgctatttcatttttacctttccttgctacctgcactcatggtactactaccagttctgatttaataaaattcctgacaaacattctcaaattagagattcagaaacgactgttagttattctgttgaatctttgcgttccatttactagctagtactaagtaactctgtttaccagaccatatgactattgacttgagcatgcacatgttgttgttagtgggggagatccacttaaaaataatccttgtttcacactgatctgatttcactgcagttgggtgagcttcacaaaattcttgacgggcgcatcgatagtggggagcatcgccatcccgtcgatcctgaagcatgccggcgtcattggatggggagcgctcacgatggagctatcttctttcctggtctttggcgtcgcgatcctgtggctgattcaaatgaacagcgaagacgagtacagcagcgcgttctgatcgatcggtacgccccttctcttgcccgcgtggttaataccttgcgatgaagcaaccgtaaacttgtgtacagatactgtcgaagccttggctcctgtggtcccattcagtagcgtgaacccttacatgttcagattgcatgtacaaatttgaaattcggtgtaagatggtttggttatgtcctccggctgatttcaacttgaatcatgattagtttttgtgatttttgtcggtatgagatgttgatggacactagctttgcctgcattaactgtagcagttgacacctccctgtccgctccggcacggcgctctgcctgggcggccgcatcgcatggcacggcacgattcgccgtgccgtccgtgccgtccgcgcatacacatcgcccatcaatgcaggtacacgcggcttcttcagagtccagtcactctgaagtctgaacaatcaaagggcctatcctattctggcctgcagcttgtttgtttgtaggaaatggcagttctaccgaccaattcacgcagatcatgaaacataatgttcatttacatcttatgtttcagaaatagcagcagttgttacattagatttcaatgtatacaacccttcacaactgctttctttttttagagaactccagtgccctctttgtcagcaaagagcagggaaaaaacttcgacggcaatgctcatcttgactctataccaggtcccatctaccgatctaatcctcctaaaatcacatttgataaaccgcccaaaaaaatgcgataaaatg

SEQ ID NO: 9952 - DNA, 2506 bp, Oryza sativa
  ref <308>: DATABASE ACCESSION NUMBER: AK107300
  ref <309>: DATABASE ENTRY DATE: 2002-08-28
tcatcatccacgaggacctcctcaccaccctctacaaggaccccaagaaggccaagttccaaaagctccgcacctacaagggcaaggacctcgtcggcatgcagtacgagcccatcttcccctacttcgccgaccgcttccagggccgcgccttccgcgtgctctccgacacctacgtcacctcggacgcaggtacgggcatcgtgcaccaggcacccgcgtttggtgacgacgatcaccgcgtcgccatcgcccacggcgtcatcagccgcgacgagtcgccccccaaccccgtcgacggctccggccgctacaccgccgaggtgcccgactaccagggcgtccacgtcaaggaggccgacaagcagatccagaaggacctcaaggcgcgcggccgcctcatcgtgcaggccaccctcacccatcagtaccccttctgctggcgttcgggcacgccgctcatctacaaggccatcccctcgtggttcgtgcgcgtcgagcccgccatcgagaagctcgtcaagaacaacaacgccacacgctgggtgcccgcccacgtcggcgagggccgcttcggcaactggatcgccaacgcgcgcgactggaacgtcagccgcaaccgatactggggcacgcccatcccgctctgggcgagcgaagacatggacgagatcgtctgcgtcggctccgtcgaggagctcgagcgcctctcgggcgtcaccggcatcaccgacctgcacaaggacaagatcgaccacatcaccatcccctcccaaaagggcaagggccagctcaagcgcgtcgaggaggtgtttgactgctggttcgagtccggctccatgccctacgcgcaggcgcactaccccttcgagaacaaggagcagttcgaaaagtcgttccccgccgactttatctccgagggcctcgaccagacgcgcggctggttctacacgctactcatcctcgccacgcacctcttcgactcggcgccctggaagaacctcatcgtgagcggcctcgtgctcgccgccgacggcaagaagatgagcaagtcgctgcgcaactacccggaccccaacctgctcatcaaccagtacggcgccgacgccatccgtctgtacctgatcaactcgcccgtcgtgcgtgccgagaacctgcgcttcaaggaggagggcgtcaaggaggtggtctcgtccaccttcctcccgtggctcaattcgttccgcttcttcctcgcctcggtgggcctgtacgagaaggaccacggcgtcaagtttgtctacgaccgccaccagtcgagcaccaacgtgatggaccgctggatcctcgcgcgctgccagtcgctcatccgcctcatcagcgacgagatggcggcgtaccggctgtacacggtggtgccgcgtctgggcgagctcatcgacgagctcaccaactggtacatccgcttcaaccgccgtcgtctcaagggcgagtacggcgtggacgacaccaaggcggcgctcaactcgctctttgagacgctcctcacgctgtgtcgcacgctctcgtccttcacgcccttcctgaccgagaacctgtaccagggtctgcgcaagtacatgcccgcacctgcggcggacgacaaggaggactaccgcagcgtgcacttcctctcgttccccgaggtcaacgagtcgtactttgacccggtgatccagcgacagttcaaggcgctccaggcggtggtggagctgggccgcgtgatccgcgtcaactcgaacctgcccatccgcgtgccgctcaaggagctcgtcgtcttccacacggacgcagagtatcttgcggatgccgagtcgctggcggactacatcaaggaggagctcaacgtgcgcgatctggtgctgtcttcggacgaggccaagtgcggggtgcgcttcaagctgtttgccgactggcctgtgctgggtcgcaagctgcgcaaggatgtcggcaaggtgcgcaagggtctcgagggtgtttcgtcggacgaggccaagaggtacatgcagacgggcaagctcaacgtggctggtgtggatctggtcgagggcgatctgaaggtgtcgcgctacgtcgagaccaaggagatcgagggagcgttcgagtccaacacggacggcaatgttgtggtgctgctggatgtgcagccgcgccccgagttgcaggccgagggtacggcgagggaggtggtgaaccgcatccagcgtctgcgcaagaaggctggcctcgttgccaccgatgaggtggacgccttctactcgtttgagcagggtctcggtcaggcgctggcagagtgcatcgagagccagagcgacgcctttatgaaggcgctccgcagaaagccgctgcccgagtcgcacaggaagccggatgcaaaggtgatcctgcaggaggaacaggaggtgggcgacgacaagtttgtcctcaccctcgcctgggcttagccggtcccaatgcatcgcaacccaatacaagagttttcacagtg

SEQ ID NO: 9953 - DNA, 1507 bp, Oryza sativa
  ref <308>: DATABASE ACCESSION NUMBER: AK107301
  ref <309>: DATABASE ENTRY DATE: 2002-08-28
aagcttgtccaatatcgtcgactgatcgatttgggcgagagacgacttttgtgagcttgtgaccatatggcaatggcgagcgtagcagcgttgcgtctcgtcgtcctcctcgccgccgccgtgccgctgctgccgccgccggcggcatcgctggccgtgacgtcgacgtacgtgcggccgacggcgagggcgacgctgtccgtgctccacgacggctatggccgaacgccgcagcaggtgcatatatcagctgtaggctctgacaagatgagggtgacgtggatcaccgacgacgacgcgccggccaccgtggagtacggcacggtctccggcgagtacccattctcggcggccggaaacaccaccacctactcctacgtcctctaccactccggcaacatccacgacgtcgtcatcggcccactcaaacccagcaccacctacttctaccgctgcagcaacgacacgtcgcgcgagctctccttccgtacgccgccggcgagcctcccgttcaagttcgtcgtcgtcggcgacctcggccagacggggtggacggcgtcgacgctgcggcacgtcgccgccgacgtctacgacatgctgctcctccccggcgacctgtcgtacgccgacttctaccagccgcggtgggacacgttcggccgcctcgtcgagccgctggcgagcgcgcggccatggatggtgacggagggcaaccacgaggtggagaggatcccggtcatccacccgcggccgttcacggcgtacgacgcgcggtggcgcatgccgcacgacgccggcgcgtcgccgtcggggtccaacctctactactccttcgacgtcgccggcggcgccgtgcacgtcgtcatgctggggtcctacgccggctacgccgccggctcggcgcagcaccggtggctgcggcgcgacctcgcgggggtcgaccgcgccaagacggcgttcgtggtggcgctggtgcacgcgccgtggtacaacagcaacagggcgcaccgcggcgagggcgacgccatgcgcgccgccatggaggagctcctctacggcgcccgcgtcgacgcggtgttcgccggccacgtccacgcgtacgagaggttcgcgcgggtgtacggcggcggcgaggacgcgtgcgggccggtgcacgtgaccgtcggcgacggcggcaaccgggaggggctcgccacgaggtacgtcgacccgcagccggcggcgtcggcgttcagggaggcgagcttcgggcacggcaggctggaggtggtgaacgccacgcacgcgctgtggacgtggcggcggaacgacgacgacgaggcggtggtcgccgacgaggtgtggatcaccagcctcgcatccaacccggcttgcaacaagaagtattccatcagcttgtattgatgtgtgagaaactaggatgacgataggtagtgtgattctcttgatgattatactacttgataaatctctctcacataaattatatagtatatggttaatttgt

SEQ ID NO: 9954 - DNA, 1300 bp, Oryza sativa
  ref <308>: DATABASE ACCESSION NUMBER: AK107302
  ref <309>: DATABASE ENTRY DATE: 2002-08-28
aaaaatcccaatcccatctcccctccgccgcttttgctcccgccgtccgtcccggagccgcctctctccggccgccgccgccgccgccgctgcctctcgtgacgtgagggatgagtcaaactcagtgctccaaagttgtgcgtggcagaggcaggaacaaaaggaaatggacagccgatgaagatgaggagcttgtcaaagcattgtgcgaggtttctcttgatcctagatttaaggtcgaaggagggggattcaagaactgttattctcaagggatagagaacattcttgcgcaaaggctgccaggccgtggtattagatccagtcctcatgtcgattctcggttaaaagtgctgaagaggaagtattatgcgatcaaagatatgttagcgttgcccaggttctcgtgggacggcatgcggaagatgattcagtgtgaaaaagagttatatgatgctcattgcaaagatcatcctagagccaagagtttgtatggtaacccatttccatattttgatacatttgatgtaatatatggcaaggacagaacaggcagagaggaggaggaattgtcagcaccatggtgacagcaatggagttgttcaaggatgtgcacaatcacttccaaaatgttgttcagcatgccaatgcgatggccacggcaatggagatgttcagggatgcacatgatcacttccagggtgctgtgcagagtgtcagcagcgcagcatcagccatcgaacggttcaaagacgcacatgatcgttttcagaatatcactcaccatggaagcatggtagcagcagtgatggaatgtggtaccgatcatacacaagagaagaagatgtgcgaggaaccccaataaaaggccaaagtgacagctatagctgaaattcaaaagcttggccttactggaagcgaggtggtcttcgcagcaagtattttcgcaaaggaaccaaaccaaatggagatgtttttagcactcccagaaatctataagagggactacatagtccaaatgctcaacggtgggcaatctctccggtattagctgaagctagggattgaaacggatcggaaacggacggaaactagctttaacatattcgttttcatatttttttcggaatcggaatcgaaaactcggatacggaaatgaaatcgaatattatcgaatacagatacggagcgaatacgagacggaacgaatacggtagcgaatatttaccggtatataaaaaacccctcaaattgagtttcttgatcaaggaagagatatcacttattattttagttcaac

SEQ ID NO: 9955 - DNA, 1489 bp, Oryza sativa
  ref <308>: DATABASE ACCESSION NUMBER: AK107303
  ref <309>: DATABASE ENTRY DATE: 2002-08-28
gatatgttggacgatgagctgcaggcagcgcttgacagaagagcagccaagggtacgctgcgccagctcaccatttacccgacctcgtcgacggcagcctcaacatcctcatccagcgatcagcccctggtcgacttttcgagcaacgactacctgagcctggccacctcgtctcgggtgcgcgccgactctgctgccatcattgcatcggattctccgctctcggcacagctcggcagcgccggatcacggctgctggacggcaactcgtccgcgcacgaggccatcgaggacgacctcacgcgccactttgcctcgtcggaggcaggcctcctcttcaactcgggctatgaggccaacgtctcgctcctcagtacactgcctcagcccaaagacgtcgtcatctacgacgagctcgtccatgcctcggtgcacgatgggttgaggcgctcgcgcgtgcctgcgcatcttcgcatccccttccgccacaactcggtcgatcacctccgagacattctcagccgacttcgtcaggatggcacgctgactgccggtacaagcgcggcccccggcgagcagcgcaacgtttggctggccgtcgaaagcatctactccatggacggggacgcttgtcccttgcgtgcgctgctcgatacgctgtcgcagcacgtgccccagcaccgcatctgcgccgtggtcgacgaggcgcactccaccgccgtgtacggctcgcgtggcagaggcctcgtcaacgcgctcggtcttcaagacgatccgcgcatcacggccaggctcatgacgtttggcaaggcgtggggtgcttcaggcgctatcgtgctttgcagcaagatcgccaggcactatctcatcaactatgcgcgcccgctcatcttcagcactgcgctcggctatccccaactggcgtccatcctcgcagcgttccgttccgtacaagacgggtcggccgaaaagagggcccgtgctacctttggcaatgcgagaaggctcgtggacggcctggagggcgtcattcgatcgcaatctccggctgctaagcgaacgatcgctctgccaccacatctcaagcccaagcaacaagctcagctcgcagtggtagctgatgacgactttgtacgatggtcgatgcagcagccctcgcccatcgtgcccgtgttgacgagccgcgcacgcgaactcgcagcgcatcttcgcgcaaacgggttgctcgcaaggcccatctgctatcccaccgtacccaagggcgaggacagagtcagaatctgcgtccatgccgataacacgacaagcgacatcgacaggctgattgacagcgtccagtcgtgggttcacgatgattccggccacatctctacgcggacagaagtcggtcgacacacagcaccatcacccgcacacgcacttgctgccaagctgtagacccggactcgcaataccagccgtcaaggtgcacccactgacattgacactg

SEQ ID NO: 9956 - DNA, 1397 bp, Oryza sativa
  ref <308>: DATABASE ACCESSION NUMBER: AK107304
  ref <309>: DATABASE ENTRY DATE: 2002-08-28
aatgtctctccggcccctctgaatccatccttaaagactaaaccctccataagcctcctctctctctttcttccaggagacaggtgacaagggggatagatacacaacgatactccgcagcgcaggaggaggacacatccttgatttctgccatcggaggagctcctgcctcggagatacacgaagctgctacatcttcttccagctcaatcgtatcgacgcttgcatctcttttgctcagagtgatcgtcgtttttcacagcttggtaagatcacttcactcttctccctagcttcggtattgatcgatcttcctctcgctgtgcctgcagcaaatgtctttaagctcatgtaatccgtgccatctatcacctgtgtgttcatactgtgtcactatcagtaagccggatgcatgttaggctgttgacctgttgttagctgcaccggctaactgtagtgagcagtgaccttaatttcttttgcactacatagactgcttgttcttttcttcttgagagagagagagagagagagagagagggagggagggagggccatagcataagccatggaggaggaggtggagtatggagtatgcatggtgttcgtccgtacgtacgtgtcagcgagcgagagcctcggttggcgcacgtcgtcctttctgtatagctggctcctggttgtgtttgatcgatcgtctagctaacgtcggagaccagattaattagacatgacctgacgtgcttaattaagctctccagaaatgattaattagctaccaagtggtcgttgtggctgtgctgctgctgccgctgctgattgcgtcgcgacgagggtactgatgctagcgtcgccatggttaaaacttaactacgcttaaattgcagcctgataaaagatcgatactacgggtcaggtggcagctatccgtcagggtttcagtctgaagcggtttaggtgaagagctggagaaggagtaaatgcatgtgtgtgttgctgatgagaatgagatcgctcggctgccggtgcttggaaaaccacccgcccggccgacgcgtgcatgccgctgctagttgacaaattcctcaatcacacgccccccgccaccaccaccaccaccaccagcatgcatgcatcaccaaaacagacgagcgttttgtcctttttttccagagcttttgttccacacctctcccatttcttcagataggaaaaatttaaagaaatataagctggtgcatgtatatcctaagtggtgtttggttggagggactaaagtagggctaaactttaacccctttctcgaaaacataagttataggggctaaagtttagcccatctctcccaaacacccccctagtactgcagtacatggttcatgcaggctcaaagtgag

SEQ ID NO: 9957 - DNA, 1247 bp, Oryza sativa
  ref <308>: DATABASE ACCESSION NUMBER: AK107305
  ref <309>: DATABASE ENTRY DATE: 2002-08-28
attaagcttgaattgctgctcccttgggcgcatgtgtgtcaccctctccttccattgatcctttcacatcctttaatttctctctttcttccacaacaaatcaaactgttcatcctccccttcacctttgacctttccaacctaattaattagctactacccaattagccgatccatccatggaccgcactgcgactgcaagctgggaggtcatgagccggcgaggtgagcagcagcagcagctgatgatgcaagctccggccagccataatggtggcagcggcggcggcgagccggcgaggtcgcggtgggcgccgaagccggagcagatcctgatactggagtccatcttcaacagcggcatggtgagcccggccaaggacgagacggcgcgcatccgccgcctcctcgagcgcttcggcgccgtccgcgacgccaacgtcttctactggttccagaaccgccgctcccgctcccgccgccgcgcccgccagctccagcaagcctgcggcgccgccctccatcagctcccctccgccgccgccgccgccggagccggaggaggaggagattactatcaccaccaccaccaaccttcgtcttctcctttcctcatgcacggcggtggcggcggcggcgtggtcacttcgacgaccgcggcgccagcggtggcggcgtccggccacttcttggcggacgaggtcgacggcggcggcgacgacgacctcttcgccatctcccggcagatgggcctcatggctcgccacggcggcggcgaccaccattacagcagctacgcggacagcgacgccacccagctcagctaccaaccaaccgggacgatccaagtgttcatcaatggcgtcgcatacgatgtgccgagcggcggagcgctggacatggccggcacgtttggccgcgacgccatgctggtgcactcctccggcgaggtccttccggtggacgagcacggcgtgctcatcaacagcttgcagatgggggagtgctactacctggtttcaaaatcgatctgattaatcggatggatgaaggtggagaagaagatgcaagatttatgtatgctcttgtaagcatgcgggatttgcttcattgattaattgggagattgattcccagctccatgaattgttgttaattaggttgtccagggatcatatcagtgtgtactaatgtggttgatttctctccatcgatgtatattattatctcgatgcatcgtccccttg

SEQ ID NO: 9958 - DNA, 1591 bp, Oryza sativa
  ref <308>: DATABASE ACCESSION NUMBER: AK107306
  ref <309>: DATABASE ENTRY DATE: 2002-08-28
ataattcgcaggccgtcgcttgctctaccacagcagccgccgcaaacgacgccctcttttctctgtctccctccctcctcctgccgctcacatcaaaatcctactctctctcgcggcgctcggctgaagcccagccatgtccgtccccggcgtcgcctcccgcgccgccgaccgcttctactgcccgccgccgcgccgccacctgctccaccaccaccacaaccaggcgtctaaggcggcggcggcggctgtagagaggcagccgaggagcgccgcggcggcggcgaaggaggaggaggaggagaccaatctcgagtgcttcatcgcgtccacggccgtccgcgttcccgcgcatcggctcccccggacgagctcgagctcgcgggagaggggagcggccggggcgccgccgtactacgagctcgcggatctgtgggaggcgttcgcggagtggagcgcctatggcgccggcgtgccgctcctgctcaatggcacggacggcgtcgtgcagtactacgtcccctccctgtcggctatccagctgttcgctgcccggccgccgtcgtcaacctcaggtagacttggtgaagatagtgatggtgagagtgctcaggatatgagcagtgagagcgaccatgagcatttaagatgccgatgtttagttaacagtatttctgcagatcaagatggtttctccagtgatgatagtgagtctggcaaccaggaattgtaccctgttttccaatatatggagcatgatgcaccatatggaagacaacctttagcagacatgatatcattacttgctaatagatttcctgatttaagaacatataagagctgtgatcttctaccatccagttggatttctgtagcatggtatcccatatacaggataccgacaggaccaacattgaaagatttggatgcttgctttttaacattccattcactatctacaccagcggaaggtacactaagtgggcatcctgagacaaatgttttccatgatagcaaaatttatgatgttcctggaaaggtcacactgcctctcattggtctagcatcacacaagtttaatggttccatgtggacatcaaatcaagagcatgagcaacagttaactaagtcgctcctgaaagctgcagatgactggctttgccagcggcgagtcaatcatcccgattaccgcttcttcctttcacactaatacacatgtttgtgaaagttccctgcgttttggcaaatagctcagccagatgcccactaattaagtgatgaacttaacatactgccattgagtccacgggcactgatatcattatctctttttttattattattatggggcttcatttatgtcatagccccatatttatttttacctagatctgcttagttcactggtattttgggttactttatagtaactagttagataggggtcaccagaattatttagcatctcgtaagatgcttttgagtggatggtatgtggcagagctaggtaggcagtgagtggttagagatgtatatcggtctgcttcagatatagtgatgatgatgataaagtatttcaacattttgtttt

SEQ ID NO: 9959 - DNA, 899 bp, Oryza sativa
  ref <308>: DATABASE ACCESSION NUMBER: AK107307
  ref <309>: DATABASE ENTRY DATE: 2002-08-28
ctcactctctcaactcaactcaccactgcttcgagttggggatggcgatggtggcgatggtggtggcggcgatggcggtggcggcggtggcgaggggggacatgagcgcggacaggacggagtgcgcggaccagctggtggggctggcgccgtgcctgcagtacgtgcagggggaggcgaaggcgccggcgccggactgctgcggggggctccggcaggtgctcgggaagagccccaagtgcctgtgcgtcctcgtcaaggacaaggacgacccaaacctcggcatcaagatcaacgccaccttcgccctcgccctcccctccgcctgcggcgccacccacgccaacgtctcccactgcccccagctccttcacattcctccgaactcgaaaggcgccgccatcttcagccccggtggcgacaagggctcccctgctgctccagcgaaggacaactcgacgacgacgaccgactcgcgcgctgtgcaggcggccaacgggggcagccgctcgtcggcggcgaccgccggcgccgcgctgacggcgttgctggccggctacttcctcctgctcctgccggaattctcagctccgtcgtccttctagatcactgtctgcatcatctcgtgcgtcctgcagctaccgatcgaaaccaagaacacgggattggatggagccagatcaattagtgggcgattatattggacaatgcctggtgaaaaactgagactcagagagtgtgatgcatccgtgcatatgttgtagtatgtgacagatagtaattcgttggcgtttgcagtgtactgtactgcactgtttgttcttttcctgctatgttctggattctggacgatgtgttttgctactcctactagcttttctatagtacatctggttact

SEQ ID NO: 9960 - DNA, 1698 bp, Oryza sativa
  ref <308>: DATABASE ACCESSION NUMBER: AK107308
  ref <309>: DATABASE ENTRY DATE: 2002-08-28
attgcttccacaaacaccatcacggcgcaacacaaaggctccctacaccatgtcgaaagacgcaaagagcccgaccaaggagtccaagaggaagtccaaatcctcggacgccgcagagtcgcccaagaagtccaagaagaccgcatcggcaaccgcgtcttcttcttcgaatgtggaatcgacttcgtccaagggcaagtccaaagcaaaggatggccaggccacgctcaaggtgcaaggctccaagtctgcgtcgcagcagctgagcaaagccggagccgccttcgcctcgtttgccgactacaatccggcgccctccaccaagttcagcctgtaccgcgctgagggtctgccagacgagacgggcgcacgagacgacgcatctgacgagcgcttgctgcttgctggcgagaccgacaccatggcctacgttggcaacaacttcgagttcggcagcaccgccgaggcgcgaggctacacgggcgaatacatggtgggcatctacgacccctcgagcagctcgatcacgctgcgtgcgctacccacgttccaggtggcgcgctcgatcaaggccaacagctcgctcgcatccatctcgagcagccgcacgttcgccgactatggcgaaatgaccgccgcacgccgcgcactcggcgacgccttcggtaatcgcaagcagaaggccaacgcgcgcaaccaggaccgcatgaaggtcgacacggccaacatggaggtcattctggacgactttaccggtggcatccaggacagcgttgcgtcgctgccgtcgctggacgaggtgctggcgtcgtcgacggcttcgcgacccatgccgcccgccaacctggacgccaagcaccccgccgaggcgtaccgcatctcggacctcatccctacggacgtcttccaggcgctgccgatacagaagctcatcgacaacgtgcacgatgccgacgagctgcagaagctcatcccctactcgcgcgagttccccgattggatctggtcgcgactcgtcgacaacctgcagcgcagctcgcaccttggcggcggcagcaagagccagaagcacaccacttttgacgacgacgatgaggatgccgacaagccggcgaacggcgacgacgacgatgtgatgatgatgccggcgctgggtgcgaccgaggacaaggaggatgcgacgaacaaggtgcgcctggcgtactacatgtcgatgctgtggtacctgcactcgcgacccaagtcggtttcgcagcgcagccgcctgattacttcgctcaaactggatggcgaggatgcgaacaagcgcatcgtgcgtgcgctgctgaacacattcagcgagacgccggcgaactcggatcgggcgcagatgtcggcgttccaccagaccaagctgctggcgtacatgtgtgcgctggcgctgcatctggacaacttttcggtcgactacgacaagctggctcgcaactgcaacattgcgccgtcgacgctgcgtgagctcttccgcacactcggctgcaccgccgccacgacgggcggcgaaaggcgcatggtgctcaagacgccctttacgctgccacagccccgaaagggcaaggcgggcggccgaaagtgagggctgctatccactcacccactcgtgtacattcatccacattgcatttctctcttttccatcagcaatagtctttctttgat

SEQ ID NO: 9961 - DNA, 1675 bp, Oryza sativa
  ref <308>: DATABASE ACCESSION NUMBER: AK107309
  ref <309>: DATABASE ENTRY DATE: 2002-08-28
acgattcgatccgctgtttaccactcgatcgactcccgcatcccattctcgttatccttccatccacctgatatcgccaccatgccgactctcaaccttgacctgcctaacggcatcaagtccaccgtccaggccgagctgttcatcaacaacaagttcgtgcccgctctcgacggcaagaccttcgccaccgtcaacccgtccaacggcaaggagatcggccaggtcgccgaggcctccgccaaggatgtcgacgttgccgtcaaggccgcccgcgaggccttcgacaccgtctggggcgagaacacgcccggtgatgcgcgcggcaagctcctcatgaagcttgccgacctcgtcgaggagcacgtggacgagcttgctgccatcgagtcgctcgacaacggcaaggccttctccatcgccaagggcttcgacgtcgccgccgtcgccgccaacctgcgctactacggcggttgggccgacaagaaccacggtaaggtcatggaggtcgacaccaagcgtctcaactacacccgacacgagcccatcggcgtttgcggccagatcatcccttggaacttcccgctgctcatgttcgcatggaagctcggtcccgcgcttgctaccggtaacaccatcgtgctcaagaccgccgagcagacgccgctctcggcgctcaagatgtgcgagctcatcgtcgaggccggcttccctgccggtgtcgtcaacgtcgtctcgggcttcggtcccgtcgccggagctgccatctcgcagcacatggatatcgacaagatcgccttcaccagctccaccctggtcggccgcaacatcatgaaggccgcggcctcgaccaacctcaagaaggtcacgctcgagctcggcggcaagtcgcccaacatcgtcttcaaggacgccgacctggaccaggccgtgcgctggtctgcgttcggcatcatgttcaaccacggccagtgctgctgcgccggcccgcgcgtctacgtcgaggagtccatctacgaccagttcatggagaagatgaccgcctactgcaagggtctccaggtgggcgaccccttcgccgagaacaccttccagggtccccaggtctcgcagctccagtacgaccgcatcatggagtacatcgagtcgggcaagaaggacgccaacctccacctcggcggtgtgcgcaagggcaacgaaggctacttcatcgagcccaccatcttcaccgacgtgccccacggcgccaagatcgccaaggaggagatcttcggccccgtcgtcgtcgtgtccaagttcaaggacgagaaggacctcatccgcatcgccaacgactcgatctatggcctcgccgccgccgtcttcagccgcgacgtcagccgcgcgctcgagaccgcgcacaagctcaaggctggcaccgtgtgggtcaactgctacaacatgctcgtgccccaggtgcccttcggtggatacaaggcttcgggtattggccgagagcttggcgagtacgcgcttgccaactacaccaacatcaaggccgtgcacgtcaacctcaacatccccgctcccatctaagcgtggtcgaagcgcctgcccaggaaaaaaaaaaggtaaaaaacgtctcggttgtggtctttgtgtatgtctcgatgaatacaatgaatgccgtctcgtg

SEQ ID NO: 9962 - DNA, 1398 bp, Oryza sativa
  ref <308>: DATABASE ACCESSION NUMBER: AK107310
  ref <309>: DATABASE ENTRY DATE: 2002-08-28
attgatacatcattagaaaaacacatcatgccttttgacatcgagaagtgcgcgagacccaatatcttggcccttgagccgtacaggtgcgccagagatgactacaaagacgatggtaccaatgtgctcctagacgccaacgagaacgcctacggacctggtctggcgcttggtagtaatggcaagcttgcgaatggcgacgcttctgacatcgaaattgatcttcttggactcaaccgctaccctgacccgcaccagcacgagctcaagcagcacttgatcaatttgcgtaacacaaaagttcacacgcaaaaggacctcacagtcgacagcttgttcgtcggtgtcggcagcgatgaagcaatcgatgcgttgctccgcgcattttgcacacctggcaaggacaagatcttgacttgccctcccacatatggcatgtactcggtctcagcccacgtcaacgatgttgaagtcgtcaaagtgcctctggacgtcgatgatggcttcaatgcacagcctgacaagatcaacgccaagctgaccgaagatcccaacatcaagatggtctacctatgctcgcccggcaaccccaccgccaacctcgttcgcaaagaggacgtgagaaaggttctggagcaccctacctggaacggcgtggtcatcgtggacgaagcatacatcgatttctctcctgatggatcatcactagcagaatgggttgccgagtggcccaaccttgtcgttatgcagaccttgtccaaagccttcggactggctggtatccgtctcggcgctgctttcaccagccctcagattgcaaggctactcaacagcctcaaggcaccttacaacatctcaaacccaacatcacagctggccatccaagcactgcaacctcagaacttgaaagtcatgcacgccaaccgcgccgccattttggaacagagggagcgcatgctcgtcgaaatgcccaagatcccgggcgttggccgcttccttggtggccgtgagtcgaacttcctcctcgtcgagatgctcgatgggccagacggcaagccgagcaatgaagtcgcactgcaggtttacgagcgtttggcagagaagcgtggcgtggtgaccagattcagaggcaaggagctgggttgctttggctgcttgcgcgtgacaattggcacggagaaggaggtgacaaggttcctggcagagctcaagtcagtactggctgagattcacagtgggaaggttgcgaatggcgcgcccaagagtgttgaggagaggaaggagcaagaggccagcggtgttgtcgcgtagatgatgtgcgcagtgctatagatgagtttaaaagtagagtgtgtggctcgcaagaatggtcgacacatcatgtacaaaattcggtct

SEQ ID NO: 9963 - DNA, 1370 bp, Oryza sativa
  ref <308>: DATABASE ACCESSION NUMBER: AK107311
  ref <309>: DATABASE ENTRY DATE: 2002-08-28
aagtcttttcctagctagccagcaacatcttcagatcgatccccccaccaagcctgcatttcattgcgggtgcacgcagagatcgaggagagacgatcaccaccatggccggagagatcattccagacggcggcggcggcggcgcggtgttggcggcggagagcgtgatgctgccggcgagcatggtgctggtgcagctcttctccgtcgtgctggtgctgctgtccaagctcgccctcagcaccggcatgcggccgttcgccctcctcgcctaccggaacctcgtcggcgccgtcgccgtcgcgcctctcgccttcatctttgagaggaaaaataggaaaatcccgagcattgtggagtggtgctggatttcgcttaatgctacatttggggtaatcctatcaatggggctgtactactatggactgcgaagcacctccgccacatattcagtcatatttctgaacctgattcctattgtcacgtccatcattgcaatctattcggggcagagaagttggtgtttacagactggcctggcaagataaagctcttcggtatcataacatgtgtgggaggaacaatggtagtgagcttgtacaaagggaaactgctgcatcacccttggccttcccacctgttgaaattccacacgcagaaagcatcaggctatgcctatcatcacaatttgttagccggtacattgttcttgtgtggcagctgccttagctacgccttttggttcatcatacaggttaggcttgcgagcgtcttcccgtacaggtattgggcaactacgctgacatgtctttctggaagcctgcaagcctttgtgattggcattctgatcagccctacaaaatctgcctggaccctcaaatgggacatgcagcttctgacagtggtttattcaggggtgttcaacactggtatctcatttgtcctgatgtcattggcggtcaagcatcgtggaccgatctacccatccatgttcaactcgttatcgctgatcgtgatggtgatcatggactcagtgttacttggtacaagtatcttcttagggagcattctggggacagcattcatcattgtggggctgaatgcgtttctatgggggaaaggcaaggagctgaagcaagctgtggcgcagcacaccagccacaagcagaacacagaccacaacgagcaggttggagatgagatagcatagcatatcagcactatgattgaatgaaagatgatgcttggcaaatttgcgatgatgacgataaaaatgtctagatagataagggattagcatggtagtttgtaactagtttccggtgcaaacaaaaatatggtacaaatgaagttatgaaaagtttgccacc

SEQ ID NO: 9964 - DNA, 1368 bp, Oryza sativa
  ref <308>: DATABASE ACCESSION NUMBER: AK107312
  ref <309>: DATABASE ENTRY DATE: 2002-08-28
atcagcgctgccgtgcattctcactacgcctcgcatctgtcatagatcgcacgtcgtgcccatcgcatcgtccgcctctacgacgctttccccgcacttcgttttctctcgcgtcacctctgccgtagaggtgctcctttcgctgccttcccagcctcgtctctccgcccagtctggatcggcaacgcacgcgcctctttgcatctctctcgccgttgcattcccacttcaacgctctctcttacgcgctcgtaggaaactcagctcgcgtggcctcactcgacccaactcctcagcaccgtcgccgctccgagcttcacgcacacgtcgccccttttccgacacagatcattgtcgtcggcttctccgaacagtcgctctgccttgcagctcgaaccgcgtcacatcatctcgaggtcacccgcgccgcctacattcgcgcccaaagtttgcctacccaaggctatcatagtgcttgaacctcgctacaactagacgccaacatgcagaccatcaagtgcgtggtcgtcggtgacggtgccgtcggaaagacgtgcctgctcatctcgtatacaaccaacgccttccctggcgagtacatccccacagtgtttgacaactactcggcaaacgtcatggtcgacggtaagccggtatcgctcggactgtgggatacggcgggtcaggaggactacgaccgtttaagaccactcagctacccgcagaccgacgtgttcctcatctgcttttcgctcgtcagcccaccgtcgtttgaaaacgtgcgcaccaagtggtggcccgagattgcgcaccacgcgcccaacatccccaccatcctggtcggcaccaagctcgatctgcgcgaggacccagagacgatcgccaagctgcgcgaccgtcgcatgcagcccatcacatatgcacagggcaaccagatggcgcgcgacatccacgccaccaagtacctcgagtgctcggcgctcacccaaaagggcctcaagggcgtctttgacgaggccatccgctccgtcctcgccccagcacccgtgaagtccaagaagaagaacaactgcaccatcctctaggctctcccctcgatcgcacagccgtgtcagtccatgccgtgcgggtagcatcaaggcgcgtaaaaaagctcctttctcgcgcttgacgacccgtcgcatctagacatccatccccgcattcccacctctccccctgcgcggcgcggtcgtgaggctaggcaccgtgcgcggcggtgacatgatcccaatgcccgcatcgtctggcttcacttacgcgctgttcacaacttcatctcccctggtttcgtctcttgtgttggtacttcaaggttttctttctttc

SEQ ID NO: 9965 - DNA, 1638 bp, Oryza sativa
  ref <308>: DATABASE ACCESSION NUMBER: AK107313
  ref <309>: DATABASE ENTRY DATE: 2002-08-28
cgtgttgcgggatcacacccaagtgtgtgagctgatcgggagggacctcgtgaggtgtctccatgaactggtgctcgtgcaggagttccatgaactgtggaaggactcgatgctgggccgtgcggcggagatctgccgcattggcatgccgggttggtgcaccgcgatggccgtctcaccggagatggagacgcagctgctgttcatgatgaacaatgtgaggtgggggaatcagaagaggtaccagctgtggtttgcgaggaagcatttgatggtgcctggaggggaggagaggatacccgacattgtccggttcatctgttgcgggtatcacccaacaaataaggttatgcagtctggtgtcattgcccgatgggcggtcataggttggctgctgacaagctgcaataagagctatgtgcaggcgaatgcaaaggttgcgctgttctatgactggttgtttttcgacgagggtaagggcaatctcatgaatattgagcctgcaatgctcctgatggtaaactcagtgtctcagtatactgatatcacaaacatgctacttgagttcttgtttcttcttgtcgagaactatgacgtgcggaggaaggaggcgattgctgagtgtgtaaggaacgcatttgcggtactggtgaagaaaggagtggtcccttccttggatatattgacatgctgtgagaagctttcaccgatgctgaggcagaaacttgtggcatttttatcttctgctagtcctgaagaaaccgaaaaaacttgtgggcaacccattgatgaggcttctaaagcaatggatttgaacaacagagtttgctcaaactagacccttttactgttcaacagagtagcatgttaggaatgaactcaacaccacttgcccgcaatttctccttttgggatcttcaggaagacctggaaagaggacttgaagattgtatggcatcacgtgtagaggtgaacgcatgctttgaaggtggaagaatacggattgtagaatgtggcttaccaacagctggtcatatgagcagagctacgcatactaaatctctgctgacatgttacatcgcatcacagacacatttgtttacagagttacagtctaacccatccagtgaactacacaaccttgttagcatactcatattcatggttatggagataatgaactggccttggcattggtttctcacctgaaggatggaaatggaatacatttaactggacacaatatgtgcttcatgccatgtatttacctttgttttaaatataacaaattcatgtacagcagaaaactaggtcttcatacaaatttacaatctgcctgaactgattgaagaaacctcaatatgagcttttggatgctacaagcctaagacaaaaatatacagatcttatgttcaaatgtgctgcagagacaacatgcactgcatccttgtgatgctgaacgtttttgtgtgggcgtgatatattttcttcagaaacatagccacaggtgtatgtgtggatgaatttctcctgagttataggagttcatccgatttaagtaggccacaattatgcacttgtaaatattttgtaactatcccagcttttgttattcaatagtaaaatctctttcatggt

SEQ ID NO: 9966 - DNA, 1764 bp, Oryza sativa
  ref <308>: DATABASE ACCESSION NUMBER: AK107314
  ref <309>: DATABASE ENTRY DATE: 2002-08-28
aaaagcattcagttcattagtcctacaacaacatggcatccataaatcgccccatagttttcttcacagtttgcttgttcctcttgtgcgatggctccctagcccagcagctattaggccagagcactagtcaatggcagagttctcgtcgtggaagtccgagaggatgtagatttgataggttgcaagcatttgagccaattcggagtgtgaggtctcaagctggcacaactgagttcttcgatgtctctaatgagttgtttcaatgtaccggagtatctgttgtccgccgagttattgaacctagaggcctactactaccccattacactaatggtgcatctctagtatatatcatccaagggagaggtataacagggccgactttcccaggctgtcctgagacctaccagcagcagttccaacaatcagggcaagcccaattgaccgaaagtcaaagccaaagccataagttcaaggatgaacatcaaaagattcaccgtttcagacaaggagatgttatcgcgttgcctgctggtgtagctcattggtgctacaatgatggtgaagtgccggttgttgccatatatgtcactgatatcaacaacggtgctaatcaacttgaccctcgacagagggatttcttgttagctggaaataagagaaaccctcaagcatacaggcgtgaagttgaggagtggtcacaaaacatatttagtggctttagcactgaactgcttagcgaggcttttggcataagcaaccaagttgcaaggcagctccagtgtcaaaatgaccaaagaggagaaattgtccgcgttgaacgcgggctcagtttgctgcaaccatatgcatcattgcaagagcaggaacaaggacaaatgcaatcaagagagcattatcaagaaggaggatatcagcaaagtcaatatgggagtggctgccctaacggtttggatgagaccttttgcaccatgagggtaaggcaaaacatcgataatcctaaccgtgctgacacatacaacccaagagctggaagggttacaaatctcaacagccagaatttccccattcttaatcttgtacagatgagcgccgttaaagtaaatctataccagaatgcactcctttcaccgttctggaacatcaacgctcacagcatcgtgtatattactcaaggccgagcccaggttcaagttgtcaacaacaatggaaagacggtgttctacggagagcttcgtcgtggacagctacttattgtaccacaacactatgtagttgtaaagaaggcacaaagagaaggatgtgcttacattgcattcaagacaaaccctaactctatggtaagccacattgcaggaaagagttccatcttccgtgctctcccaactgatgttctagcaaatgcatatcgcatctcaagagaagaggctcagaggctcaagcataacagaggagatgagttcggtgcattcactcccctccaatacaagagctaccaagacgtttataatgtggcggaatcctcttaagttggtaatgcggataaagaataactaaataaataaataaataaattgcaagcaattgcgttgctgctatgtactgtaaaagtttcttataatatcagttctgaatgctaaggacatccctcaagatggtctttctatttttgtgttcccgttccaatgtactgttggtatcctcttggagattcatcaatatgagaaaacagagaatggacaaccctcccttatcttatgg

SEQ ID NO: 9967 - DNA, 1432 bp, Oryza sativa
  ref <308>: DATABASE ACCESSION NUMBER: AK107315
  ref <309>: DATABASE ENTRY DATE: 2002-08-28
tatccgccccagggccagcagcaacaattcggtggaccacctggccagggccagtttgctggaggcccgccgccaccaccgtctggtcctcatgatgtcggccaatacgttcgtcagctagaggaggctatccagcagaagcgccttcagagcttctaccctcctggtgatcctcgcattcagcagactgctcagcgcgctgctcagcaggtcgataagcttgttgccgcatggcacatccccagagaaattgcagtcgatattgtcagacttgctctctacgatgttgtcatttacatcgacgacagcggctccatggctttcgaagagcaaggtgaaagaattaaggatcttgaattgatcatgcagagagtcgcgttcgccgcaactctcttcgacgacgatggcatcgagatccgtttcatgaacgacgacagcaccccgcctaacatgcttggaaatattcgcaccgagcagcagattgctcaggtcatgtccaataggagatacaagggcctcacgccgttcggtaccaagctgcgtcagaaggtcatcgacggcatcgtcctgcccaagctccgccagccgcgcaagccggtcttggtcattggtatcacagacggccagcccgcaggcgagaacgctggtgctctcgaggataccattcgctacgctgtcaactccactcagaacttgggccctggcgctgttgccttccagttcgcgcaggtcggaaacgaccaaaaggccaccgagttcttgggcaagctcgacaacgatccggtcattggaagcatggtggactgcacatccaactatgagaacgagtccgcggagatggctcgtgctaacccgcccgtcgacctcactccggatctctgggtcctcaagctcatcctcggcgccattgaccccagctacgacactcaggatgagcagggctccgctcaggttcccggccctggtcagttcagccagcagcaaggtggctatggtggccagcagcaataccagcctccccctggtggcccaggtcagcagtaccagccacctccaggcggtcctcctagacctcagggcggtcctggtggctacgcgccgcctccaggtggtcctccttcgggttaccccggtcagcagacctacggtggcgcccctcccgccccgccgagatactagggggggtatggtcaatgttgatcggtcttgctcgggcgttcacatgaaaagaaacggccatttacgatcaagctaagcgatggaagcgctggcgtgctattgaacatggtgaatatcatacgaaatcgcctgggcggctgaaaagcgatgttcgtgtaactacgggcgaacgggcgaacgggcgaactacaaatgagttgacttgatgagtagtaatgaattaatagcgcccagaaataaattgcattgaaac

SEQ ID NO: 9968 - DNA, 2219 bp, Oryza sativa
  ref <308>: DATABASE ACCESSION NUMBER: AK107316
  ref <309>: DATABASE ENTRY DATE: 2002-08-28
tttagcttcttcttcctgcttcctctctctctcttctctcctcctcctcccactgagatccctctcccctccccgccatcgccatggctcccccaccgccgccgccgccgccgtcggaggaagagacgagacactagaaaagacggttcttgaccgagtttgcggccgatccgggcttggatttgccacgggaaaggaaggagtttcgggggctgatagagtgaaaggcgacgagggagaagatggcctcggaaatgtttaaggcggcgacgagtgagaagctcaaggagatggattgggccaagaacatcgaaatctgcgagctcgtcgctcaggatcctgggaaagcgaaggatgtgatcaagccgataaagaagtatttaggtagcaggagcaagaacactcaactttatgctgttatgctgttagaaatgctcatgaataactgcggagaacctatccacaagcaggtcattgataacggtcttctcccgatacttgtgaagattgtgaagaaaaagacagaattaccagttcgtgaaaaaatatttcttttgctggatgcgacccaaacatcccttggtggagttaaagggaaattccctcagtactatggggcatattatgagttggtgtctgctggcgttcagttttcgaatcgcccaaatgttgttgttacacaagcacaagctccagtcccggtcccagaaccaacaatcgaaccaaataataacagtttatctaggagattggacgaaggacagaaggaagtgcatgcgcagcctgtttccgagtcaagtatgattcggaaagcttctagtgtcatggaagttctaaaggacgtgcttgattcgatggatcctagacaccctgagggagcaactgatgagtttgtgttggatcttgtggagcaatgcacatttcaaaaacagcgaataatgcatctagttatgacatcaagggatgaagtggtggtatcacaagcaatagaactgaacgaagagcttcacaaggtccttgtacggcatgatgcgttgctttcagttcagccaactacaacagtagcttctactctcaaggaggaagaggaagaagatgccgaaagcctttaccggaggcttcgaaagggaaaagcattatcggaagattatacagatgactccataccatcatttcgatctatacctgaagacaagatgcgccgcccactcaccattgagccatccaacactgataagaaactgggggcactgaatattcgctcgccatatcctgaagcgaggcctgacgtgctgattccaccaccgcctgccaagcacgccgagagggagaggttctttcgggagaagagcatggatgccaacttgctgggccatcttaggggcttatcattgcacagccgggacggcagtagctcgtgtagcggcagcacagattatggagactgaggtgtaggtatatgcggtacataaaggattattttttgttcttcaggatgatattctgcttgcccggcaattgatgttgagagaggcagcctcagcctcatcgtcgtcatcttctcgctgaccattgtacacttggttttctaattcttttataattcttcccccttccgcttacctgacattatcggaaagttgaacaatgctgtgttgtgagctttcagttctatagagatgcttgtgtggcaagctgtgtgagtgaccatctgcattggttttactctactttcatctccttttggctttctgatgtgtagtagtggagtagtgctgtgggttttgcttgtgtcagaagcgtgccattcggcttttagccagcagataatggatcagttgagccccatgatcatggtggtgttgtgggtcactcttctcaatagcattgtaaaagattatgcccatgactatgagacacctttctggcaagaccaaagatccactagtatcctggagtaagtatctttgagacaatcttgaatggttaggctggcttgccaaagtatttgactctacctgctagtggagtagagatctggcagattactggtattattttatgttcaagtgggtatgcattctttggaaggcatacatttttttattttctagttacatggggtagcatataggagcaaagatttgtgttgaactgtttgtagaatttgtgtagcaagggaaatgaccaattggacaataggaaaacgatcatcaatc

SEQ ID NO: 9969 - DNA, 2160 bp, Oryza sativa
  ref <308>: DATABASE ACCESSION NUMBER: AK107317
  ref <309>: DATABASE ENTRY DATE: 2002-08-28
tggcatgcatgtttactgaggagaacaattaattacacctctctctctgagccggtgctttccaacctgcaacatgtcgagcatccagcagcgaaaggaggaaattctcgcgaagaaggccaagctcgctgagctcaagaagcagcgcgagttgcgacagagggagttcacaagccaccgccagagcttagatgccggagagctagcctctcctactccttcccgggcgaggaggaccgaagacctggacagcctgatctcatcccttgttgaccgacccacttcatcgtcgcctgctggaaagcaacgagttagtgacgagcagtcgcgcgagagagcaccaggaacaccgcctacgaaattataccaagatgcctcgaccgacacgcagactctttcgttcgccgagttgacgaccgtctacgaaatcccagtggagtcgaagcccgaatacatcacatacagcaaaggcgttcaaactacagagccatggcaacccgcgcaggactcaagtgaggatacggaggagggcgaaggtgcctcgaagagtccttcgaggagacgacgtaagctgagccagcgggagatcgagatcgaagaggaacagatccgacaacggctgcgtcaggagattgaggaggagatcagagcattgcaattggacgagaagaacgagtcggaaaaggcacggtttccagcgagagcactcgaggcagacgagctccaggccgtcactggcagcaacgaattcctggacttcgtagagcgcagcagcaaggtcattgaacgagcgttggacgaggaatacgatgttttggccgactacgctttgcaaagcagagatgctgaggacgatgatgagtatgtcggcaggaaaggccgcagaataaaagaagtcatgcagttcgatctgacggaaaccatggggaggaaacgaatggtcagcgacatcgacttcagcccaaagttccctgagcttctatgcacaacatacaccaaatctcagcaagcacctcacacgcctccaggccttctgaacgtctggaacatgcacctcaagggtcgccccgaatacagcctccacgccacatccgatctgctgtcttgtctcttccatccgtaccacccttcgcttattcttggtggaacctacagtggccaactctgtctctgggatacccgcgctcgcaaccagcgtaccggcgagcccgtgcagaagacgccgctcatgggcggtagaagcggccacgctcacccgatctactcactcgctgtagtcggcacgcagaacgccagctccgtcgtatctgttagcactgacggtgtcgtctgcgcatggtcaacagacatgctcacattgcctcaagaatacctcgagcttcactcacccaaccccgcagcttataagaccgacgatgttgcgcctatctgcatgtcgttccctgcttcagacccaacatacttcctcgccggaactgagcagggcaacatcctacctgtccaccgttacgatcgtgcaggcgccaaagctggtgtcgacacacgatacacataccgcggccacgaggcaccagttacttccatcgacttccacccagcccgcggtaaagtcgatctcggcgacctcttcctttcgtgcggtctcgattggaccatcaagctctggcgagccaagccaccatcaacaaccgcaggttcgctctcgggcgccgcaaccacaatcgctccccttttatccatcgctcgtgaagactcaatctacagcgccaaatggtcgcctacgaagcctggtgtcttcggctgtgtcgacggcgctggtaagctcgacatcttcgacattaccgccagcagcgatattcctgttgccactgcacgtccgagtcacatcgagaaggacgcgtacgcgctgcgcagtctcaacaagctcgcatgggagaagaaccagggcaagcatgtggctgtaggtggtctcgatggcattaccacagtgttcgaggttggcaatgagctaggtggtgtagagacgaagagcgagaagtgggctggcgtgaggaagtgggtaggtaggcagagcaaggcgagtgaggcagcttagggaatatgaagggttaagtctgttgatgtgtgtaagggcaatggtgatgttgattgatcccctcg

SEQ ID NO: 9970 - DNA, 2605 bp, Oryza sativa
  ref <308>: DATABASE ACCESSION NUMBER: AK107318
  ref <309>: DATABASE ENTRY DATE: 2002-08-28
acacacatctacctttatttcctgtgcttcaatctcttgcttgcacttaatactcacaccctcccatcttgcattctcgcctcccacgaccgactgactctcgttgggcactctccacaacagcaaaagcacatacccctcctctccaacgctcgctcgctcttcacgccctccaagcacccagaccgcttcgccggctgccctccaacctttccgcccgcctgccttcctcttcctcccacccacatacacatcacacaccctcacagcaaccatgtgcggaatcttcggatacatcaactacctcgtcgagaaggacaggaagttcatcctcgacaccctcgtcaacggtctctcccgcctcgaataccgcggctacgactccgccggtgtcgccgtcgatggcgacaagaagaacgaggtctttgcctacaaggaggtcggcaaggtcgccaaactgaagcagctcatcgaggaggagaagcccgacctcacaaaggtcttcgacaaccacgccggcattgcacacaccagatgggccacccacggccctcccagcagggtcaactgccaccctcaccgctccgaccccaagtgggaattcgccatcgtccacaacggtatcatcaccaactacaaggaattgagggtgctcctggagtccaagggcatgcgcttcgagaccgagaccgacactgaggccattgccaagctggccaagtttgtcttcgaccagcaccctaaccttgacttcaccagcttggtcaaggccgtcgtcaaggagttggagggcgctttcggtcttctcatgaagagcgtgcacttccccggcgaggtcgtcgctgcccgcaagggttctcctctcgtcatcggtgtcaagaccgccaagaagatgaaggtcgactttgtcgacgtcgagtacgctgaggatggccaggccctccccgctgaggccgccagccacaacgtcgccctgaagaggggcaacgaccttctttccgtccccggcctctccgccgacaagtccctcctccaccgctcgcagtctcgtgccttcttgtccgacgatggcatgccccagcccaccgagttcttcctctcctccgacccctcggccatcatcgagcacaccaagaaggtcctctacctcgaggacgatgacattgcccacatccacgagggtcagctcaacatccaccgtctgtccaagaccgacggcaccagcaacgtccgtgccatccagaccatcgagattgagctccaggagatcatgaagggccgcttcgaccacttcatgcagaaggagatcttcgagcagcccgagtcgatcgtcaacgctatgcgtggtcgcttgaacgcagaggagaagaccgtgaccctcggtggtctcaggcagtacatcagcaccatcaggcgttgcagacgtctgattttcatcgcttgcggtacttcttaccactcttgcatggctgttcgtggtgctttcgaggatctgactgaaatccccatctccgtcgagctggcttccgacttcctcgaccgtcaggctcccgtcttccgtgacgacacctgcgtcttcgtctcccagtccggtgagactgccgactccctcatggctctccgctactgcttggagcgtggtgccctgactgtcggtatcgtcaacgtcgtcggttccagcatctctctcatgacccactgcggtgtccacatcaacgccggtcccgagatcggtgtcgcctccaccaaggcttacacttctcagtttgtctgcatgatcatgttcgctcttactctgtcggaggaccgtgcaagcaagactcagaagcgtctggagatcatggagggcctttccaagatctccgagcagttcagggagatcctcaagctcgaccagagcatcaaggagatgtgcctcaagttcaaggaccagaagtcacttcttctcctcggccgtggctctcagcacgccaccgctctcgagggcgccctcaagatcaaggagattagttacctccactgcgaggccgtcatgtccggtgagctgaagcacggtgtcctcgctctcgtcgacgagaacctgcccatcgtcatgattctcacccgtgactccatcttcgccaagtccctcaacgcctaccagcaggtcatcgcccgcaagggtcgccccatcgtcatctgcaaccaggatgacgaggagttccccggcgagaagaccgacaagatcgaggttcctcacactcacgagctcctccagggtctgctcaacgtcatccctctccagctcatggcctactggcttgccgttgctgagggcctcaacgtcgacttccccaggaacttggccaagtcggtcactgtcgagtaagctaaaagggctacaaaatagacgaaacgttttgcgaaaaaaatggctcagctggtactgcgctttgtcggggaattggtatttgagcgagacatgagacgattataagcgatgatgagggctgaaagggcgtgcggattttgctgcacttggagtatattggggtttacagcaaaacccacggcgttttcctgaggatgctttccagcctcctcccaccaaaaacatgagatacag

SEQ ID NO: 9971 - DNA, 1493 bp, Oryza sativa
  ref <308>: DATABASE ACCESSION NUMBER: AK107319
  ref <309>: DATABASE ENTRY DATE: 2002-08-28
aagtgacaaagggcacatctccagaaacacaaatcataaaaatgttccgcggagagaaattcgtgctcgatattgatgacgatggagatctccgccaatcagagcctgtggctgctgcgcctgcgccctcgccgttcacattcgtaggcgatgtcttggagaggaaatcctcggctcctacgccgcctagcgctcccacactgaagagcaagaccgggttccctgaacacagaaaaaggcctattcagagcagatttaagcaaagaaagcagcaagccgagacgtcagtcttgagcgatggaactactgtgtctgcgggcgcgcaaaaaccacgtcagaatgccacccaagatgaggatgcttcgcccaaaaactggcaggaccaggagaagatgcaaattgaccagcaaaatcgcgacgtgcttgctggcatgtccgaggccgagatcgcaaaagccagagctgagctgcttgggtcactggacgcggatctcatacagaagctgctggcgcgctcaaacatagacagcggtagcaacgaagtggacagtctccagcctccacctgaacccatcgagggcggcattctgcacagagagaaacctaccaagcaaaagtctgtcgctttcgcagatgacaaagcaccctctgcgccaaaacaacccaccgtacaggacgaagatcaagaaccaacaatagaagtcgactacgaacccgacttcccagacgcagacaagccatcaaccctcgaagaagtcgccgaaacctcccatgacacgatccacttcccaactcccgcccaaccaccctccctcgaccccaacagcgccaccttcctcacagacctgcacgaaaaatactttccctccctcccctcagaccccgacaagctcgagtggatgcgcacccgcaaagccgacaaagcagcctactcgcccgcatcctcttctctcaaccccaacgagatccgcttctctttcgacggcgagctcctcgcgccgaaaacctccgcgtccatccctgtgagcgaaggcttgcaccaccacggcaatgcgccagaagctgcaggctacacgatcccagaactagccatccttagccgcagcacgtatcctgcacagcgctgtgtggcgttccagacgctgggacgcatactgtataggctcggcaagggtgaattcggagatgcgggcgaagaaggcgccaataggcctggcgccgacgaaacttttggtgagctggcgagaggtttgtggagagaggtggagaaggagcatgtcatcgcacagctcgtggctgagagtgaaggcaacggcgtggatggcggcagacacatgagcgcgaaagcctatgcgactgaggcggtgtggctatggaggaaaggaggaggacgcaggtggaaggctgattagaagaacattcttctgttatctatctaaatgctgctcaatgatttcccacaatgcaattctagcacattgtgcaactcttct

SEQ ID NO: 9972 - DNA, 1677 bp, Oryza sativa
  ref <308>: DATABASE ACCESSION NUMBER: AK107320
  ref <309>: DATABASE ENTRY DATE: 2002-08-28
atacaacctttccattcctcagtgtcagccatggtcgacccaacccacggtctcttcaagctgccctctaaggaggagcgcagaatcacacgcaatggcgccccactcaaccccatcaagctcgccatgatgctcaccccgcttcagggcgccatgttcttctccggctggcttgcctggactgtcgacgcttgggacttcttcgccgtctctctctccgtgaccgccctcgagaagcagtttgacagacccgcacatgacgtcaccaccgccatcaccctcaccctcctcttccgctccgtcggcgccgccatctttggcatcctctccgaccgatacggccgcaaatacccgctcgtcatcaacctcttcatcatcgccgctctctcgcttggctctggcttcatccagacctacacacagttcctcgccgtccgttcaattttcgggctggggatgggtgggatctgggggatggcgacggcgacagcgttggagaacatgcctcccgagcccagaggtcttttctcgggcattctgcaacaaggttatgcggtgggataccttctggccgcatccgtcaacctgacttgggtgcacaggacgggcaactggcgcattctcttcttcctcggcgcaggtctctcggcattcgctgctctcgtccgtctcgtgcttccggagtcggagctcttcctcaggcagaaggcccagcgcgatgcatcgggcgccacgggtgagagcaaggcaaaggtgttcttgcgtgagctcaaggagatgctcaagacccactggctccgctgcatctacggcatcctgctcatgaccggcttcaacttcctctcgcactcgagccaggatctgtaccccaccattctccagcagtctaagctgctcacaagccagcaggcgtccagggcgaccatcatcagcaactgcggtgctatctcgggcggctttgtcgcaggctatctctcccagtacctcggtcgtaggcttacgatcatcctgttcgtcatcatcaccggtgcgctcatccccgcctggatccttccgcatagcttcggtgccctggcggccggtgccttcttccttcagtttggcgtgcagggcgcctggggtgtggttcccatttacctctccgagatcgcacctcctgcgttcagggctacctactcgggtctggcctatcaactcggcaacgccgcttcgtcggcttcgtctcagatcgaggctaccggtggtgacaacctcaaggagcgcaaccccaagtggttccctggcgcacctgcgacggtcaaagagttcatcccggcgtacgctcgcgtgtcggccatccttctcggcacggtctgcgcgtacctgatcatcgtcgttgtattcggctgggagttcaagggtgccgagtttgaaaaggcactcccggctaccatccccggtgcgggcgatcaggatgcggcagagctcggcgagaagcgcaacaccaccgacgcctacgacgaagacagcatcgagcacgtcggcgaccagcgcttccagcacacctcgtccaacgaagccatcgacgagaagaaggtctagcccttgtagtcccagctccggtgcttgaatgtacttgtattttcagttgtcttgctcgcaattgccccttgcgtgtctggaatgatttcttcgtgc

SEQ ID NO: 9973 - DNA, 1852 bp, Oryza sativa
  ref <308>: DATABASE ACCESSION NUMBER: AK107321
  ref <309>: DATABASE ENTRY DATE: 2002-08-28
aacagccattgacaatgaattcttaggtttcttgaatgagaaggattacaatggcgttgttgagaacaaccgtctcgccgatggtgctctcttctccatgcccatcaacctcgatgttagccaggccgagatcgaccagcttggtatcaagactggcgctcgcgtcactctccgcgatttccgtgacgaccgaaaccttgccatcctgaccgtcgaggatgtttaccgacctgacaaggtcaacgaggccaagaaggtctttggcagcgatgatgacactcaccccggtgttaagtacctcttcgacaccgccaaggagttttatgttggtggtaagctcgaggccattaaccgtcttgagcactacgacttcctcgacctccgattcactccctctgagctccgcgctcacttcaacaagctcggctggcaaaaggtcgttgctttccagacccgaaaccccatgcaccgtgctcaccgtgagttgacggtccgcgccgcccgctcccagcaggccaacgtcctcatccagcctgtcgtcggtctcaccaagcccggtgacatcgatcacttcacccgtgtccgcgtctacaaggctctcctgccccgttaccccaacggtatggccgcccttgctcttctgcccctcgccatgcgaatgggtggtcctcgtgaggctctctggcacgccatcatccgcaagaaccacggtgctacccacttcatcgttggtcgtgatcacgctggtcccggtaagaacaagcagggcaaggaccactacggtccttacgatgctcaggttctcgtccaggagcaccaggaggagcttggcatcaagatggtcgagttccaggccatgatctaccttcccgactccgacgagtacctacccatcaacgagattcccgagggcacccgcactctcaacatctctggtactgagctccgacaccgtctccgaaccggcaaggagatccccgagtggttctcttaccctgaggttgtcaaggttcttcgtgaggagaaccccctccccgcagagaagggtttcaccgtcttcatgaccggttaccagaacagcggaaaggaccagatcgcccgtgctctccaggccactctcaaccagggtggtggtcgtcccgtttccatgttgctcggtgagaacgtgcgacacgagctctctcctgagcttggtttcacccgcaaggaccgcgacctcaacatccagcgcatcgcgttcgtcgcctccgagttgaccaaggccggcgctgcagtcattgccgcccccattgctccctttgaggatgcccgcaaggctgcccgtgacctcgtcgagaagtccggtcccttcttccttgtccatgttgctactcccctcgagtactgtgagaagaccgaccgcaagggcgtctacgctgctgctcgcaacggcgagatcaagaacttcaccggtgtcgacgacccttacgaggctcctgccaagcccgacctcgttgtcgacctcgagaagcaaaacgtccgctccatcgtgcaccagattgtcctgctcctcgagagcaatggtcttctcgatcgcctgtaagcgatgatgatttcacgaattatctcggtggctagccgagggagatacccgcctacctgccgattcgagtaggaggtttgttgctctacaaaacctttgcaaataacagcgcaagtataaacggaattggcgttaatttgaatgagatggacatggaaaaagaagcgcgaatgtgctgcgttacattacgttgctggtatacctagacgaaaccgtgttggagtagatttagtaccgatacgatgaatgaagagcatgatcaaacgaggt

SEQ ID NO: 9974 - DNA, 1429 bp, Oryza sativa
  ref <308>: DATABASE ACCESSION NUMBER: AK107322
  ref <309>: DATABASE ENTRY DATE: 2002-08-28
aggtagcctttgtcccaaaagtatatcagtccatcagataccagcaccaatggccgacaccaaagcttcctctcgcgcagagtcattccgctccgtctcttcacagcccgccgccgcagagacgccagcgacctcgacacaaagcaccgtcgcaggcgtcgagcgcgatgagcagccgccgcaagaatggacagcgcccactgatgggcccttgaagacgcctgtgcccatgcctccctccgtctcaaagccccaaaagcccgctcctctgactcccgagcaagaggtcaagtatgccaccgtcctcgcacaagtctccagctgggagaccatcccagcgaccacggccaagaacgcccctcaagcacccatcaccgaccacgagcgcatgtggctgacccgcgagtgcctgttgcgctacctgcgcgccaccaagtgggtgaccgccaacgctctgcgtcgtctgcaatccaccctcagctggcgtagagagtacggcgccgacaccttcacatacgactacatctcgcccgagaacgagagcggcaagcaggtcattctcggttacgacaacgaggccaggccatgcctgttcctcagccccggcaagcagaacaccaagatgtccgaccgccaaatccaccacttgtgcttcatgctcgaccgcgtcatcgacatgacccctcccggccaagagacgaccgcgctcttgatcgacttcaagggcgctgcgaagggcgccgtgccctccgtcgaacaagcccgcgccgtcctcaacatcctgcaaaaccacaatcctgaacgtctcggccgcgcgttaatcacccagatgccgtggtacgtcagcatcttcttcaagctgatcagctccttcatcgaccctgtcaccaaggacaagatgaagttcaacgaagaccttcgcctgtggatcccgccgcaacagctctggaacgagttcaacggcgacttgaactttgtctacgaccactctgtgtactggaagggcctgcaagagcagacagacaagaggagggaggcatacaggcagcgctgggagaaggctggcaagcgcattggcgaatttgaagattacctcaagggcggtggcgcaaagagcttgagccagactcttgaagaggccggcggtgttgcgaacgaggagaaggccgctgcggaccccgatctcgtcgctgccgaagttggaaaactctcggtttgagtgagtgaacgataatcattgcaacatcgcgagcgcatacaatggatatagacacggtagcaccagctgtgcttccttttcctgggttgtacgaggatttgctttttgggacaagatggagatcgaatggcgagcattctgcatttgtgattttgacacgcggagattacatacatatcctgcatctagaggaatgcatttgtgagagcg

SEQ ID NO: 9975 - DNA, 2181 bp, Oryza sativa
  ref <308>: DATABASE ACCESSION NUMBER: AK107323
  ref <309>: DATABASE ENTRY DATE: 2002-08-28
ggcttcaccgttgtcattcagttattcacataaggatgtctgggataatatcagctcatccaatgttccatcctctggaacaactcataccatgccaaagccaagtactttgacatttaaaaccactgtcattccaaaaactaataccagtacactcccagatttgtcgcctttgatgacgggctcaaaattctctctgagtccattgaccgtgaaaactttatctggggattctggaggtgcgtcatccattattacaaagaacaaacaaggtggacaggcaatgccatatttgggaaccacaaaaggactggatgtttctccacagaatatgggtggtgcatttagagatcttaacaaaccgtctttgtctcctgaacctcccaagtctgctctgttacaagggaagactgtgcaacttggtaagattactgaaacagtgcagagcccagtgaaagctaaacctgaggtggcattccaacctcctgcatttccaccaacacctgttgcacaatcttctccatgctctattaagccaactgttccctcttcagctacatcatcctcgtcaactatgcaagaatcagctgcaaaaacatcagatgttttgtctccaacaggtccttccattcttccatcaaaggaatcaatgacaaaaccttcatcaccattacctgatggtaccatatctagttccctactatctattccaatgcctgttaaggagtcatcaactggcttgaataaaattgtatctaagcctgaagtggttacatcagaggtaactggaacaaccgtttctgcaagtactagctcaagcgtaccaatcactgaaggcaaaccttcatcgattccagcaaccagtggaagcttaccttcaattcctgtctctgcacctaaagtggtgccagtgtctgcagaatctgttgttgtcacttccaccggaaaagatgtaggaccgagcaatccctcatcagatgaagatgatatggaagaggaagttccttctgcaagttcggatctcaacttgggagcccttggtgggtttggtcttgggtctgtgccttcttcaagtcccccaaaatccaatccctttgggaactcatttactacctctgacaataagagttcaggttcgtcatttaccctgacaaccagtccaggacagcttttccgtccggcgtcactgagtattccctcatctcagccagcacagtcatctcaatcaactagctcaagtacattttctagtgcattctcaagtgggcttagtggattcggacagtctgcacagattggatcagcgcagcagtcagggtttgggcagccttcacaaattggagctgggcagcaggcaggatttggtcagccagcacaaattcagtcaggatttggccaaccagcacaagttggagttgcgcaacagtcaggatttgggcagcctgcacaaattgggacagcacagcagtcaggatttgggcagcctgcacaatttggtgctcagcaagcacttggatctgtcctgggttcttttggacaatcacgccaattgggaagtttcggtgctgggggatttggtggatttgctagtgcctctgcttccgggggcttttctagcaattctggatttgctggtggtgcaacaggcggtggcttttctgcagctgctgctcctgctggcggaggatttgctgctgctgctactggtggagggtttgctgctcttgcctccaaaggtgggggttttgcggctgcggcttcatctggtggcggctttggaggtgcagcccagggaagtggcttcagcagtggtggatttggagcttttggtggtaatcaagggtctggcttctcggcatttgctgggagtggctctgctggatctggaggacccccagcgaatcttttgacacagatgagaaaataacagagttgtttccaggtatcctagttcttcattcctttcggctgcagtggcccttatgcatgcaccaaaaattgttcttcgtgcattagctgtagctattgtggaactcccagcacctggtaagttcaacctcgatatttgtacatcgaacacagtggctaatatggaactgactgacgaacatttttggaccccctatttctttcaacaagagatagatgagcagtgcgcatgcatgatcagaattctaagtt

SEQ ID NO: 9976 - DNA, 1512 bp, Oryza sativa
  ref <308>: DATABASE ACCESSION NUMBER: AK107324
  ref <309>: DATABASE ENTRY DATE: 2002-08-28
tagccgccgtcgtagatggcctggctggctccggcgcccatccccatggcggcagcctgctttagggcggcgtgctgactcatcagggccgggttcgctgccatcttgctcagcgccagggtgcgctcgtaggctaggaggtcggtcgccgacatgccaggattgaatggtgctggtgctggagggggtaggggcgcggatgctgtccctggtggagttggcttgcttccccaggaacacttgatctgcctaccgccaataagttgtccattaccagtctgaattgctagagcagcttcttcatgggtgctgtaacgcacaaagccaaaacctttatcacgcgttacacgcacctcctcaattgaaccaaccccaagtgaatggaaaaatctgtgcacatcattgctgttgacatcatgaggaagattgccaacataaacagtcgtgtactgtgggttgttttcaggaccatcttcatttgcattatcctttccaccttctgatgaaccatttgtcaactctatcataccctaggagtctgtattttgtttctcttcaccagcattagcaccctttgttgcccaattgcaacgaacttgacggttgccgagccacttcccattcagttcatttatggcattttgtgcgtcctgctgatttctgaaagaaacaaaaccaaaacctctggatcgtccagttttctgatcccacattaccctagcatctgagcaactggtaaatccagcgaaaaaagcaaacaaagcagcatctgttacttccgggcaaagatcgccaacaaaaatattaaaatggcctgatgtatcctctctttgagtacttgcatatgcccaattgacttttattggctggccaaacaattgtctaccgttgagtgatacaattgcaattgcagcagatctacggtcataatagtcaacaaaaccaaaggatgacttttccttcctgatgagcttgcatccttctactggaccaatactttggaagacctcatgtagcagtgaatccgtcacttgaagatggatattgccaacatacacactccggcatgtacttgaatcaaatccaggaggcaggttgccactaacaatgggctctatctgcggcgccgcgaggaggcccgggtgcgggtggtgcggggggaacaagggcgcctgctgctgctgcgccgccgccgccaccgccgcagcctgctgctgctgcatgagcagcgcctgctgcatcatctgctgctgctgcgccgccgccgccgcctgcttcatccgctgctgatgctgcatgtcgatcaatcaaccaatcactcaatcgatcgatcgcggtcgatcgatcccccacctcctcctccgcctccgctctcgtgtcagggatcagattattattagggtttggcctcagggggaggaaggaatcaagaatccaactcccccgaaaccgaaaaaaaaaaagaaacgagaaacaaaaaaggagaagaagaaaaaaagaaaaaagaagaag

SEQ ID NO: 9977 - DNA, 1434 bp, Oryza sativa
  ref <308>: DATABASE ACCESSION NUMBER: AK107325
  ref <309>: DATABASE ENTRY DATE: 2002-08-28
gttctcatcgctgacgcctttcgcctcgacctttgatttcatcccgcgccgcgctttcgctctcgacgccatgtccatcgttcgtccccgtggctcggctcgaccagccaagatcaaggtcgccaaccccgtcgtcgagctcgacggcgatgagatgacccgcatcatctggcagaagatccgcgaggacctcatcctccccttcctcgacatcgacctcaagtactacgaccttggcatcgagcaccgcgacgccaccgacgaccaggtcaccgtcgacgccgcagaggccatcaagaagtacagggtcggcgtcaagtgcgccaccatcacccccgatgaggcccgtgtcaaggagttcggcctcaagaagatgtggctcagccccaacggcaccatccgcaacatcctcggcggcaccgtcttccgcgcccccatcgtcctcgacgacctcccgcgccccgttcctggctggaccaagcccatcatcatcggccgtcacgctttcggcgaccagtaccgatgccagaactttgccgtcgacaagcccggcaagttcaccatgcagttcacccccgaggacggctccgcgccccagacctgggacatcttcaacttccccgacgcaggaggcgtcggcctcgccatgtacaacaccaccgagtccatcaccggcttcgcacacgcctgcttcaagatggccctcgagaagaaggtgccactttacctctccaccaagaacaccatcctcaaggcatacgacggccgcttcaaggacatcttcgagaacctttacgagactgtctacaagaaggacttcgaagcgcaaggcacgtggttcaatcataggctcatcgatgatctcgtcgcccaagctatcaagtcggatggaggctttgtctgggcatgcaagaactacgatggtgacgtccagtcggacatcgtcgctcagggttacggctcgctcggcatgatgacctcggagctcatcacccccgacggccagatcatcgagtccgaggctgcgcacggcactgtcacccgccactaccgcgagcaccagaagggcaacgagacctcgaccaactcggtcgcctccatctatgcctggacccgcggtctcgccttccgcggcaagctcgacaagaacgacgagctcgtctactttgccaacgccctcgaggaggcatgcctcgacgccatcagcgccggcaagatgaccaaggatcttgcgctgatctaccacggcaagcagatgaagcgtgaacactatgtcaccaccatggagtacattgacgaggtggccaagatcctcaagcacaagctctcggccaagggcatcgaggccggcaagctctaagccggcgccactcttctctcgtgtgcgagaggcacactgaaacaaaattggaatgcaacgcgatttccgcccgc

SEQ ID NO: 9978 - DNA, 1615 bp, Oryza sativa
  ref <308>: DATABASE ACCESSION NUMBER: AK107326
  ref <309>: DATABASE ENTRY DATE: 2002-08-28
cattccgcaggcggagaaggaccagtacgtggaggacattatcgagctgctcgagctgcaggacctggcggaggccatcattggctaccctggtttcggtcttggcgtcggcgaccgcaagcgtgtcacgatcggtgtggagctggcggccaagccatcgatgctgctcttcctcgacgagcctacttcgggtctggacggtcagtcggcgttcacgatttgcaggctgttgcgcaagctggcggacaacggccagacgatcctgtgcacgatccaccagccctcggctctgctgttcgagacgtttgacaggctgctgctgctggaacgtggcggcaagacggtctactcgggaccgattggtcgcgacggcaagcatgtgatcgagtactttgcggcacgcggtgcgcagtgccctcccggcgtcaacccggcagagtacatgctcgacgcgatcggagcgggaagccagccgcgcgtgggcgactacgactgggcggactggtacctcgagtcggacatgcaccaggacaacctgcgcgagatcgaggcgatcaaccgcgaaggcgctgcgctgcccaagcccgagggtaggggcagcgagtatgctgcgccgtggtcgtaccagttcaaggtggtgctgcgcaggacgatgctgagcacgtggcgccagcctgcgtaccagtacacgcgattcttccagcacctcgccttcgctctgctcactggtctgctcttcttgcagctgggcaacaacgtagctgcgctgcagtaccgactgttcgtcatctttatgctggcgattattccggcgatcatcatggcgcagatcatgccgttctggatcatgtcgcgctccatctggatccgcgaggagacgagcaagacttttgccggcaccgtgtttgcggcgacgcagctcatctccgaggtgccgtatgcgctggtgtgcggtacggtgttctttgtgctgatctactacctggcgggcttcaacacggattcgggacgatctgcgtacttttggttcatgacgttcctgctggagctgttctcgatttcgattggcaccatggtggcgtcgttctccaagtcggcctactttgcgtcgctgtttgtgccgtttatcattctggtgctcaacctgacgtgcggtatcctgtcgcctccgcaggccatgtcgagcgggctgtacagcaagttcctgtacaacgtcaacccgatccgctttacgatctcgccgctcatcgccaacgagctgtacgggctttcgatccagtgcgctgccaacgagttcagccgcttctcgcctccgagtgggcagacgtgcgagcagtgggcgggcaactacatctccagaattggcgggtatctggccaacccctcggcgacgcaggactgcacgtactgcacctacgccaccggcgagcagttctacgctcctttcggtatcacgtgggaagagcgcggccgcgacctgggcatcttgatcgcgtttgtggcgttcaactgcgtcgcgacgattgtgttcaccaaggtgttcaagttcagcaaccgttgatccacacggctctcttgcatatatagattcgcaattccacccttcctttggacc

SEQ ID NO: 9979 - DNA, 1584 bp, Oryza sativa
  ref <308>: DATABASE ACCESSION NUMBER: AK107327
  ref <309>: DATABASE ENTRY DATE: 2002-08-28
attgtaacagctagtctgctttggcgcaaacttcaagatgtcggcactcgatctcaagaacattcaaggagatatcctcctcgatggcttgcccaagcgtgtagaattcttcttcttcttccagattaccgacggccatatcaaagacttttgccgaagcctcaagacccttgcaaacgatatctcacacgttgacaacactgcgcagatgcgccaggacatcggcgctggcaagagtactcgcaaagaaggtgaccttgtggagatggctggcgtcaacattgcgttctcctggaaaggcctacagaagatgtctactgtcctcgccaaagacattggcaaccctgccgatcgcgactatacagacggcatgaaggcacacgccatcggcgatacagccagcccaagcaccatcggagaccccatcaagccaggcaccaatgaaccagattgggaacagccattctcccagcccgacttgctgcatggcgtaattctggtaacaggcaacgacgacgctcaagtaaagcaaaagctggaaagcatcaagaagaccttccagttcggcacttcttctgccttcgtcaaagaactaaagacgatttctggcaaagtccgtccggcgccgttcaaagggcacgagcacttcggctacaacgatggcatctcgcagcctgctgtcgacggcattgacaaagcacccaagggccaggatacgatcgaacaaggcgtcatactatgcaatagaggctccaacgcaggccatcacccagattggatgaccgacggcagtttcatgtgcttccgcaaactagagcagaacgttccggcgtggaacaaattcttggttgatgcttccaatactctgggaacatggtccgatcaacttggtgcccgcttgataggacgatggaagtccggctgccctgttcagctgtcgccagagttcgacgacaagaacatcgccgcggacccctctcgagtcaacgacttcaattttgctcccgccgactcggacaatgccaacttcacgtgtcccatggcagctcacatccgcaaaacgaaccctcgcaatgacctcggacctcgcggtcccaacggtgtggtgaaccgcttccgcatcttgcgtcgcggaattccatatggcaacgagctcgacgctgatcctaacggaacccgcggcctacttttcgtctgctaccaaagcaccatcagcaacggcttcgcattcatccaaggtcagtgggccaacgagcggaatttcgtcaggccgggagtcggctttgatgccgtcttgggccagctgagcaagagcgaacaggtggacatcaccggcttgttcccgcaagatgcgaagagggcgatcaagctcaacgccgtatcgcctttcgtgattccgcgaggcggcgagtatttcttcacgccctcgatgggcgctctcaccgggatcctttcgagtgtgaaggagggtaagacggatttgtgatgattctgggagagttctttgacatgatggttttcatactcgcagaagcgctctctagcagtaacgacccaggaaatgaagaagtattgttgcgccag

SEQ ID NO: 9980 - DNA, 746 bp, Oryza sativa
  ref <308>: DATABASE ACCESSION NUMBER: AK107328
  ref <309>: DATABASE ENTRY DATE: 2002-08-28
atccctctcatacaaattcagactaaagattttctgcaaacaaaaagccatggcttccaacaaggtagtgttctcggcgttgctcctcatcatcgtctccgtgctcgccgcgacggcgaccatggcggaccaccacaaagaccaggtggtgtacagcctcggcgagcgttgtcagccaggaatgggctacccgatgtactcgctgccacgctgccgggcggtggtgaagcgccagtgcgtgggccacggcgcacccggcggcgccgtggacgagcaactccggcaggactgctgccggcagctcgccgcggtcgacgacagctggtgcaggtgctcggcgctcaaccacatggttggaggcatctacagggagctcggcgccaccgatgttgggcaccccatggccgaggtgttccccggctgccggagaggggacttggagcgcgcggcggcgagcctcccggcgttctgcaacgtggacatccccaatgggacaggtggtgtctgctactggctaggttatcctaggaccccgagaactggtcactaggctactaaagctagctgtgtgtatgactctgtggggttgctaaataactagtgctttcatttgtcaggaagcatatatacatatggtgaataaatgatgaacttcaatgttcttctgaatacatcttgccaattgggtagcaatatttcgttgttatttaatttcattttgtgaaaaaaaagaatttcatggtgct

SEQ ID NO: 9981 - DNA, 2214 bp, Oryza sativa
  ref <308>: DATABASE ACCESSION NUMBER: AK107329
  ref <309>: DATABASE ENTRY DATE: 2002-08-28
aacaccgccactccgtctcccctgctcccctctgccggcctgccgccgacgtacgccggggcgccgcggcttccttgcgccgccgaggtttggatcgcgccatcgactcactgcggctagccggggcagtcgccctcgccgtctggcccgcggaggcgtggccgccttccacgcgcggtcggagaggcaccactactcgagcggcgaggcaggcaaggcttcacgcgtcaaggctgccgccgtcgcggttcaccggccaacagcacgtcgtcctcgggcgcggctcgcctcctctcttcctgcgccccagccagccaggagggccagagtccggcgagcccgtcggtgcccgtgctgaagaaaaggttcgcccgtggggtgtttgtcgaaatgtcgctccgacagctgcttctccaagcgcggcgcttcgcgtctcggccgccgccgccgctctcgaatatgctcgttctctgccgaggcatttctgaccgcggacacaaagccttgccttcggcgccgcctcgccactccaccgggcaaatccagatgccgcaaactttccattgctcaaatgccaacccccttggcaatcgcttccaaattgacgtggtcgactccgacctctggcccgcatccttcgacctgtccatggaccatgcaccgaaaactgggtgccctgatgattttcaagaacatgaggatggagaaatgcatgactctgaagatgagatagatgacatgaggcaccgtaagaagctgttttacaagttggacaggggttccaaggagtttgaggagaacaatgtgtccttgcgccacaggcggaagagagaaaaaggcaatgtaaagaatccaaaggaatccaagaaggtggatcctgatgaatccgcttctgtgaagctcccaaagctgaaacgaagtatacagtgcgtgaggaggatgtggttgaggcaaagagggatcgggtgccaacatttaaccagatgacggatccttaccaccaccctttctgtctggacatacatgtcaccaaggggtccgttcgtgcttgctttgtgcaccgagtgagcagcagggttgtcacagtcgcgcactccatatcaaaggacatgaagtttgatgtcggttcaaggaaaggtatgaaggcgtgtgcagcggttggggcattgcttgcaaaacgtgcaatagaggatgatattcacaatgcgatttatacaccaaggaaaggagataggattgaagggaagattgaggttgtgctgcgtgcaattattgataatggggttgaagttaaggtgaaactcaagcaaaggaagccaacaaagaatgcactggctatgcagcattctcaatctcactgatggctaaactattcatccgcatgactcctactagaaatgctcagaagtcatgagagtttctgttactacatggactggaagtctggaagagctggtgctgctggggcaccaccctctgtgtgcaaactttgggtcaacacttttttgtcataagaaggtagaaccagctctaccttatagccatttcatttgatataaatggacggttacaaaattacatgagtagaagaagagagggagagaaaaaaaaaaggaaaaggaaaaaggagagggagaaatagaatgtgcaaacgtttaaaactcaatactcaatagccagttagttctcagccatcagtaacttcaaatagaaggggcctaagtcttcaggtgggtgctctgaatggcaaaacactgtcctcagttgatcttttggttaggatttgtggaaccggagagagtaatagatggaacatcagctcaaactgggatgggcatccagtcacacttcgagttcatcagagatttgtggatcaagctcttctaccaggaacattatcctgcagcctgaagtcatatctcatacaaaagtagagaatttaagtacggtggttcagccaggttaacgaacgaagccggatatcacaagagccgcatacaggcaaggctttgttgcagcatacaaggacatgttggtgctcaagaatctgctgaagcaaataacaaccttgcaaagaggtgcaaacggtgctactgctactgaagcctgactatgactctttcgtggaagaaacaattctggaacaagaactttcgtgtgcatatttttgatattattattttccttcaattgaaatatctattttgccctttc

SEQ ID NO: 9982 - DNA, 1336 bp, Oryza sativa
  ref <308>: DATABASE ACCESSION NUMBER: AK107330
  ref <309>: DATABASE ENTRY DATE: 2002-08-28
atcctccacaagagaaactaggatcttcaagtatagctagcattgcgccctcatttcatccatggcaatgcagctgtccttgcctgtcttgccaacgggttttcgtttccatccaaccgatgaggaactagtcatcaactacctccagaggcgtgctaccgggctatcgtgccccatccccataatcgcggatgtcgaaatatacaacttcaacccgtgggagcttccatccatggctctatttggggaacatgagtggtacttttttacactacgcgaccacaggtaccccaatagtgtgcgccctagtcgctcagcggcgtcaggcttttggaaggccaccggcactgacaagcccgtccaagttgctaacatgcaaagcactcctgtagctatgaagaaggcacttgtattctatgttggccgcccgcccatggaaaccaagactacatggatcatgcatgagtaccgtctcacaaacacgggagggtccactgcctcccacccatccttgtcttcatccaccgcacacccttctgtgaagctagacgagtgggtgctatgcaagatcttcaacaagtccccagagccggacaacaccgcaccaccatcaaacgtcgtctcacggttacagtgctcgccgccgctgccgccgccggcggcaccgcccggcaactacccgccgctgccggtgggtgcgacgaacgacggcggcgtgttcgcctgcgccggcgacatgctcttcaccatccaagagcaccaggagggaacaccatcgatgctgccgccgatccctaaccttgagccaccggcggcaacaattgggaattcctctctcaatggcactgctgctgctgctgctgctgctgatggccatggccgccttgaggaagaggacaccagcgcctacaccttcaccgaccaggaaatggagcagatgctcatggacctgatggaccaggatttctttggcaatgatcaaccccaggagtgaactgtgtggtggagtgattttcatatcattccatagctctgatctgtgctggagagtgaatttagtatctattgtaccagatagaataaaaccagaaaagaaataaaagaaggccaaagaaaaaagcaaaaagaaaattgtataattactaggtttggatgccgtctgtagaaccttgtgtgctatgtaacttttttctttgtattttggcattttcatcatattgtgtcataaataaagcagggctttcttttgtagtttgccatctcaatcttgcaccgtgatgttataaaaaaacaaaattaattattgtgctacactgtacttttggctgtgttcggc

SEQ ID NO: 9983 - DNA, 1733 bp, Oryza sativa
  ref <308>: DATABASE ACCESSION NUMBER: AK107331
  ref <309>: DATABASE ENTRY DATE: 2002-08-28
gtgtttgcttgatgatttcatgaaatatgaggaggatgaggcgagaagtaaacattatttcagaaggtccaagttgagccataatgctccggattttgttcctgtcgctcaacgaagaaaagacgtcactgatgttcggcagccaaaatcaggcaacgtactgatagacagaacaccggtgatacagaatatgtcagtgaagccacagggtagtaatgcgatcaagcctcaggatcaatgcctacaagttgttgaaaaacaagccagcgatgacgggaaagagaacagacatcaagaggaccgcaatgtcaggcaggctaatgataaagtggtgaaaactgggactaagcagccacaggcatcaacagttaagacaagtgtggatagtaaacaacagtactggaagaaggttgagttccctgggcaaaatcctaacagtgctgttcatggctcatcgaaagcacatgaaaagcatctaaacgaatcaaaagcacctgaaaagcattcaaatggtgctaactgtagctcggcaactgtcagtttgaagacagccagagaggaaactatcgttgccagagtcagttctcttgctatcagttatcagaattcctcagttgatgtcgtgaagattggctcgatgccagttttggttaacaaagctaatgtgtaggtgtggttcctttttaagcttttccaatgtggtctgcttttcttttttgcatttagcagggtctgcttctggtattacttctcatcatcataggttgtctgtcttctgtttagtgttgctcgtcttaaatgtggcaacgaaaatgaaaagagaaaggaaagaaaaaaaacatcatagattctagtagttccctggtggagaaattttgttctttcttttgaaaggaaggaaaggatgaatacaagacgtactctctaaacatatgaagagaagaaagtgatttgggactgaatgggttccccagttttggcactcgatttgctttgtacgtgttcccagtaaaaggcttgcatgctttgctatggtttgctggtgtttgtgttgtgcggctgtgatccttgcctgttgctgttctatccccttttgtgttgctgttgcattcccctctgatttcggacgggctagctactgatttgtttgtttgctaaggctaagcacacaccacatgcatgcttccatctgtagcttttttcctcctgaagtctcaaatcagatgtgacctgtgagagcgaggttttagccttgatggtggacatggaaaagagagagttgaattggtacgtggtggtacagcgttttcatcctgtattgggtttgtcatctttccagatttcagggacacaacataagaagacgtcccgtccgtccgtccgtccgtcctgtgatgcaatgcagcacatcctttgcaagttgcaagctaataatgtacgctgctactccctgcttagtattaggcaatcgttgtcacttgggacgacggttgaaggaaaagctctaatttatacctgtcgcccgtcggggcggcacccacgcatccatcggttgaagttgaggccgcgaccgcgcaacctgcgctgcgatgggtcgtcacggacgtgtgtaggtgttgtgtggtgcacactgcacagtggtcaccgttttctttggtccgctcgcacttgatcttcccaaatcacaactccgttcactttattgaattataattactgcaaattatttgctc

SEQ ID NO: 9984 - DNA, 1329 bp, Oryza sativa
  ref <308>: DATABASE ACCESSION NUMBER: AK107332
  ref <309>: DATABASE ENTRY DATE: 2002-08-28
attccctattgtccacagcctctgatgaattcaacatccaaataccatcgcgactaccccttcttgccggccgcggcctccagctccgacggcgacggcgacggcgatggcttctacatcggcgagccaagaaacccagccgccggagctgactccaccgatgtcttcctgttcctcgccgttccggcagggtggctcgtcaggctggccgccttcgtcggcgagctcgtcgcctctgccatcctcggcctcgtctaccccgtcgccgctctcatcggctggctgcgcgccgtgccagcggccgtcgcttctctcctccggcgcgccgccactggcctgctcgccgcggcgtgcacgtttgcggtgctcgccgccgcgttcgtcgtgtccctcgtgctcggcttcgctctcgtccggcactgggtcgcggagccggtgaccgcgcgccatcctctgtatttcgactacaccgaggcgcagccgagcgccgccgtggcgcttggcggcggagcagcggcggcggtgccggccggccacgccgtgagggtgtccatggcgttgctgctgcctgattcctaccacaaccgccacatcggcgtgttccagattaaatcggaggcgatctccgcgagtgggatcaccattgcatcaaccacacagccatatctgatcaaatacaagagctctccagttcggctgatacaaaccgcgcttctctgcgtgccactcaccatgggcattcgcagtgagagccaggatgccaacctcaagctgcttcactacagggaaggccatggccggcacaagagaactgtgctcatcagagtgatgctgcagccaagagctatgactgtgcatttgcctcaagtgtaccaagcagagatcgttgtgcagacgacgcttccatggacgaaagagctggttcgcgcattgaaatggacattatgtgtgtgggtgtctctctgtgtctacgttttcatccttgttcttgccatgatctgttggagccggtcaccatcggcgttttcttcgagggacaggagattgtatgatcatcaggtcattgagaattctggtatggacatgggagattcaggtgagagatcagacaaggaattgtatggaggtgttggagttaagtggaagcagaggataagaaagaggaaagcacaacatggaactctacaaggagacaggatggagctgaagttcactgagggttcaacttctggtgtggcaatggatggagagtaggggttgtgctcaactttgtgtctgaattcaattaaatcgttcaaaagcagtttaatatgaagcttgtgttgattt

SEQ ID NO: 9985 - DNA, 1831 bp, Oryza sativa
  ref <308>: DATABASE ACCESSION NUMBER: AK107333
  ref <309>: DATABASE ENTRY DATE: 2002-08-28
tctgacgtgatcccaccaatcttccgaggccacgcttctctcttctccaccacacttgcaggataccttcaaccggacggtgtacggcaacttttccacggggagggcactgggttgtatggcttgctttggcatgatgcgacgggttgccatcatcggaggcgggccagcagggctgtcgatggcggatcaacttgcggccatcaacgcgcgtgcccccgctttttcggtgaccttgttcgagcgccgcacggggttcggaggggtatggacgtacgatgcggatccaggcaattgcgatgtgcgatttgaccgtcacggtcgggcacatgctttgtggggtggacgtaaagacggcgatgatgctgggcgattctgccccccggggccgatgtacgatggtctgcgcaccaacttgccgtgcgatattatgacctaccgttcccacccctacccgccacaaacaccgctgttcccatcccgccaaatggtggagaagtacattgtcgatttcgccaacacgctcgagcccatcgacactcggctcgctaccgccgtgcagtcggtccgccgtgtttcgcacgatccaactgcagcagccaaaagcattggtgcggggagcaagtgggcggttcgatccatcgataccaccaccggggtcgaaagggacgaagagttcgattgcgtggttttggcgagtggaaggtgcaataccccgagcataccgttcgtgaaagggctgtgggatttccaaggcaccgtgatgcactcggcatggtggcgatcacccgttcccttcgcagggcgtacagtgttggtggtgggcaactcgtcttccggctcagacatcgcgcgcgagctagcaggatacatcctccgaaccctccccgagggcgacactgcaactcgcgactacatcgcccggtgcgaccgcgatccaccacgcattctgcactcgtatgaaaaattcgacgctccaccgccactggactacgaccctcgcagcactgattctcccgactgggcgaaacgcatcaccgtcgtcccacggatcgaccatgttgaaaaaatgcagggcggggggagtaggatcgtgttcgagggtggagagacacgcgatgatgtcgacacgatcatctttggcaccggctacgcgtacgactttccctacctcgaccaggaagccgcaccattcgatacacacccgctcatccctcagcctccttcaacaccaccgcagcaggtgggaggggagatgtacgaaccgccatttcggacgagctccaagctgacgaatctcgacgactggagcctgttctacgctgcggacgcttcgatatgcgtgctgggcgcaccgatccgtatcgtacccatgccgctcacacatgttcaggcgcgtatagtcgccgctgcctggtccggccacatcgatccacacccccactcggcacttcccagtctagaccccagcatcccctcgaccgatccggagaggtggacgtcaagatcacccgcacccaagcagggtgcgcactcaaccaccgacttgggatatccctccgacacggcgtaccaaaacaccctactcgccctcctgccaaaaggcctcgcccatcaaggcgatgatgaggaaacccaggttcccgagacacgaagcaaccaacctgtgctggccaaaagcgagggctggtccaccatgcccacgttccgaaaccagcgtcgacaggataccaaacgcctccgtcgtctcctcctcggctactagacacccaaccacactcgtcgcgacaaagcgataataccaatgacaataatactagtgatacaggcg

SEQ ID NO: 9986 - DNA, 1290 bp, Oryza sativa
  ref <308>: DATABASE ACCESSION NUMBER: AK107334
  ref <309>: DATABASE ENTRY DATE: 2002-08-28
cacactccacgcctccgcccgctctcgtcgcagcgcaccccgtcgcgtgcgacgactccatccccgtcacaacaatgtcgtcccgccgagacgtcctcgctgttgtcctcgtggccgcgctgctcccgccggcgttgtcccgtgggctttggctggggcaccacgggctggggcacgggcacgggcgatggcgcgcgccgcatgtcggcggacacggccagggacaggggccgcagcagcacgcgccgctcggcggcggcgggtggtcgtcggcgcacgccacgttctacggcgggggtgacgcgtcgggcaccatgggaggggcgtgcgggtacgggaacctctacagccaggggtacgggacgaacacggcggcgctgagcacggcgctgttcaacaacggcctcagctgcggcgcgtgcttcgaggtgcgctgcgacgccggcggcggcgggagccactcgtgcctgcccggctcggtcgtcgtcacggccaccaacttctgcccgccgaacaacgcgctcccgtccgacgacggcggccggtgcaaccctccgcgcgcgcacttcgacatgtcccagcccgtcttccagcgcatcgctctcttcaaggccggcattgtccccgtctcctaccgccgggtggcttgccagaagaagggcgggatccggttcaccatcaacgggcactcctacttcaacctggtgctggtgaccaacgtgggcggcgccggcgacgtgcacgcggtggccgtgaagtcggagcgctcggcggcgtggcaggccctgtcgcgcaactggggccagaactggcagagcgccgcgctcctcgacggtcaggcgctctccttccgcgtcaccaccggcgacggccgctccgtcgtctccaacaacgccgtcccccgtggctggtccttcggccagaccttcagcggggcccagttcaactgattccgctcaattttactcgagcatcgtcgtggtagttgcagtagtactcccaactggaccgtgctgagaagtgccattgttttatgattggtactcagtctcgccttggttcttgggaaagtatttagtgggtagtttggcctagcatcaacatgggctttgtgctggtgtcactgctagtggtagtttgttacaagtaccattagttgagcttttgtggtatcttttggctagggattggaagtggtggtaaggctgtggcttgattgacagaggccgccttgtatcacccgccaaaatagcaaaattgggcctaatgggaatggccttctgctagtac

SEQ ID NO: 9987 - DNA, 2798 bp, Oryza sativa
  ref <308>: DATABASE ACCESSION NUMBER: AK107335
  ref <309>: DATABASE ENTRY DATE: 2002-08-28
acacgatgcaccactagactcgcatcgcatacatcccgacgtcgcgctccggtcgcaaattcactccctccgcggcgcacacacacacccagcttgctctgtcgcagccgcatcaccacctcgcatcacttcaccacttgacttgagcgctcgaatttggagcgagagcccggattcacctgcgtagcccattgcgcttcgaagcctcccatcgatacctcggttgcaccgcatagggatgctcggtccgtaaggcaaagccgatcgagttccacttacttcaccgtctctacggcacgtcggcgctgccaccaccgctttctccagcgtgacgccggccgtatagcgttcctttgctacgcagctctatcgtttttcggccgcatacagcgtcgaagcgtaggctcgcgccatgaccagcatcttcagcagctgggtcggctccaacaagctcgccgtcgatgtcgaacagccgccagccgatccatctcgcaaccgcgccctcagctccgcctccaatcccatgtctcccatcgatcgcgccacctccatgacgccaaaagctccctaccagttctcctcccagcccgactggggcatgtccgcccgcgaccatcaccgcgagacgtccgaagctacgctcaacggccaggccagcgacaatggagcctcagccgactcgcctgccgtggtgcccttctcccgcgaaccgtcgctcatccgtcccaccgccagcaggccccagtccatggccggcgcctcggatctgacccatgatcgcctcaccgccttcagttccacgctcggcggcgtcgacagcgaagctgcatggagcgccacccagcccgaatcggccaagaactcggcaccacgtcgtcgcaagaagatcgccccgcccgagcttctcgtcattgtcaagccaccgcccagcaagcaggccaatccgctcaacctccagatccagctcgtcatgccccagcagctccagcgtcgcgaaggctcccagcgcagatcgtccatggactcatccgccgcgcatcccgagctcacccccagctcctccaacgacctccgtcgcagagactcgatcacctcgacacgatccgcaggctccgagatctccgccgcgggctccgtagcttccaccagctccggaagacgcgtgacaccgctctacaacctcaacttccacaccatcctttcaaccaccgtcagcgacgccggaaccgaccagaaggtggccaagtacgtgcgcaagggcatcgacctcgacggtttcggcgtgctcgagcccgccgagctcgtcggcggcgtcaacgatctggcaacgctctaccgcaatgcggcggccgagcatggctcgtccaccgtgcacggtccgcttgcctcgtctgcgtctccgcgcaacgagaccgactcgtccgacagcatcgacgaggcgtcggccttctcggctcctacgcgcgacaatgccggcttggctgccggtgccgcaccgggagtcgaaccgcccacatcctaccaagccatgacgccagaggcgcgtggcgtcgaagcgaatctgggtggcaagcttctcggcaagtttaagcgcttctcgctcaacgtgcgccctgcgagctcttcaggtgcaacgagtgcattcgggcccgatagcgcagcgacgcaggatcgcgtcacgggcagcggatcttccaactcgcacaatatgtttggccgacagccgaatgatcccgcacgcgcgccaggccaccacgaaattccgcagttctcgcccggcgccggtgtcgtggaaggcaaacgcaccgagggatactattggacggtgcgaaagtggaaccgcagggtggcgcacgacggtggcgagcacggccaccttgtgagtcgcactggagcggcgcctcgggcagccgatgggcaaggcgccaatccggtcctggcgagtgtgtggaagcgcttcaacctggtcaaccgcatgggcggcagcgaggtgcatccgccagcgtcgcagatcccagttcggttcgagtggtcgcgcgactcgaggaagtcgcgcagccggcggcgcgccgaagtgatgcaggcacggctgcgcgccagcgtctcgctcaatgcgtcggtgacgagcatcgatcgtcacatgggtgagccggcgcgcaccaatggctcgctgcatccgaccgcgtccacctcggcacagtcgctcgctgtggatgatgccgcgccgaggctgagcagcggcgacgtgctgcgctccacctcgcggccgtcgtcgtttgtgtcgggcgcaggacaccgctcgccacgccgctcggtcgatacctcggccgcaggatcctcggccccgcacggcgacgattcgggcgacgagtcggatccagaggacagcgagacgccctggaactgccacttggtgctgggaccgaccacgcgcatcccgctcggcacgctctcgcctgcgccgcatcatcccaagctcgtcggccagcttgctgtgcccttcccgttgcccgacctgagcagtaccgggctgggccccgacggtgctggtctcacgcgcgaggagctcaaggacgtgatcattgtgacgtgcctccatctcattgtccgcgagagctttggcgggctcgcacgacgaaggagccacggaagctccgaggcgggcgcgggtgccaccgccgcctcgatggccaatgtcaacggttggaggctcgcgagtcttcccaagaagcagtagccgtcacaccctagctcgggcagccctataccatgatggaaatgtggaacgcaatggagtc

SEQ ID NO: 9988 - DNA, 1374 bp, Oryza sativa
  ref <308>: DATABASE ACCESSION NUMBER: AK107336
  ref <309>: DATABASE ENTRY DATE: 2002-08-28
cgttcgatgccgatgctagcgaggctcgcgactcgaagcgcgccaccaagaacgtgcctctggtcgtccgagccaagcagcaggtgtccaagtcgcaaccaggtccctccaagaagaaagaggacaagctggacaagcagatcgaagctctcgaacaaggcgcgatcccggccgaagtcaagaggtcgaagcacgcacgcaccgtccagaccaccgctggttccaactggttcgacatgcccgagttcggcgcctcttcctctcgtcttgccgctctcaagaagcagtcggccgccgacagtggccatgccaaggtcaccggtggcgatgcccgcctcgcctcggccgaacagctgcgccgcgaagtgcaggcgctgcgtctgcgcaacgccctcgatcccaagcgcttctaccgtgcctcggccaagaaccaagccatgcccaagtttgcccagctcggcaagatcatcgcctcgccgctcgagcccaaggcggtgctctcgcgcaaggagcaaggccgcaccgtcgtcgaagagctcatccgcgacgccgaagctgcctcgtatgccaagcgcaagttctccgagtcccaggcaagccaccgctccaactacaacggcagacgcaagcctccgtccaagaagaagcgcacctgagtgcggcatcagccgtcaacaacccaatagatacccgcagacatcagcgccaggaggacatcgatcggaccggcttcgaaatgtcacccgatctaccaacaggccgatctcgaagccgggcgcggagctacgctcagggactgccagcaggttccaacaaaatccggtcagacgcgctttggctggccaagtgccccttgactccctcgacgaaaattttttccagagagggaagagcagactcgattccggcagggcaccagtgactcgaaacactgctctgcttgcgccgaggaacgccagtgacgccgagcactcttcatccagttcgcacatttgcgatatggcggcttcgaatggtcatggcagcggccacggtcctgttcgcagcagacgcagagacctgcatacagcgctgtcgtatcggagaggacgggctgttgcggtgcgtcaagtggtgcgcatcgggcgtggctcagcagcggctgtggggcctgccatgtcgctagcagcagctcgcctgcacccatcagcgcctgacacaaggcgcagcccctctcgcctcaggcgcgtcgaggagggcagccgcaaagcagtccgccaatttcccccctcgagctcatctgcagatggctggctgggctcgccgagctcgccgcctcgcaacctggatttggccgaaaatcgcaggaaattccaacttttcgcctcggctgcc

SEQ ID NO: 9989 - DNA, 1611 bp, Oryza sativa
  ref <308>: DATABASE ACCESSION NUMBER: AK107337
  ref <309>: DATABASE ENTRY DATE: 2002-08-28
gacctcctcctcctcccatggcggcgcgccaccgccgccggtgaggccatcgcccgccgcctcaaccaccaccgagccccgcccttctccgatcccgacgacgacccgccgttcacgcggctcgcggagcgcccgcctcgagctccctcgaagaagaagaagaaggaggaggaggaccagggcggcaggatcaggccgccggagccggcgagctccgacctgccgttcgacttccggtactcctactcggagacggacccggcgtggaggcccatcgggttccgggagcccacccggttctcgccgttcgggcccggccggctcgaccggccatgggacggcgtcgccgcggcggcggcgcgcggggagggtgcgggtgcggcggcgacgagcagggaggaggttcttggcgagccgctggcggaggaggaggtggcgcagctcgtggagaggtaccggcacagcgactgctcccggcagatcaatttgggcaaaggcggagtgacacacaatatgattgatgacatccacaatcactggagacgtgcagaagctgttaggatcaaatgcctgggagtgccaactcttgacatggacaatatatgcttccatcttgaggataaaacaggtgggaaagtaatctaccgtaacataaacatccttatcctataccgtggtcggaattatgatccgaaacagcggcctcaaataccactaatgttgtggaagccacttgctcctatttaccctaggcttgtgcaaaatgttgctgatggtttgactttcgagaaaactaaagaattgaggaatacgggattaaattcttcacctcttatgaaattaactaggaatggtgtttatgtcaatgttgttgatagagtgagagaggccttcaagactgtggaagttgtgaggttagattgctctcatgttggtagcagtgattgcaagaaaatcggtgtgaagctaagggatttggttccatgtgttcccctattatttaaagacgaacagattattctctggagaggaaaggtgaaacaggagaactctgtttcacttcaattcagtcctgaaccatcatgatatcaagtggcttaaatacatgagttgctagaagaaccctgctgcttggattacttccatcagttccatgggatgtcatgtgatcagaacaaattgctgaaaacctattacggggttaccagaaacattagaaaccgcgccggttgattattacatttcctgcagctatctggaatttggagttgtctgaaagagttgccagtgttgcatgagatgaagaccctgctctatttgagtgctgagcattgaacagtacagacgcactttgaatcattttttcaccttggaatgagtactgtgcttccagccaagggattgatatcttccatcatctgtttctttgttcaaatggcacatgttcctgctgcttctgctatccgggcagatatcaaccatctagattaggacatagtatcaaaagttgagaggtacatcatgttgtaacactagtggtacagacaggccttttgaattagaaggcgatcattcagagcctcaaatgaggttgtgggctttgtggctgct

SEQ ID NO: 9990 - DNA, 2330 bp, Oryza sativa
  ref <308>: DATABASE ACCESSION NUMBER: AK107338
  ref <309>: DATABASE ENTRY DATE: 2002-08-28
tggcctggtcacaaaacaaacttcgtcatcatgtccagcgaggttcccgctacccccgtcgacgagaccgtctaccagggcgccatcggtatcgaccttggtaccacctactcgtgtgtcggctggtgggtcaacgagcgtgtcgagatcatcgccaacgaccagggtaaccgcaccaccccctcgtacgtcgctttcaccgagagcgagcgtctcatcggcgatgccgccaagaaccaggctgccatgaacccgcgccagaccgtcttcgacgccaagcgtctcatcggccgccgatacgacgaccccgacgtcaagaaggacatgcagcactggcccttcaccgtcatcgacaaggacggctcccccttcatcgaggtcaactacctcggcgagaccaagcagttctccccccaggagatctcctccatggtcctcaccaagatgaaggagatcgccgaggcaaagatcggcaaggaggtcaagaaggccgtcatcaccgtccccgcctacttcaacgactcgcagcgtctcgccaccaaggatgctggttccatcgctggtctcgatgtcctccgtatcatcaacgagcccaccgctgccgccatcgcctacggtctcgactccaagtcgtcgaccgagaagaacgtcctcatctacgatcttggtggaggtaccttcgatgtttcgctcctcaacatcaccggcggtgtcttcgccgtcaaggccaccgctggtgacacccaccttggtggtgaggacttcgacaacgccctccttgaccacttcaagaaggagtttgagcgcaagaacaagctcgacatctcgggcgacgcgcgtgccgtgcgccgtctccgctcggcctgcgagcgtgccaagcgcaccctctcgtcggtcacccagaccaccgtcgaggtcgactcgctcttccagggtgtcgacttccaggccaacatcacccgtgcccgcttcgaggagatcaacgccgccgccttcaagggcaccatcgagcccgtcgccaaggtgctcaaggactccaagatccccgccgacaaggtcgacgacatcgtcctcgtcggtggttccacccgtatccccaagatccagtcgctcatctccgagttcttcggtggccgccagctcaacaagtcgatcaaccccgacgaggctgtcgcctacggtgccgccgtccaggccgccgtgctcaccaaccagaccagcgacaagaccgccgacctgctcctgctcgacgttgctccgctttcgctcggtgttgccatgcagggtgacgtgttcggtgtcgtcgtgccccgcaacacccccatcccgtgcaacaagactcgtgtcttcaccaccgtcgaggacaaccagacccaggtcaccttccccgtttacgagggtgagcgcacccagtgcaaggacaaccgtctgctcggcgagttcgagctgaccggcatcccgccccagccccgtggccaggccgagctgctgaccaccttcgagatcgacgccaacggtctgctcaaggtctcggcccaggagaagatcaccggccgcaaggccaacatcaccatcaccaactcggtgggccgcctgagctccaacgagatcgagcagatgatcaaggacgccgagaccttctccaaggccgacaaggacttcaccgccaagcacgatgccaagaacgacctcgaggcgtacgtgcactcggtcgaggagaccatctcgagccccgctgccaacctcaagcgccctgccaagatccagatcgagcaggagctcaccaaggccctcgagctgctcgaggtgcaggacgcttcggccgacgagtaccgccgcgcctcgctccgcctcaagcgctccatgcagaaggccttcggtggtcgttaagcgctgcgcctgtcgcgtttgagaccacggctgcgtgagagggcggaacggtcgagcgagggttggcggtcggcttctgatctgcgaaccttgctctgtctggttggatcgtgatctgctctctgatcatcggttcagctcgttttctcttacgtcaagctctcccccgctgctttgctgtgcttgggctgttttccacttgtgcttgtaacgagcgggatggctcgagcgtgtgtggagtgttgcggggcaaaaggaactcgaggatcgctcaggccgagctcgtcttgttgcgtctgtctcggctggggttgatgcagccctggacgggacaagggcacgagcctgaggatctgtgcccccaaagattccccttcctcctcccccattcgactaatgtacgcatattccacttttccctgcatcttctcgttccgctt

SEQ ID NO: 9991 - DNA, 1750 bp, Oryza sativa
  ref <308>: DATABASE ACCESSION NUMBER: AK107339
  ref <309>: DATABASE ENTRY DATE: 2002-08-28
atacttctttcatgatattcattttgtttcaatactaaaaactttcatgctcttaaatttgctacaaacttagtattctttctgaagaattgatcaagaagctcgcggggcggcgaaacttacagcgagccggtgagcacggcgaagatgacattcatgacctgagctccggtgtatcccttctccagaatcagcttggcaccgtaccaaatccccaatgagtagccacagaagaggagcaccatcaccgtgcccatgcccacgccggcggcgagcccctccctgacgccggagctgtacactctcttcagtgacctactgtacttcgccaccgcctgcttctcgccggtgaacgacgcaacctgtgttgagccgggtgttcagggccatggcggcgcggagaaatggatggtagctgaggtgttcgacggaatgtttttactgttctgatggagccgatggtctgctcgacgacgacggaggcgtcggcgtaggcggcctggccgagcgacgccatcctggcgacgacattggacatgacggcgccggagaggacgagcggcgggatggtggcgagcatgacgagggtgaggagccacccctgcgcgaacgccacgccgaagccgcccaggaacgtgacgaggagctggacgaacttgcccaccttctcccccatggcgtcctggatcagcaccgtgtcgccggacatcctgcccaccacctcgccggtgttggtgtgcttgtcgaagaaggcgacctcctgccggagtatcgtcctcaggtacagactccgtatccgcgccgcctgccgctcgccggtgatcatccagcacgccacctctgatgaagaacacgatcgatcacggtgagcttgtcgctgcgagcgagattgcgagtcaagtggtggcgcggcgcggcgcacttacggatgaacgacgcggcggccgaggcgacggcgaggtagatgaactggagcgacacctcggagacgcgcgccacgacgtcgccgcccgcggcgccgccgaaggcgtcgatgaggccgccgaacagcacggtcatgaacggcagcgcggcgccgttcgccaccgcgcccagcgtcccgagcagcatcagcgccgcgtccgtgccgtccgcgaacgcgaacagccggtggaacgccacgctccccccgccaccattcttccccgtcgttccagccaccgcctcgccgccgccgccgccgccggacgacgacgacgacgcattcactccgaacgccctgctcgactccggcatgctctgcaaacccaagattcgcaacaccaaactacaatccaccatccattgcaaagaactcagaaaagcacaagcaaaccacgattcttgatcgatctccaccaccaatgcctctcaaagaaagcaccaatcaatcaaagaacaacgaggtggatcaatcaagagatgagctaaagacgaaggagagatggggattgcgatttgcgaggagaatctaaagagaaaggtgcagagttaaaaagcaaagcacactggcacctttgctcagctacccgacactgtccgaatttcttgcttgcttaatatcataataatataattggagaaatacaaaagtttgatctaaataaatagataaataaaggtggggaaaattccgggacatttcacatggtttttcatcctctgccatcacatttctctggttgcttgccgtctgctgctgtacaggtttatgaaagctttttagtatttt

SEQ ID NO: 9992 - DNA, 1630 bp, Oryza sativa
  ref <308>: DATABASE ACCESSION NUMBER: AK107340
  ref <309>: DATABASE ENTRY DATE: 2002-08-28
atgaatagaggagaattccagagctccctggtgcagcagatgatctggagcggcagtagtacaggcacggctaccggcgtcggcagcggcggcggcgccggcagtttgatgggcagcttgaagccatgccatgaggatcaagaggcctctcctaacatgccctccttgtcttctccatcgttgatcttctcgcagcagtttcagcacagctctccaggtctagttccgatgaacggcaccgccggcgccgccgcttctcttccgagcttgcacgacggcggcggcggcggccatgagagcagcatgccggagtcatggagccaactgcttcttgggggattagctggagatcaggagaggtacagcgtcactgcggctctcctgtcaaagggattagagaattggggagatcacgctgctgcagctgcagccagtgcatgcatggttggtggcatgaaggaggagggctccatggctcaagctgcagccactgctgctgctgctgcttacagcttctatgggagccaccttgctggtgatcatcagcatgagatccaagcagcagcagcaggaggaggtgctagcaacaagtctcagctgagccagatgctcatggcttcctctcctaggtcatgcatcaccaccagcctcggcagcaacatgctcgacttctccaacaccgcggcgccgccggagctccggagccaccaccacaactccgataattcatcagagtgtaacagcacagcgactggttcggccctcaagaaggctagggttcaggcctcctcttcagcacaatctactctaaaggtgaggaaggagaggctaggggatagaataactgcacttcatcagattgtatccccatttggcaagactgacacagcgtctgtactgcaagagaccattggctatatcagattcctcctgagtcaaattgaggctctgagctacccttacatgggcgacgccaacgggaccggtcctatgcaaaatggaccagttggagaaaggaaccctggcctcttcccggaataccctggccagttgctaaaccatcaaggtgacactcagcttggctgcaaaacgatttgcaaattcgttgtccctctgtaaggaaacatttttctcgccagagatggatgatgacctggtccaaaggtaccaagggctaatgaaggacagctcaaagttaccactatttgacctaaggaagctcaatgcatcattgcctgtagcttctgtgccaaataatacagtaaacatcctcgttgtgggcgccagcagtgacttcattgttgatgctgaagggctttcagaaactgcaagattttataatgcgcaaccagtctgcatcgaagggatagcccatgatatgatgcttgattgctcgtgggataaaggagctgggattatcttgtcatggctggagaaacttacaccaagataaatcttttgtattttttaagacctgtttctacattttgtagcccttgttcattttcaaatgtagaatctttggttgataggcagtttagttagtgctcttcagttttttttgtattattatttgattgaataaatttaagcatgcttagtgaacaatactgcatgaattgctagactg

SEQ ID NO: 9993 - DNA, 1398 bp, Oryza sativa
  ref <308>: DATABASE ACCESSION NUMBER: AK107341
  ref <309>: DATABASE ENTRY DATE: 2002-08-28
acacacatactcttctacactgttttggtatttgcacgatggctggacgacctgagcttcctgcgtggaccccacccgtgcctacgcgcgagacggatctcgaatgggccccgctcaccacgctcgacctttcacagatcagtggggacgacttcacctcggtccccgagtcggtggtgcgcgaggtgggcgaggctttctcgcgcgatggattcatctatgccgagaaccacggcctgtcgtgggagcacgtgctgcgtcagttcgccattggccagtacgcgttcaacggcgtctcggaggcagacaaggccaagtacaaggccgacatcctctccaccggctcgtttgtcggatacaaggagcagggacactggaagctcaacggcgtcaaggatcgaatcgagcagctcaactttggatcgcagagttttgctgccgacaagcgcgagcagctcttcccaccgtcgatccagcatctgctgccggagatcgaggagtttgcacgattcaaccacgcagtgatcctgcgcaagatcctgagcgtgctgtcgctcgtgctcaagctgcccgcgaaccatctgtgggagctgagcaaggagcccgaaaagcgcggtctggatctgctgcggtatgccatgtaccacactcctgaccagcaggatgacgacaagctcggtggcgtcagactccagggtcacaccgatttcaactcggtctcgattctgtggagtcagccgattacgtcgctcgaggtgttgatgcctgataacaagtggcgcctggtcaagcaccgcgacaatgcgctcgtgatcaacctgggcgatgcaatgcactttatctcgggcgggtatctcaagcagaccatccaccgcgtcgttgccccacccgccgaccaggcccactacacgcgtctcggcatcttttactttgcccttttcaacgacgatgtcgcgctcgaacccatcgaggagtcgagcgtcgtcagggagacgtatgccgcaaggaagcacaaggagggcggattctgggacgccgccaaggccaagggcgaaaaggtgcccaccgcaggcgactgggagaggctcagggtcaaggcgtacggccagcaacaggcaaagaaggcccaggacggccatgacgtcgaggagatcgccggccaaaaggtgctcggttacaacggcgaaagagtcaagtccaagttcaccgctcaaaccagtgccgttcgcgccaactaggcttcaaccctatacccccttgccccttgtcccaatcgacgcatttaacatgccaacctttccccgtctttcgatcgtaatcgctctgttctctcgccacctttgtacttctagtttcaacacttgtcccgacgttcttgcatccaactgcattgttgct

SEQ ID NO: 9994 - DNA, 1435 bp, Oryza sativa
  ref <308>: DATABASE ACCESSION NUMBER: AK107342
  ref <309>: DATABASE ENTRY DATE: 2002-08-28
aattaaaaagaaaccctcaaaatcccctcgccgttgcctccctcctctcctcccgctggcgacgggatacaccgtggtcacctctcgccgaccaccatccaccgccgcgcgccatgaccgcctcctcgctcgccgccgccgcctccgacggggcctcctcaagctcagggtccgcctccgccatcgtcgccggcacggtgaacggccaccacgtgctcaagatcgtcgggtactccttcaccaaggccgtccccagtggcaagagcatcaggtctcggccgttccgcgcaggaggccacacctggcacgtgctgtactaccccaatgggaatcgagccgagaaagccgatttcgtggccttctacctctgcctcgatgacgccgaggcctgcagcgaggccgtggaggcgaaggccatcttcagtttactcgacatggaggggaatccggtatcgtcctacagattcaccaccagggtggtcaacttcatggagcataagaaggatttccacacggaggaggagacgccgctcatcgtggcgccgccgtcagacatgcgccggcaattcggtgatcttctgctgagcaaacaaggcgcggatgtcaagttccaggtgggcaagaagaagttcgacgcgcaccgatcggtgctcgcggcgcgctctccggtcttcaaggcgcagctctatggcaggatgagggagagtaccaccagaggtgccataagaatcgatgacatggaggaagaagtgttcagggctatgctaacctttgtttacacggacgatttgcctgagatgaagcagcaagacgaagctgcaatggctcagcatttgcttgtagcggctgacaggtacaatctggagaggatgaagctgatttgtgaacataatttgtctaagcacattgacacggactccgtggtgaacattttggtactagctgagcagcacagctgccacatgcttaaggaagcatgcttgaagttcctcaggtcgtcaagatctctgaaggccgtcatggaaactaatgggtttgggcacttaatcagtagctgcccaggtcttattaaggatataatgtccaagctttctccttgttaacttgggagaatcaaatcaagggcatatatagggatgagtcttcagtcatggcaattgcatttgtctataagttaaacttagtgccccgctattatcaaatttaatagcactagatatatttaatcttatacttcggtcgatgcaatgtattagtacacttacaaattataggcatttaagttcactggaatgtctgtcgagcttcttcactgttcacagaattcctcttagaatggaaaaccttattcagctgttctgtttgtacgtatctcttccatgtggagattctgagcgcttagcaggttcagataaatcttgtctttgaatgctgg

SEQ ID NO: 9995 - DNA, 1650 bp, Oryza sativa
  ref <308>: DATABASE ACCESSION NUMBER: AK107343
  ref <309>: DATABASE ENTRY DATE: 2002-08-28
acatcaattagcttaagtttccataagcaagtacaaatagctatggcgagttccgttttctctcggttttctatatacttttgtgttcttctattatgccatggttctatggcccagctatttaatcccagcacaaacccatggcatagtcctcggcaaggaagttttagggagtgtagatttgatagactacaagcatttgaaccacttcggaaagtgaggtcggaagctggggtgactgagtacttcgatgagaagaatgaattattccagtgcacgggtacttttgtgatccgacgtgtcattcagcctcaaggccttttggtacctcgatacacaaatattcctggcgtggtctacatcatccaagggagaggttctatgggtttaaccttccccggttgccctgcgacttaccagcaacaattccaacaattttcatctcaaggccaaagtcagagccaaaagtttagagatgagcaccaaaagattcatcaatttaggcaaggagacattgttgcactcccagctggtgttgcacattggttctacaatgatggtgatgcacctattgttgccgtatatgtttatgacgtaaacaacaacgccaatcagcttgaacctaggcaaaaggagttcctattagccggcaacaacaatcgggctcaacaacaacaagtatatggtagctcaattgagcaacactctgggcaaaacatattcagcggatttggtgttgagatgctaagtgaggctttaggcatcaacgcagtagcagcaaagaggctacagagccaaaatgatcaaagaggagagatcatacatgtgaagaatggccttcaattgttgaaaccgactttgacacaacagcaagaacaagcacaagcacaagatcaatatcaacaagttcaatacagtgaacgacagcaaacatcttctcgatggaacggattggaggagaacttttgcacgatcaaggtgagagtaaacattgaaaatcctagtcgtgctgattcatacaacccacgtgccggaaggataacaagtgtcaatagtcagaagttccccatccttaacctcatccaaatgagcgctaccagagtaaacctataccagaatgctattctctcgccgttctggaacgtcaatgctcatagtttggtctatatgattcaagggcgatctcgagttcaagtcgttagtaactttggatagactgtgtttgatggtgtccttcgcccaggacaattattgatcattccgcaacattatgctgtcttgaagaaagcagagcgtgaaggatgccaatatatcgcaatcaagacaaacgctaacgccttcgtcagccaccttgcagggaaaaactcagtattccgtgccttgccagttgatgtagtcgctaatgcgtatcgcatctcaagggagcaagcccgaagcctcaagaacaacaggggagaagagcacggtgccttcactcctagatttcaacaacaatactacccaggattatcgaatgagtccgaaagcgagacctcagagtaatgtaattgagaactagtatcggcgtagagtaaaataaaacaccacaagtatgacacttggtggtgattctgttcgatatcagtactaaataaaggttacaaacttctt

SEQ ID NO: 9996 - DNA, 1604 bp, Oryza sativa
  ref <308>: DATABASE ACCESSION NUMBER: AK107344
  ref <309>: DATABASE ENTRY DATE: 2002-08-28
ttctaaactgcggtcgttattaaataattttcacagaccaacctggacaaatatgcgccttatggattctttggacaaactattcaagtggcatgcacatccaagcgtcctcctcatgacatactcatctttcttagggatgacgaaacaagactcaaaagtgcgaaaccgataccgagaatttatcgcagaggtcctgatgaacaaccctggactcttgattcttgacgaggggcacaacccaagaagcaacaagtccaagttgaggaagctgctgatgaaggtgaagactgagttcagaatcctcttatctggcacggccttccagaacaactttgaagagtacttcaacaccctatgtttggccagacctcggtttatcggtgatatcatgagtgaactagtgccagagaggaaaagagaaacagttggcaggagagccaaacatcaagaagcagtggcacgccgcgcctttgtggagaaagtgggccagaagattgagtctgacaacaaacatatcagaagtgatggtatcagtttgctaaacaagcttactcgtggattcatagattcattcgagggagcgaagctgatcaaccttccagggatacatgtgtataccgtgttcatgaagcccacggacattcaggaggagatgctggcaaaggtaacaatgcccaagctcgggtcgtcccggttccctctagaggttgagctgctcatcacgattggctccatccatccttggctcataaaaacgacgaaggccgtcagcaccttcttcagtccagccgaagtgaagaaggttgagaggtacaagcgagacttcgcggcggggtgcaaggccaaatttgtgatcgatctgctgcacaagtcgtcgttcagaggggagagggtgctgatattctgccacaacgtgtccccgatcacgttcctggtgaagctgatagagatggtgtttgggtggcggctcggggaggaggtgctggtgcttcagggtgatcaggagctgcctgtccggtccgatgtgatggacaagttcaacggcgacagcgcggggaagaggaaggtgctgatcgcgtcgacaacggcatgcgcggaggggatcagcttgacaggcgcgtcgaggctggtgatgctggactcggagtggaaccactccaagacgaggcaggcgatcgcgcgggcgttccggcgtgggcaggagaggacggtgtacgtctacctcctggtggcatctgggacatgggaggaggagaagtacaacagcaacaggaggaaagcttggatgtccaaaatggtgttcctgggacgctatgttgatgattcctcgcaaaaccgtgtcactgacatcgatgatgaggtcttgaaggagcttgccgatgaagatcacaccggcaccttccatatgattgtcaagcaagactgactctacttgtacctactaatattagtatgaactacgacttacaactgctactgttagctcttaattagtactagtacctccttaggaggaggtgatggcctgatataaaatgtactgctaccatcaggtatcaggcacctcaaccttcaacttcaactaagtgcacttctcctcc

SEQ ID NO: 9997 - DNA, 1395 bp, Oryza sativa
  ref <308>: DATABASE ACCESSION NUMBER: AK107345
  ref <309>: DATABASE ENTRY DATE: 2002-08-28
cacacatatcgccgtgacgtgcacgccagctcgccgtcggcgaccatgggtacggagagcgatcagtacccggcgcacctgtcgtcgtcggcgactgtcgccgggcatggcgacgacggcgagtccccggagatcgccggtgccgcccgcctctacgtcgtcggcctcatcccgcagatcttcgcctatgccgccaacctcccgatccagaagttcctgcaggcgcagagcatcgtggcgccgagcgcctacatctccgcggccacgctcgccgcgcacgtcgccctgagctggttcgccgtctacaagcttggcctcggcctgctcggcgcctcgctgatcctcagcctcagctggtgggtcatcgtgctggcgcagttcgcgtacatcgtcgtctccgacaggtgcaggctgacgtgggccggattctcgtccaaggcgttctccggcttgccggagttcctccagctgtcggccgcgtcggcggtgatgctttgcctcgagacgtggtacttccaggtcacggtcctcatcgccggcttgctcaaggatccggagatcgccctcgactctcttgcagtgagcatgtcaatatcaggatgggtgttcatggtgtcggttggcttcaatgcagcagctagcgttagagtgagcaatgagcttggtgcgggcaacccgagggcagcagcgttctccgtgaaggtggtgacaagcctgtcgctgatcgtggcggcaatcatagcagcgattgtcatgtgcctccgtgagtaccttagttacgtgttcacgcagggcgaagaggtcgcccgtgctgtttccagcatgaccccattgctcgctgttaccatcgtcctcaatggaattcagccagtcctgtcaggtgtggcggttggatgtggatggcaagctttcgtggcatatgttaatatcggatgttactacatcatcggtgttccgtttggttgcgttcttggatttcactttgatttgggtgctatggggatatatggtggaatgatcgtcggattgtttgttcaaactctcattcttgtttatgtcacatttcgtacagattggaatagagaggtaggagaagcaaagaagaggctcaacaaatggggtgacatagcgaagccacttctcgctaacgaagattgaacaaaatggcatatttagagtgccaagttgatttgatatgatgctatatatgggaagctggatgtacgtttctagtttgagacattatgccgtatatgtgtatagggccaaattaatctacgtaccagccgaaatttgatgtttcttctgaatgtactcttttgatttgttattaatctttcgtactggctaatgtaaccaaaatgcccaaattaatctagacatcttgttccctgt

SEQ ID NO: 9998 - DNA, 1175 bp, Oryza sativa
  ref <308>: DATABASE ACCESSION NUMBER: AK107346
  ref <309>: DATABASE ENTRY DATE: 2002-08-28
agtcaaactctgctcttctcttcttgcatgcccataaacacactccgaaagtacataatctaagctagctttgcaagatcaggaacaaggggaccaaattaagatgggcggggtgacgtcgtcgacgtcgtcgtcgtctccggcgacggcggcggggggcagcagctactcggcggaggcggcgcaggcgctgtgctgcgcgtgcgtggggcagtcaacggtggcggtggaggaggcgtgggggaggtacgacgcggtgctggggcccgggtgccacttcgtgccgtggtgcgtcggccgccgcgtcgccggctacctctccctccgcgtccagcagctcgacgtccgctgcgagaccaagaccagggacaacgtcttcgtcaccgtcgtcgcctccgtccagtaccgcgccctcgccgacagggcctacgacgccttctactgcctcaccaacgcccacgcccagatccagtcctacgtcttcgacgtgatcagggcgagcgtgccgaacatgaacctggacgaggtgttcgggcagaagaaggaggtggcgcgggcggtggaggaggagctggcgagggcgatgaccatgtacgggtacgagatcgtgcagacgctgatcgtggacatcgtccccgacgaggtggtgcggcgcgccatgaacgacatcaacgcggcggcgcggctgcgcgtggcggcggcggagcgcgccgaggccgacaagatccagcaggtgaagcgcgccgagggggaggccgaggccaagtacctcgccggcgtcggcgtggcccggcagcgccaggccatcgtcgagggcctcaagcgcttcgtccccaacgagaaggacgtcatggacatggtgctcgtcacccagtacttcgacaccatccgcgacatcggcgccacctccaggtcctccaccgtcttcatcccccacggccccagcgccgtccgcgacatggccgcgcaggtccgcgacggcctcctccaggccaccgccgccgccggaggaggagcagccaccctcaaggcattatagtaggttcctaaaaccggcagcgcgcgccgccgccatgttcttttgtacctgcaatttttgtgtgtgctttgcttgttgcaatcctattaatactctctgatttctgtgggtatgtattggacgttctagttcgtgt

SEQ ID NO: 9999 - DNA, 1818 bp, Oryza sativa
  ref <308>: DATABASE ACCESSION NUMBER: AK107347
  ref <309>: DATABASE ENTRY DATE: 2002-08-28
atactgatcccaacaagagtccgagaaacttgcgagttccaacggcaaaaccccatcattctcgtctcgtctccatggcgatcgagatgggaaagcggaagcggccggtggacgacggcggcgactcatccgagcccgagctccccgccgacatcatcacccacatcaccggccgcctcacctcgcaggtcgacttcctcaactgccgcaacgtctgcccgtcctgggagcgcgcgctgcgcggcgaggcgcgccgcctcgccgccgcggtggagcgcgtcccgtggctgctcctcgccgccaaggccgatggctcctacctcggccgccgtcaagcgggtgacgtcgcggctgtgcagctccccggccgccacgtgcgcctcggccgccgcgagatctgcctcgggtgctcgtccgggtggctcgtcgtggcgaacgacttcgggtacgcgcgcctcgttaacccgctcaccgccgccaccgcgccgctcccgccgctctggaggctgccctacctcgacgccgcccacggctacgacgggtgcgtcggtagcttcctgtacgtggacgaacaccaccgcggcgggccgggcgtggcgttctcgttcgacggcctctgcgacctcgtcctgctcaaggccgtcgtcgtcgacatcagcgacggcggcgccaccgttgccgtcctctacaggagggagagggagttcgccatggcacgcacgggccagcgctcgtggcgtctcgtcaacaacaagctggacggaatcgtcgacatggcgaggcacggggacggcaagctctacacggtgcacctctccggcaaggtcgcgcgctggaagttcgactgcaacgtccgcaggtcgccggagattctcgagtcggtgctggtcatcgactcgccctaccactacgtcgtcaaggcggacaacaacgtcaacgccatcaccatgtcccgggaatacgaacacgaccaccgcgaccgcgccggcgagtgctgctacctcgtcggagcgccgcgcggcacgctctacctcctcaagcgggtgtacaagcacaagcaggtcggcagcgacggcggcggcggaggccggacgcagcgcaccacggcgacgttccacgtctggcacctgacatgggccagcgacggcggcatggagtggccggccaccatggacggcgccgccatctaccataacctggcgacgttcgtcagctacaccggcgcggtgtgcgtcggcaagagggacgccgacgccgtgctcgccggtggcgccgtgtacttcaccgaggacgccgccggctacgccggcgccgccatggcggaggacttcggcgtgaggaggatcaacatcaggaggcaaaaaagcaggaggatcacgaggatgacgcggttaggcgacgagtcgatgaagaggatcaaggacaagttggaggatgaggagagcgaggaggtgaagccgctcgggcgatgcatgaactggcctcctccgttttggttcatcccaagtcttgatgatagccttggagctgcgccgccggggaagtaagcttaattttagttaccttttagtgatgatcaactcatcattatgcagcccattgttcggaatttagcttggaggattgattctgtagttagacctcgcgccgttgctatgtgaatttggtatgataatattattagaaatgtaatgtagaatacatggcgtaactttatgtggttatacatttatgttttttatttttttaatagaaagaagttcaagtggtaatttgtaaaatttacaatgagagtatggggatatcatattcactgcc

SEQ ID NO: 10000 - DNA, 2116 bp, Oryza sativa
  ref <308>: DATABASE ACCESSION NUMBER: AK107348
  ref <309>: DATABASE ENTRY DATE: 2002-08-28
tcctgctcattttttttttttccctcttccctccctcgtcgctcccacacccaaccttctttgcgcctccccatctggctaactcccgaacctcgcattctcccgaccatcctctttcaccgctactcacaatagccatcgcttcccgacgtcttgtgacagcgccttcgccgtctcaaagcctcattcgtcctcttcattccgaagtcacccgtgctgctcttcacgtcctcgtctcattcgccctcacctcgcactgacgcctcgctggctctgctctcagacgcttctctgccgcgcttaatcttgtcgcttcccgcccggctccatcttcccgactcgtcgcttatcagatcagacaaggcgctccgccctacacaaggcctcgattctctttcttctgcctttgggactgctgtcggtcctgcctttaagcacgtacctctatcccgaagcagcaccacacagcctccccttgtgcaacacatagtggtccgctcgcaaatccatctaggctttcgaccttcatcgtcacacctccagtcttcaaaacttcccagccacaagtcatcagacatggccgtcggaaacaaggtcttcgttccggcgatcttcttcatcgccgccagggaggctctcgaggcctctctcgtcatcggcatcctctcgggtatgctcgagaacctcgtcatgcacacaaagtccgccgaagatctgcgcgacgaggcctcgctcaccgaccacgagcgcgaacaggccgatctgaagcgccgtaccatcgttcgaaagcttcgcaaagtcgttctgctcggtgctttgacaggtctgctcattgcctttgctatcggtgccgccttcctggctgtcttctacacgcaggtcaacgatctgtacggcaaggcagaggagctttgggagggtatctttaacctcgtcgccgtgctcctcatcacgcccatgtcgctcgccatcctccgcgccggtaacagcaagcgcaagtggaagcgcaagctcgagagtgccttcaacgaccgccacatccagcccgcccgtctgcgcgacgaggagggcgagtccaccgccgtcaaccgcggcatctcctcgaacgacaccgcttcctcttcctcatcatcggcgcgtcgtgctgccaacgctagcggcgacgacgaggcgcaccccaagaccaccgccaccgagaagctcaacccgctcgaggcggtcgatgtcgtgcccaccatgtctcagaacgcccaggcatcgcgtccgcgtcgaggtctgcgtggtctcttctccaagccttccggtgcggtcagcgatctctagctcaggatgaaccgcggtacgctggcgctcttcaccattccgctcatcaccacgcttcgtgagggtctggagggtgtcgtgttcatcggcggtgtctcgctcggtcttcccgctacctcgatccctctcccggccatcgttggactcggcgtgggtcttctgatcggctacctcatcttccgctcgggcaacgtgctgtccgttcgcatcttcctcgttggctccacttgcttcctcctgctcatcgcctcgggcatggccagtcgtgcagtgtactatctccagttctatgcctatgtgcgtctggtcggagactctgccgccgagtcgggcgatggtcccggctcgtacaactcgcagggttacatctggcacctcaactgctgcagccccgaggccaacaagggcggtagtggttggggtatcctcaactcgctcgtcggctggaacaacaccgccacctacggctcggtgttcatgtacattggatactggttcgccgtggctggctatctgtggtaccagatctggagggagggtcgtcttgtgcttcgatggaacggcaacaccgtctgggagtcgcagcgtgccatccgcatgcgcgaggcaaagcagctcaagctccagaaccgtctccaggcctcgcaggtcgtcaccgatgaaaaagtcgctcaaccaggcccctcctccctccccaactgatccccaggacccattcaaacggatgcgcccctgtaaaatttcctgctttgtatccattgcaactgaacacaagacgcactagaaccagctc

SEQ ID NO: 10001 - DNA, 1815 bp, Oryza sativa
  ref <308>: DATABASE ACCESSION NUMBER: AK107349
  ref <309>: DATABASE ENTRY DATE: 2002-08-28
atacatccttcttccactgcataagcttcttttcacttcattccccctgttcacttatacttacaggctgatcacggccagtagtagtaagtaatggttcttggagggtggctgttgatgtgggctccggcctcatcgccaacaatcctcgtggcgttcggtctcctcttcggcctcgtcctcgcgtggcaggccggcctccagctccaccgcctgtggtggcggccgcggcggctggagaaggcgctgcgggcgcggggcctccgcggctcgtcctaccgcttcctcaccggcgacctcgcggaggagagccggcggaggaaggaggcctgggcgaggccgctgccgctgcggtgccacgacatcgcgccgcgcatcgagccgttcctccacgacgccgtcgtcaggccggagcagcactacggcaggccgtgcatcacctggctcggcccgacgccggaggtgcacgtcaccgatcccgagctggccaaggtcgtcatgtccaacaagttcggccacttcgagaagatcaggttccaggcgctatcgaagctgctgccccagggcctctcctaccacgagggcgagaagtgggccaagcacaggaggatcctcaacccggctttccagctcgagaagctcaagctcatgctgccggtgttttctgcgtgctgcgaggagctgatcagcaggtggatgggggccattggttctgatggctcgtacgaggtggattgctggccggagctcaagagcctcaccggagatgtcatctcgcgcaccgcgttcggaagcagctatcttgaaggaagaaggatcttcgagctgcagggcgagctatttgagcgtgtaatgaaatccgtcgagaagattttcatcccgggttacatgtatttgcctactgagaacaaccggaagatgcatcaaattaataaagagatcgaatcgattctaaggagtatgattgggaaaagaatgcaagctatgaaagaaggtgaaagcacaaaagatgatttacttggcatattgcttgagtcaaacatgagacacacggaagagaatagtcaatcaagccaaggcttgacaatcaaggatatcatggaggaatgcaagttgttctactttgcaggagcggatacaacatcagtgcttctcacatggaccatattgctattaagcatgcaccccgagtggcagggtcgtgcaaggaaagagatcctaggactatttgggaagaacaaacctgagtacgatggcttgaacaacctcaaaattgtgacaatgatcctctatgaggttcttaggttgtacccaccgttcatcgagcttaagcggagaacatacaaggagatgaagataggaggcgtcacttaccctgctggtgtcatcattaatcttcccgtgctgttcatccaccatgatctgaaaatctggggaagtgacgtgcatgagttcaaaccagagaggttctctgaggggatctctaaggcatctaaggatccgggtgcgttcctcccattcggttggggaccgcgaatctgcatcggccaaaacttcgcgttgcttgaggccaagatggcgttgtgtctgattcttcaacgcttggagtttgagcttgcgccaacgtacactcatgcgccacatactatgataactttacacccgatgcacggtgcacagattaaaattagagctatatgatcgtttcagatcctagcatgtttttttcgaggacctagcgtgttttattagtacaactcttggttgtgagttgtgatatttgtacctttggaataaaagtggcataggagatat

SEQ ID NO: 10002 - DNA, 2465 bp, Oryza sativa
  ref <308>: DATABASE ACCESSION NUMBER: AK107350
  ref <309>: DATABASE ENTRY DATE: 2002-08-28
atttccttcgcactcaaaatctcatctcctctcctccgcttcccactcgccttcgcgtagtgatactagtagtagccaagtttcttcgagcgttggatcgcgtggggggctagggtttcgcggccatggagcagaggaacctgttcgtgtcggcgctcagcgtcggggtcggcgtggggctcgggctcgcgtcggcgaggtgggcagctccggggagcggcgagggcggcggcggcgcggggatcggcgtggccgagctggaggcggagctgaggcggctggtggtggacggccgcgagggcgacgtcaccttcgacgaattccgctactacctcagcgagcggaccaaggaggtgctcatcagcgcggcgttcgttcacctgaagcaagcggatttgtccaagcacatccgcaacctctgcgccgcaagccgcgcgatactgctctctggcccaacagagccctacctgcagtccctagcgagagctctgtcgcactattacaaggcacagttgctaatcctggatgtcaccgacttctctctccggatccaaagcaaatatgggagctccagcaaaggcttggctcaaagccagtccatttctgagaccacatttgggaggatgtctgatttgattggatctttcacaatatttccaaagagtgctgaacctagagaatcattgcaacgtcagacaagcagtgcagatgtgaggtccagaggatctgaggcttccagcaatgcacctccacttcggaaaaatgcttcaatgtcttctgatattagcgacgtttcctcacagtgttctgcacattcagtttcagctaggcgaaccagtagctggtgtttcgatgagaaagttctgatacagtcactttacaaggtcatggtttctgtggctgaaaataatccggttattctttacataagggatgttgaccagctccttcatagatcgcagaggacttattctttgttccagaaaatgttagccaagttaactggacaagtgttgatacttggctccagattacttgattcagatagtgatcacacggatgttgatgagagagttagtagcctattcccttttcatgttgatattaaaccaccggaagaggagacccatctcgacagttggaaaactcaaatggaagaagacacaaagaaaatccagattcaagacaatagaaaccacatcatagaggtactgtcagcgaatgatctagactgtgatgatttgagctcaatctgccaagctgatactatggttctcagcaattacatagaggaaattattgtctcggcagtctcgtatcatatgattcacaacaaggatcctgaatacaaaaatgggaagcttgttctatcatctaaaagtttgtcccatgggctaagcattttccaagaaagtggctttggtgggaaagagactctgaaattagaggatgatctgaaaggtgccactggacccaaaaagagcgagacagagaaatcagccacagtgccacttaaagatggtgatggtccattaccaccaccaaaaccggaaattccagataacgagtttgagaagcgcatcaggccagaggttataccagccagtgagataggagtgacttttgatgacattggagccctggctgacatcaaagagtcgcttcaggagctggtcatgctacctcttcgacggcccgatctttttaaaggaggacttcttaagccttgccggggaatattgttgttcgggccaccgggaacagggaagacaatgcttgcaaaggctatagccaatgacgctggtgccagcttcatcaatgtctcgatgtccaccatcacatcgaagtggttcggggaggacgagaaaaacgtccgagcattgttcagtttggctgctaaggttgctcctacaatcatttttgtggatgaggtggacagtatgttaggacagcgcgctcgatgcggtgaacatgaggcgatgcggaagatcaagaatgagttcatgagtcactgggatggtctcctgtcaaaatcgggtgaaagaatccttgttcttgctgctacaaatagaccctttgatcttgatgaagccatcattaggagatttgagcgcagaatcatggttggccttccaactctagatagcagagagctgatcttaaggacactattgtcaaaagagaaggttgctgaagatattgattacaaggagcttgcaacaatgaccgaaggatacagtggaagcgaccttaagaatctttgtgtgacagctgcttaccgccctgttagggagctcctcaagagagaacgagaaaaggagatggaaagaagggcaaacgaggcaaaagagaaggcggctacggcagagaattcagaaagtcctgaaagtaaaaaggagaaggagaattcagaaaatccagaaagtaaggagaaggagaaggagaggaaggagaattcagaaaac

SEQ ID NO: 10003 - DNA, 1481 bp, Oryza sativa
  ref <308>: DATABASE ACCESSION NUMBER: AK107351
  ref <309>: DATABASE ENTRY DATE: 2002-08-28
tggcctgaacacagccggtccgtccagacctagaaaccatctgtccctcaatcccgcgacgccgccgccgttctgctccggtgctagggcttgggagctgagctccaccctgccccctccattctccagctcgcctcagccatcccttccttccgtctttaaaggcatcgctgccgggcggctgttagctgaatcgatcgcaaggaaagacaaaggaggagagttcagtcgacttgggatcgagtagaatcgccggcttctgctgctattgcggtactcttccttccgtgaatgtcgtttacttctccagctgaccattatatccaatcccaatccaatcgacgatgggcctctctcgtcggtttctgaacctgatcgtggacaaccgcatccctggagccaaatcgctgcgctgcatcgacctcaccctcgcgcgctacaagttgttcaacactacaacacctgctgcactgacactgaatgggaacggaaacggattgaagaaaaggatggagaagatttgtcttcccagcccaatcttcaacttgggagcaccaggcgaacggatacacatgttccctgctttggagcgcagggctttctctttggaccagtcggggcgtggcctccttctggaggcagacacatcccgtctggtggtgatgccaaatctccacaagcccaagttggaacccattgccctctacatccccggcgctgagatagatctggatgaccttgatggcggcggtggcggtactctttttatcatggatagaattgcgaaaccacaggaggctgactatttgttcgaggctttggtgtaccgcatgttctgttccagctacttatcaaagtcctgggactgccaactcctcccaccaccgccgccatacgtcgtcaaatgtggcgttgactttctaaagatcatctcatatggtttggttaaaggtggctctgagatctgcatatccatcgacggggttggtacttattgctttgacactgtgaaacacacttggattgaagtgggcaagtggatgctacccttccaaggcaagtttgagtatgtccacgagctcaagctctggtttggcttcactcccaacgatggccactttgctgttgctgacctctctgccatggacgagtacctgcaaccacagatacgccactgctggaacgaacttgatgagtcactcatccaaggatggaagcagatacgggaccctcagcttgtcaacctggggtctgccaagttctgcatcgcaaggttctttcacactggtgactttggcgatggattgagtggccagaatgtttctgtcctgactggtgtagagtttacccatgccaatgttgaccatgagaatattggattgatcaagcacaaatcgagatgtcacaagtctagctgcggtgaggagaccatcacggcagttttctgattaatttaagggctgactccccatcctttgaat

SEQ ID NO: 10004 - DNA, 1344 bp, Oryza sativa
  ref <308>: DATABASE ACCESSION NUMBER: AK107352
  ref <309>: DATABASE ENTRY DATE: 2002-08-28
atcaatcctcccatctcatctctacacctactcccacaggtcctcatccttcattcacaatgatcgcttccaacgttcttgctatcgccctcgccgccgctggcgccgccgccgcccctcttgccaagcgctcgagcggccaggccacctactacgccgctggtcttgtgcctgtggttggaccaactctggctctgacttcatcgtcgccatgaacgcccccgagtgggccggcggtgctcactgcggtcagaccgtcaccatcaccaacaacaagaacggcaacacccagtccgcccaggtcgccgacctctgccccggctgcagctggggttcgctcgacatgtcgaccagcctcttctccgccctgaacaacggcaacatggacgacggtgtcttccccatctcgtggtcgttcggctccggctcgtccgcctcgaacaacaacaagcagcagcagcagcagcagcagcaggcccaggccacctcgtcgacctacacccccgaggccacctacaccaagtcgtccaccccctcggccacccccaccccctcgtcggtcacctacagccagcccgctgcccccacctcgacctcgtcgtacgctccccagcccgcttcgtcgtccaactccaagaccgtcgtctcgacccccgagtggtgggctgacgtgaacaatgcctgcggtgtcaagcccgacgctggctcgctccccatcgccatctcctcctccgctctcctcgccgccgacaagctttcggacgcttgcggcaagtggatccagatcaagaacaaccagaacggcaaggagctctccctccaggtcgtcaactactgggccggtgccgagggtgacgtcgcccttggcgaggcttacaagcgccttgccaacaactacgagaaccccgagaccatcgagtccgtcacctggggcttcatcgacggccagggcctctaaatccctcccgtcctgcttcttctcagtccgcttccctcatagacatggcagcgcaaggcacgatgcagtcgtgggccctttgatagggcccgggcgcatcgacgcactcctgtgttcgcctcttttccccacctccctctagatggctctatttctctcttctctcgttctctcgcattatgggcttagtatttgtatcctaccactttcatacgctcgccgatgttttctcctccactggagaccattcgtgtacacgagcgatttcacagcccaagcgcttccagcaagccttgggcaactcctctgctttcgtcttctcgcgttgcttgtcaccgagttgctaatcgaaaaaattggcgtccagccaagtatcccatatatcc

SEQ ID NO: 10005 - DNA, 1393 bp, Oryza sativa
  ref <308>: DATABASE ACCESSION NUMBER: AK107353
  ref <309>: DATABASE ENTRY DATE: 2002-08-28
ggccgaaacttcaccaaccaagcaggaatggcgctcctgctgccggagttcgacccggcggacgtccgcgccggccgcgacctcatccaccgcctcaccgccgacgccgccggcatccagcggggcgtcctccgcgagatcctctcccggaactccggcaccgagtacctccgccgcttcctaggcggcgccgccggcgacgacgacgacgtgcgagacgcattcaagaggcgcgtccccgtgtccggctacgaggatgtcaagccgtacgtcgaccgcgtcgcgtccggcggcgagccctcctctgccctcctctgctccgaccccatcacctgcctcagcaggagctccggcacgtccggcgggcagcagaagctgttgccgtccaccgcggaggagctcgacaggaaggtattcttctatgctgtccaggcgctcgtgaggaacatgagcttgcacaccgatcatggtgaagacgacgacggcggtggtggcgagggaatgtacctcatgttcgccttccacggtgaccggacattgtctggcctgcccatccagtctgctctaactacctactaccacagcagacagtttcaggaatgcgacattggcgggtttgataagtgcacaagccccctggaggcaatcctctgcccctatggcgagcagagcatgtactgccagttgctctgtggcctacttcaccgatgcagagtggaccgtgttggtgccagctttgccgctgggttggttcgggggatcaagttcttggaaaatcactgggaggagatgtgcttcaacatccggagcgggcagctcagcgactggatcacgcatactcctctgcgtgatgcggtcactggacagtatcttcaaggatctaacccagctttagccgatgagattgcatccgagtgtgcgaggaaaccttgggatgggatagtcaggaggctatggcctagggcacggtatatccggaccattgtgactggttcaatgtcacagtacattccaattcttgaggtttatggtggcgggctaccattggtctcaccaatctatgcatctacagaatgcgctgccgggataaatctgaggccacttgatccaccatcccatgtgtcatatgcattgcctccaaacattgcttactttgagttcttggaggtcatggatgaaaatggtgaaaaggtacaaggaactaccaggcttgatgacaatttgggtgaggtaaaagttgttgaccttgtggatgtcaaagttggttgatgctatgagttgattgtcactacctttgcaggcaagctgttgggctactttttatcccttttttttcagacatggctaggtttatcttatatctgatcattgaaagctctcatcgatttcttgt

SEQ ID NO: 10006 - DNA, 2561 bp, Oryza sativa
  ref <308>: DATABASE ACCESSION NUMBER: AK107354
  ref <309>: DATABASE ENTRY DATE: 2002-08-28
atccgcaccggcacggcggcatgcgagatgccgccgccttggagctccacgccgccgacgccgcggcggcggcgcggccggcgatggtggccgccagcgatcactacgcgcggctcctgcagctctgccagacggcggctaacccgggcgctggccgtgccatccacgcgcgcgccgtcaaggctggcctcctcgccagcgcctacctctgcaacaacctgctctcctactacggcgagaccgccggcggcgccggtgggttgcgggacgcgcgacgcctgttcgacgagatccccttggcgcggcggaacgtgttcacctggaactcgctcctgtcgatgttcgccaagtccgggcgcttggccgacgcccgcggcgtgttcgcggaaatgcctgagagggatgccgtctcctggacagtcatggtcgtcgggctcaaccgcgccggccggttcggggaggctatcaagaccctcttggacatgaccgctgatgggtttacgccgacgcagttcactctcacaaatgtgctgtcgtcgtgcgccgtgacacaggccggcgcagttgggaggaaggttcattccttcgtcgtcaagctcgggctcggtagttgcgtgccggtggcgaactcggtgctcaacatgtatggaaagtgtggggattctgagacggcgactactgtgtttgaaaggatgccggtgcggagcgtgtcaagctggaacgccatggtatctctgaacactcatctggggaggatggaccttgccgaatccttgttcgagagcatgccagaccggagcatcgtctcatggaatgccatgattgcagggtacaaccagaatgggcttgatgccaaggcactgaagttgttctcaagaatgcttcatgagtcttccatggcgccggatgaattcaccatcaccagtgtcctatcagcttgtgcaaacctcggaaatgtaaggattggaaagcaggtgcatgcatatatcttgagaactgaaatggcatacaatagccaggtcacaaatgctctcatttcaacatacgccaagtctggcagtgttgagaatgccaggagaatcatggatcagtcaatggaaaccgatctgaatgtgatatccttcactgccctcctggaaggctatgtcaagattggggatatggagagtgcaagggaaatgttcggtgttatgaataaccgagatgttgttgcctggactgcgatgattgtcggatatgagcagaatggccgcaacgatgaggctatagatctcttcagatcaatgatcacatgtggcccagaaccaaacagctatactctggctgctgttcttagtgtctgtgcaagcctggcatgccttgattacggcaagcagatccactgcagggctatcagatcattgctagagcaatctagttcagtcagcaacgccatcatcaccatgtacgccaggtcaggcagcttcccatgggccaggaggatgtttgatcaggtttgctggcgcaaggagacgatcacatggacatccatgatcgtggctctagcacagcatggccaaggagaggaagctgttggcctcttcgaagaaatgctccgcgctggcgtggaaccggatcgcattacctatgtcggcgtgttatcagcgtgctcgcatgccggttttgtcaatgaagggaagaggtactatgatcagataaagaatgagcaccagattgcaccagagatgagccattacgcctgcatggttgacctcctcgcccgcgccggcctgttctctgaagctcaggagttcatccgacgaatgcccgttgagccggacgcaatagcctggggatcactcctctcagcctgcagagtgcacaagaacgcagaattggctgagctcgcagcggagaagcttctgtcgatcgatcccaacaacagcggcgcctactccgccattgccaacgtgtattccgcctgcgggaggtggagcgacgcggcgaggatatggaaggcgaggaaggagaaggcggtgaggaaggagacggggttcagctggacgcacatccgcagcaagatccacgtcttcggcgccgacgacgtggtgcacccgcagagggacgccgtgtacgcgatggcggcgaggatgtgggaggagatcaagggggccgggttcgtgcccgacctgcagtccgtcctgcacgacgtcgacgacgagctcaaggaggagctgctgagccgccacagcgagaagctcgccatcgcgttcggcctcatcagcacgccggagaagacgacgctgcgggtcatgaagaacctgcgggtgtgcaacgactgccacgccgcgatcaaggccatctccaaggtcacggacagggagatcatcgtgcgggacgccacgaggtttcatcatttcagggatggcctctgctcgtgtaaagattactggtaggaaaacgttcatggtgattttggcgaggaagggggatatttgtttgttgtttcatgcagagatgtactccattgtaagcttgcaagaacagccaattccaatattcatgaatcacatgattaaaat

SEQ ID NO: 10007 - DNA, 1631 bp, Oryza sativa
  ref <308>: DATABASE ACCESSION NUMBER: AK107355
  ref <309>: DATABASE ENTRY DATE: 2002-08-28
ttcaccaacaggaagctaaacaatatacgatgtggaagctaaagtttggtgagggggcaagcaacccactgctccgctccagcaacggcttcctcggccgggagacgtgggagttcgaccccaacggcggctcgccggaggagcacgccgtggtcgagaggctccgccgcgacttcacccgcaaccgcttcacacagagggagtgcagcgacctcctgatgaggatgcagtttgcaaaagagaaccaagtttacagtaaacatgaagtaagcaatcttaaagacagttcagaagtcacagaagaagttctattaacgtctttaagacgtgttcttgatcaatattcctctttgcaagcaccagatgggtattggcctggtggttacagcgggattttgttcattctgccgctcatgatatttgccttacatgtgactaagtcactaaacgatgtcttatcatctgagcatatacgtgagatatgccgctacatctacaacattcagaatgaagatgggggttggagtacacatactttaggcccaagctccatgtttggctcatgtgttaactatgctaccttaaggctcttaggggaggtactggatgaacacaatgatggattatcaaaagggcgtgcctggattctgtctcatggcagtgcaactgtagcaccacaatgggcaaagatatatctctcggtaattggtgtttacgattggtcagggaacaatccaattattccagaactatggttgcttccacattttcttcccattcatccaggaagattttggtgcttttgccggatggtttatatgccaatgtcttatatatatgcaaaaagatttattgggccaataactccaactatactggcactaagagaagagctctatgatgtaccatacaacaggatcaattggaacaatgctcgcatttcttgttgcaaggtattaaatatgatttgctgctggatagaaaatccgaactccaatgcattcagacgacacgttccaaggattcatgatttcctatggcttgcagaagatggaatgaagtcaaaggtgtacgttggtagccggtgctgggatactgcccttatagttcaggcctactgctcaaccggccttacccaagaatttagtgaaactatcaagaaagctcatgattttataaagaatgcgcaggtaaccaagaattgtcctaattacaaaggatattaccgtgaaaggtcaaaaggttcatggacattatcaaatggagaaaatggatggcctattgcggatactcttgccgaatgccttaaggcggtgttgttgttatcaaagattccaccaacccaagtaggagatccaattcaagaacaaaggttgtatgatgctattgactgcctactttcatatgtgaacaaggatggcactttgtcctctgcagaatctaagagaacaactccatggatggagttcatcaacccttccgagagtttccggaacataattgtggattacccgtacgtggaatgcacatcatcactaattcaagccttgatactgtttaaaggcgttcatcctggataccgccgtgaagagatagatagaattatcaaaaatggtgtgttgttcatcgag

SEQ ID NO: 10008 - DNA, 1828 bp, Oryza sativa
  ref <308>: DATABASE ACCESSION NUMBER: AK107356
  ref <309>: DATABASE ENTRY DATE: 2002-08-28
ctacacccctttcccatcgctcgcactggttctcatcccatcgagccacctacatccttgttcaaaccaaaaagcattggcgcaacagctccaacaccctcgtcacgcatacaccctaacccaaaagtagaacagcgcccattcgcaatcatggctgaccaggagctcaagcagttccaggaggaggtggaggcggtcaagcagtggtggaagaacccccgcttcgccaacaccacgcgaccctacaccgccgagcaggtggtgtcgaagcgcggcacgctcaagcagacctacccttccaacacgcaggcgcagaagctgtggaagacgctcgagggccatgcctccaagggcaccacctcgcacacctacggtgctctcgaccccgtccaggtgacgcagatggccaagcacctcgagactgtctacgtgtcgggctggcagtgctcgtcgaccgcctcgtccaccaacgagcccggcccggatcttgccgactacccgtacaacacggtgccgctcaaggtggagcacctgttcatggcacagctcttccacgaccgcaagcagcacgaggagcgcaccaacctgtcgcccgagcagcgcgccaagacgcccgtcgtcgactacctgcgccccattgtcgccgatgccgacacgggtcacggtggtctgaccgccgtgatgaagctcaccaagctctttgtcgagaagggtgcggcgggtatccacattgaggaccaggctcccggcaccaagaagtgcggtcacatggccggtaaggtgctggtgcccatccaggagcacatcaaccgtctggtggccatccgcctgcagtacgacattatgggcgtcgagaaccttgtcgtggcacgtaccgactcggaggcggctacgctgatcacgaccaacgtcgacgagcgcgaccacgccttcattctcggcaccaccaacacgagcctcgagcctctggtcgacattctcaaccgcgccgaggccgagggcgccgacggtcccaagctgatcgcgctcgaggacgagtggctggccaaggcgcagccggtgcgctacggtgacgccgtggctgccgagctggagaagaagggcaagaaggccgaggcggagcagttccgcaaggaggtgctgggcacgtcgctgctcaaggccaaggccaaggccaagagcctgggcgtcgagattggctttgactgggatgcgtgccgcacgcgcgagggctactaccgctaccagggcggcaccgactgcgccatcaaccgcgccatcgctttcggtccctacgccgatctgctgtggatggagaccaagtcgcccatcccggcgcaggccaaggagtttgccgagggcgtcaaggcggcgcgcccgcaccagtggctggcgtacaacctgtcgccgtcgttcaactgggacgcagccaagctgagcaccgagcagatgaagagctacgtgtgggacctgggcaagctcggcttcgtgtggcagttcatcacgctcggcggtctgcactcgaacgcgtacatctcggacctgttcgcggccggctttgccaaggagggtatgaaggcgtacgtggagctggtgcagcgcaaggagcgcgagattggctgcgacgtgctgacgcaccagaagtggtcaggcgccaactttgtcgacgcctgcctcaacacggtgctcaaggccgcctccacctcggccatgggcaagggcgtgaccgagacgcagttcaagtagagactgcgcaagctccccctgtctcctgtacactaccttatgacttgactagctccgtcgaatcccagccctgcattgcttc

SEQ ID NO: 10009 - DNA, 2594 bp, Oryza sativa
  ref <308>: DATABASE ACCESSION NUMBER: AK107357
  ref <309>: DATABASE ENTRY DATE: 2002-08-28
atcacatatacacctcttgcatgcatttctgtctttctccacttgcatcactccaggccaaacactgacgatcttcacgacctcgccacgacgtgcgctcactgctgtgccccccctcggccatatcctgtcgtccctgcattcaactatagcagcccctccaccccttcaacttcgactcacggctgcgctcatctttggcgtgcctagcccacaatgaagggcctcaaagactttcgtaggtccttgaacaaggaccgccattcgggcggaaagcctcccacttcaagcgcaagccctgccgcctttaccaacgtcaagagcgccgtcaccatccagccgcccaagctcgtcatccgtgccgttcgcgactacagatccaactcgccccacgagctcagcttccacaagggcgacttcttccatgtcatcacagatcccgcgcccaacgcagattggttcgaggcaaacaatcccatgacaaacgcacgcggtctcgtccccgcaagtcatttcgacgtcctctccaagagcaaccgcgcaaacccggccacctttgcaggcccaggcgccacctcgcctcagatgggcagcatgtctccgccaacctcctccgctgcctccaccacaggcgttcctcctccttcaggcgcgtcctcgtcgtccaaggcttacggaggacgtgccgctggagcggccatgacggcaaagggtggcggcggcctctacgccgtggtcaagtacgacttcaacgccgagcgcgcagacgaactcgaggccaaagccggcgagtccatcatcgtcattgcgcagtccaactttgaatggttcgtcgcaaaacccatcggcagactcggcggtcctggcctcatccccgtcgcctttgtcgagatccgcgatctggtctctggtcgtcccatcgacgacgtgcaagagctcatcgagagcggcgtggtgcccaaggtggaggagtggaagaagatgaccgcagaatacaagaagaacaccattcccctcggtcgcttcgactttccgcaatcttcccagcagggtctcaactcgccctatgccaacatggccgctgccgcttcgggcagcagcaccaacaatgccgccctcccgcgctccgacatgcacgcccaccaggcgtccatctcctcgctgcccgtccccaccccaccacccaaggacgacctctacaaccatactggcggtccgctcggcgccgccggtgcagtgcagcccttcgacgagcacgaccccaacgccatcgacccgctcacccagctgcctcctggaatgtcgccaggcgagccgctgcccacaggcatcatcacctccgccaccgtcgactcgttccactacgagcagggcgactactggttccgcatccaggcaacgcacgtcgccgggccttcaccatcagcaccgtccaacgcgcccacagcacccgacggagaggaacgcgatctcatcctctaccgcctctacgaagacttttacgagttccagatcgcgcttctcgaccacttccctgcagaggccggccgcgagaccgacgccaacggccactcgagcgagcgcatcctcccgctcatgcccggcccgctcgatgtcgtcgacgacctcatcacctcgcagcgtcgcgtcgatctggaccagtacattatcgaactctgctcgctgcccgagtacatcatgcgctccgagctcgtacgactcttcttcgagccaagacccggtgatcactgcaccgcgcacccggcgcgcggtcccaccgacgagcaggacaacaacttgcagtacaacgactacggctatctggccggcgacgtggatgcaggccagcagaggaaccagcagacaacacagcagcagcagcagctccgtagcaatggcgtcaacaaatatgccgaggatcagccagtgggccgcgcaagcacctcgtccaggaccgaggatgagctcagcgcaaagatgcgcggcgcctcgctaggcggcggttcgggcggcgcgtcgtcgggccagcgagactcggcgaggagcagtgctgcgtttggcggaggagtgggcgggacgatcagtacgggacgcacatcgcaggcgtcgagtgggcacaggaagcagaattcgtccgggccatcgacgcaaccgcagacgtcgggctcggcggccagcgtgccgtaccaccggatcaaggtggcgcgacgcaacgatctggacagcgtgatcgcgttgaggatgccgccgagtcctacgtatgcacagctgctggagaaggtgcgcgagaggttgggcgccgacgtctcggtgttcaagtgcaacgaaaagcccgatctcatcgacgacgatgcctcgctcaccgcctggctcgacgaggcgaccgaccgtggctggaaactcatgctgcatgcctcgtgacaccgatcccttgctccttcttcctcgctccgtcttttttgggctaattttgtacagtctctcggtctcttttctgctgtgcgatactcgggtgtcaccggtcgttgctttcactgtaccttgacaatggttggaaccaaatggcaagaattcacacaaacacatgcaaggag

SEQ ID NO: 10010 - DNA, 1256 bp, Oryza sativa
  ref <308>: DATABASE ACCESSION NUMBER: AK107358
  ref <309>: DATABASE ENTRY DATE: 2002-08-28
atcgatccaagcacatctagctcgctcgaccccatcaactcccaacaagtcccaaaccaacactccaaaatggctcccgctgctacctcttcccgctcccatgccgcgcaggacccgcgcgagcagcagctcgacatgtcgggccagaaccgcgtcgccatctttgacaagcagggcggcccggtctcgatcaaggacgtgcccgtgcagaagcagctcaagcgcggcgaggcgctcgtgcgcgtcatctacacgggcgtctgccacacggacctgcacgccatgctcggcgactggccgctcgacaacaagctgcctctcgtcggtggccacgagggtgcgggtgtggtcgtggcgctcggcgagggggccgaccagtttgtcaaggtcggcgaccgcgtgggcatcaagtggatcgccacctcgtgcctcaactgctcgttctgccgcaccggtgccgagcccaactgcccgcacgcccagtgctcgggattcagcgtggacggctcgttccaaaagtacgccgtgtcgtacgccaaccacctctccatcatcccggacgcgctgccgctcgaccaggccgcgcccatcctctgcgcaggcgtcacggtgtacaaggcgctcaaggaagcccagctcatcccgggccagtacgtggcgattcccggtgccggcggaggactcggccatctcgccatccagtacgccgtcgccgccggctaccgcgtgatcgccatcgacacgggcgccgacaagaagcagctgtgcgagtcgctcggtgccgaaaagttcatcgacttcaagacgtccaagagcctcgtcgacgacatcaaggccgccacgcccgacggctttggaccgcaggcggcggtggtggcggcctcgggcgcagcggcgtacgagcaggcgctcgactacatccgcccgcgcggcgtgctcgtcgccgtcggtctgcccggcaacacggacatccgcgccaacgtcttcttcaccgtcttccgcttggtgcgcgtggtgggctcgtacgtgggcaaccgccaggacgcacaggaggcgctcgagatcgccgcgagcggcaaggtgcgcacccacttcaagacgctcggcctcagccagctgccccaggtgtacgacgacatgcagagcggcaagatcgccggccgcatcgtgctcgacattgaccagtagttgccaagtccaaaacccaaaacgctgtgcacgtaggttcctgcttccaattcgaaatgcctttgttc

SEQ ID NO: 10011 - DNA, 1745 bp, Oryza sativa
  ref <308>: DATABASE ACCESSION NUMBER: AK107359
  ref <309>: DATABASE ENTRY DATE: 2002-08-28
attgctaccaaaacctccacctcgtgcaatactcaccactatacacattcgcttcctggcatgcagccgcgacgtacaagcatagctgcagccggcggcgcacaggcagtatgcttctacgacctcaccctgggcggctgaccctgctacgtgcgcaacaaccaccacgaacacgccttattatcagactacctctcagccatggcctccataccactgccatacggcaagagcagaggcgctcgcgatcaccccaagcgggcaccatgacacccgtcccggacgaagaccgcagacctgcaaagcaatcgcccttctacttcctcaccggctacgcaggttgggccaaacgaccctcacgtccctttccgccgccgttcttctctccgccttcgggctctttctcagatccgctctcgacacataaccgcagccgtgaccggcggccgaaagtcaacggcgaaatgatcctcggcgttacgaatggcgacgatgcgatgctggtaactgagaacctcttagcggcaaatgacggagttggagcatgggcgcagaaagagagaggacatgcgccgctctggagcagactcatcatacatttctgggcaacggcggcggagaaagacgggatcggagcagcaagtacgggcttcagcgtggatgcgaagcaggcagatggagagaacaagccggatccggtgcgttacttgagtgaggcttatgcggctacgaaagaagcgttgggtcctccgacagagtggtttgggaccacaaccacgtcctcggcactgttacattgggaacaagacaagccgacattgtatgtcacacagttgggagattgcaaggtgctggttcttcggccggatcaagagtacaagggaaatgacgacgtgtcaatcgatgagcaggaggacataggtgggaacgttgtctttgcaacgaaggaacagtggcattacttcgactgcccacgtcaacttggcacgaactcgccagacaccccggaagaaaacgctgttctcgatgttgtcacagtacaggagggtgatattgtgctagcaatgtccgatggcgtcacagacaatctgtgggaacacgagatttcagcaaacgcactcaaatctctccgcacgtgggtaaagaaacacgctgcggatgaaacagccactgagaaatcgaacggtgtctcaacagaggctatgaagttccttgcacaggagcttgtacttgctgcaaggcagattgccgaagacccattcgctgagagtcccttcatggagaaagccgttgacgagggactggccatcgaaggtgggaagctggacgacattagtgttgtcgctggctttgtgagaaaacgcgatatgacttgaacgagaactacgactatggacaggagatcagccacaacaaagaccccagaggcaataccaccagagtcccaacgaggcattgttatcttcatcgatcaaaggacgtggtgccaccttctcggctgtggtcggaggtgcacgtacaatgactacagcacgctgcgcatcacgttcgaccagggctgccaccactacaaccctaaacctcggtctggagcaatgggtcgtatggctcgaaaacgaaagttctttggatgaagaggacaaataataatagcaccagacatgctggacgaagggaattggcaaggcgcaggggctgtctaggttggcaagcgagtatatacaactattgactatgacaataac

SEQ ID NO: 10012 - DNA, 1551 bp, Oryza sativa
  ref <308>: DATABASE ACCESSION NUMBER: AK107360
  ref <309>: DATABASE ENTRY DATE: 2002-08-28
aaagaatatgggggccggcgaggtggtgcaggggctgaagccggtggcggcgatggtggtggtgcaggtggtgttcgccggagtgaacatattctacaagctggcggtggtgtgcgacggcatggacatgcgcgtcctcgtcgcctaccgctacctcttcgcctccgccgtcctcgccccgctcgcctacttcgtcgagaggaagaacagaacaaagatgacgtggagagtgctgatgctgtcgttcgtctgcggactctccggggggtcgctggcgcagaacctgtacatctcggggatgaagctgacgtcggccaccttcgccaccgccatgaccaacctcatcccggccgtcaccttcgtcctcgccgtcctctgccgctacgagcgcctcgccatccgcaccgtcgccggccaggccaaggtcgccggcacgctgctcggggtcggcggcgccatgctgctcaccttgtacaagggcgccgagctcaacccctggcacacccacctcgacctcgtcgccgccctggaggcgcgccaccccgccgccgccgccgccaccgggaataacgaccgcgtgatcatggggtcgatgctggtggtgggcagctgcgtgttctacgcggtgtggctgatcctgcaggcgaagctgagccgcgagtacccgttccactacaccagcacggcgctgatgtgcgtgatgagcggcgcgcagtcggcggcgttcgcgctgttggtggacagggagcccgcgcggtggcggctggggctggacatccggctgctgtcggtggtctactccggcgtgctggcctccggcgtgatgctggtggtgctgtcgtggtgcgtgaagcggcgcggaccgctgttcgcgtcggtgttcaacccgctgatgctggtggtggtggccgtgctggggtccctcctgctcgacgagaagatgcacgtcggcaccctgctcggcgccgccctcatcgtcgtcggcctctacgccgtgctctggggcaagggacgcgagaccgccctcgaggccgccaaggtcggcgacgacaacgataaccaccacatccacgtcgtcgtcgtcgtgccgccggaacaagcgcagccgcagccgcaccaacaagcggaggctgatgctgatgccacgacgacggcatgcgaacaaccatcggattcggaccgggcgaatattgcatcctctttacgacacagccatagatacttccatcgttcttgcgggttttaattaattaattactctagctagctcaggctcagctagctgctaattaattaactcgcacgtacgtacggcctgcttaatccatgatctctgttcgagggtaactaattaattaattaatcagcgcgagtacgtagaaaccaattaaccaatcaacaagaaacaaacaaacgagagcggtcgcgatcaacaagctatcgatcgaccgtgcgtacgtaggatatgcatgtatggtaggtaggagaggagattaaatatattgttgctctatctctgatcattaatatatacgtacgtacacatgcatg

SEQ ID NO: 10013 - DNA, 1945 bp, Oryza sativa
  ref <308>: DATABASE ACCESSION NUMBER: AK107361
  ref <309>: DATABASE ENTRY DATE: 2002-08-28
cctcatcccccatccaagccggtctcttcgcgaagcaaccagctcctactttgaccccatcgcgtggatccacagagcgtagcccctttgccctctgcccactccgacaatcccctctccctgtcctccgctcgacactggtccaagatgagccactctcccgtcgaaccggtcaaggtcggcgacgagaccatcgcgaagggcaacgaagctaaccagcacgtcaagcccgccaatggtgaccagctcgagaagcaggtctcgcctctcgagtccgaggtgttttcgcgcccggacggcgcctcggtggatgacatttacgagcgcaaggtctacatcctcaacaaggtcatgaacgaccacatcggcatgggcaaggtccagtggcagctcttcctcctctctggttggggctggatggccgacaacctctggctccaaggcgtcgccatcattcttccgcaggtcgagcgtgaattcaacatctccagcgacgtccgctggatgaccttctcgctctactgcggtctcatcctcggcgccgccacctggggtatcctcgccgacgtcatcggccgccgtccttctttcaacatcaccctctgcatcgctggtatctttggtatcgctggtggtgctgccccgagcttcgtcggtctcggcggtctccttgccgcgcttggtttcggtctcggcggcaacctgcccgtcgacggcatgatgttcctcgagttcgtccccgccaagtcccagtacctcctcacgctcctctcggtcttttggtcgctcggccagctcctcgcctcgctcgttgcctgggcgttcatcgccaactactcgtgcgacgacaaccagtccaacacggtcaccggccccaacaccgtcgcttgcgacgtcagccagaacaagggctggcgctacagcttctacacctttggcgcgctcacctttgccatgtttgtcgcgcgctactttgttttcaacctgcccgagtcgcccaagtactacctctccaggggtcgcgacgccgatgccgtcgccgtgctcaaggacattgccgcgaggaacggcaagccgctcggcgacgacgtcatctcggtcgagatcttccgctccgctgccggccaggaggccagcatggacgcacaggagatcgggcacaagcccaagggcatgaagcgcatcacctcggcccccaaggaattcatccacaactttaagggcgtctcgttcaccccggatctctcgcacgtccgcccgctcttcgtcggctggcgcatggccgttaccaccaccctgctctgggtgctctggtcgctcatcggcctcgcctacccgctctacaatgccttcctgcccatctacctctccgaggctcagggtctcgacggtgcttcggacgtctacaccacctaccgcaactacgctatcatttcggtctgcggtgttccaggctccatcattgccgcctgggccgtggagctgccccgctctggccgacgtggtgcgctcggcgtcggtacgcttctgaccggcgttttcctcttcctcttcaccaccgcctcgaccgaaggcgctgtgcttggatacaacgccgtaacggcgttgactcagaacattatgtatggaacgttgtactgccttactccggagcttttccccgctccgcatcgaggaacaggtgacggaatcgctgctgcgctcaaccgtatcttcggagcgatggctcccatcatcggaatttacgctggaggcactgcgccgctttacgtggctgcttcgctcttccttctgtcgggagtgctctccttcctcatccccctcgattcgcgcggcaagagtgcgctttaatcggtgcaacttgcctcccgcgggcaccttgttccaccagaataccatcgcatgcttcgcgcgttgtacagaaatggaaataccgtcgatcgcg

SEQ ID NO: 10014 - DNA, 2649 bp, Oryza sativa
  ref <308>: DATABASE ACCESSION NUMBER: AK107362
  ref <309>: DATABASE ENTRY DATE: 2002-08-28
acctccatccatcctcctcgtgctcctccccgcacaacctccacttgtccgtcccccgacgtctcgttgccgaggcggcgtaccatgcacgaccactcccaacctttggccaaacgtcccaagatggcttccactcccctcaacatcccgctcgagtccatgctccccgccccagctcccctccgcgtcctcatcctcggctccggcggtcgcgaacatgccatcgcaaaccacttcctccgctccaaccgcgtagagcacgtcttctgcgctcccggcaacggcggcaccgccaccctcggcccgcgatgcaccaacatcgactcgcccaaggccacgggcgactttagcgaaatcaccgcctgggctgtccagaacggcatcaacctctgcttccccggccccgaacagccccttgtcgatggcgtcgaactcgctttccgcaaggtcggcatccccgtctttggcccctcgcccgtcgctgcacagatggagggctccaagaccttcgcaaaggctttcatggacaagtacaacatccccaccgccgccttccagtccttcaacgcttcccaggtcgacgagtgcctcgcctacatccagaagctcggcggcgcacagcaggtcgtcctcaaggcatccggtctcgccgcaggcaagggtgtactcctccccgagtccgaccaggaggcccaggagggtgtccaggacatccttgtcaagaaggtctttggcgatggcggctcctcgctcctcatcgagcagaggctcgtcggtcccgagctctctgtgctcgcgttctgcgatggctacaccgtcaccgcactcccagcctgccaggaccacaagcgcatcggcgagggcgacaccggccccaacaccggcggcatgggcgcctacactcccgcccccgagggcctcgtcgacgacctccccgcgcgcatccgcaacgaggtgctcgtgcctaccatcgacggcatgcgcaacgagggcttccccttcgtcggcatgctctttgtcggcctcatgctcaccgccgacggtcccaagatgctcgaatacaacgtgcgcttcggcgaccccgagaccgaggcgctcctcgagctgctcgacgagtccaagtcgagcctcgccgacattgtgctcgcgtgtgtcgagcgtcgcctcgactcggtcaagcccgtggtgcgcaaccagcacgccgtcagcatcgtgctcgccagccagggctacccgggcaagtacccgacgggcgtacccatcaccatcggcgccgtgccccagaacgtcaccgtctaccacgcaggcaccaagcttgacgccagcggccagcttgtcaccgccggtggccgtgtcattgccgtgtcggcgttcggcaacacgctccaggaggccgtcgagcttgcctaccagggtgtggatgccgtgcacttcgagggcaagaccttccgccgcgacattgcgcaccgcgcgctcaagcccgccgcctcgagctcgggcggcctgacgtacgccgctgcgggtgtggacatcgatgcgggcaacgcgctcgtcgaggcgatcaagccgctggccaagtcgacgcgccgtgccggctgcgatgcgtcgctcggtggcttcggcggcacgtttgacctcaaggcaatcggcatgcgcgaccccgtgctcgtctcgggcaccgacggcgtcggcaccaagctgcgcgtcgcactcgacatgggcaagcacgacaccgtcggcatcgacctcgtcgccatgtccgtcaacgacctgctcgtccagggcgccgcgccgctctacttcctcgactactttgcgtgctccaagctcagcgtgcccgtcgcctcggccgtcatctcgggcatcgccgagggctgtcgccaggccaagtgtggtctcatcggtggtgagaccgccgagatgccaggcatgtacattggcgacgactacgatctcgccggatttgccgtgggtgccgtggagcgcgaggcactgctgcccgtgctcgaccagctcaaggcgggcgatgtgctgattggtctgcacagctctggcgtgcactcgaacggattctcgctcgtccgcaagattgtcgcccgctcgggtctcgagctttccgcgccctgcccctggtcggcggagaaggacggctccaagccagcggctacgctgggcgaggcgctgattgcacccacgcgcatctacgtcgaggcgctcacgccgctgtttgccgaggccaagggtctgttggctctgtcgcacatcaccggcggtggattcacggagaacattccgcgcatcctcgcgcccggcgtgggtgtcgagatcgacctggcatcgtggcagcgtcccgcactcttcgactggctccaagccacgggcaatgtcgagcccgaagagatggccaggacgttcaacaacggtatcggcatggtgctcatcgtccagcagcaggagcagcaggggatccttgacctgctcagccaggcaggcgagcgccccgtcgtcatgggcaccgtcgtcgaccgcgaaggcgtccactacacaaacatgaacgcctggtcggcttgagcgttcctcctccgcccccttcttcccgtccgtggtgccaaatgtaaattgaaatacgaatcgaaagtagatacctcc

SEQ ID NO: 10015 - DNA, 1811 bp, Oryza sativa
  ref <308>: DATABASE ACCESSION NUMBER: AK107363
  ref <309>: DATABASE ENTRY DATE: 2002-08-28
gcggtgcgtataatttagtagtaggagtttagaacacgatgaaagaattggccatgtcgtacttcatcttctccaggttcggcgagacggcgaacttgatcatcggcggcggcccgcaggcgagcgcgagcgtgtcgtcgccgccctccggcacgtgctcccgcagcacctcctccgtgacgaacccgacgccgtacttccacccttcctccggccgcttcacctggtcgatgacgtaccacaccttgagcctgtccgggtactccgccgcccaccggtcgagctcgtcgcggaggaggatgtcgtcctccgtccggttcgcgtacaccaggtgcatctccgtcgtgtcctccggctggtcgcgcagcaccgactggatgacctggtacatgggcgtgatcccgctcccgccggcgatcatcgccagccgccgcgcgttccgcggcttgccgttgatgacgaactcgccgcggccggtgtactcgacgtggccgagtggccccttgacgtcgatgtaggcgcccacggggagcgagtccaggtactgcgtcatgagcccgccatcggggaacttggggtgctcgttcttgaagtacaccttgatgaggaggtcgaagtggccgacctcgtcgaccatgctcgtcggcgtgtacgcccgcatgcacagcttcccttcgatgctggcgcacacgaagatgtgcttgccgacggggaggccgagcacctggtcggaggacggcagcgcgaagcggaagaggcggacgtcgcgggagagctccttcttgtcgacgagttggcaggggaccttgtcgcgcgggctggagagcgcgacgggcgccggcgccttgatggcctcgcggatgggggcgagctgggagaggttggacgcgccgtggacggagttgtcggagctgtacccggcgccggtggtgatgagctcgccgatgcggtaggtgtcgaggagcgccttggccttgtcggagtggatggcgtcgaactcctcggtgcagtcggtgccggcgttgatgaggatgctgtcggcgccgccggggtggtccttgaggaaggccgtgcagtcgtagacgtgaccgtggacgacgatccacgccgagtcctgcgacgagtgcttgcgcacctcggacatggtaaactgcttgccgtcggtggtgttcatgaacggcgtcgacgtgctccgcttcagccccggtgcggccgcctccgccgtctccaggtgcttctgcctcgccatccacccgccggtctggttcccgggctgcgtcgggtgctcgaacaccagcccgatctcacccttgtgcggccggcacacgttcaccttcaccttgaaccagcagttgttcatcatcccctgcaaaaacccaaccgatcgaatgaatttgccatcgtcgtctacatcgccgtcgccttggccggagacggaatgaagcacctaccatgagattccagatgagcttctcgggctgggtgttgtgcgactggtcccaggcgcgcacggcgatctccttggcgccgaggaggtcgagcacctcgacctcgacggaccagaagcaccagcaccagtgcttgccgtacttggtgggcttctccgggaggtccagcacgcacaccagccatgtctcgccgccgtccagcgtcacctccacccgcgtgatcctcttgccgccgcctaccaaaccacagagacaaagatcaccatcaggcccatcgctccatcattccctgcgccttcaatttcttttttgaagacccttcattttctttttgttaaacaatgaaaattttacagtacttag

SEQ ID NO: 10016 - DNA, 1603 bp, Oryza sativa
  ref <308>: DATABASE ACCESSION NUMBER: AK107364
  ref <309>: DATABASE ENTRY DATE: 2002-08-28
acggagatcagacgcagccaggcggacgaacaggtcctggcctccgttgtcgaactgcctcatgtcaagcaaatcggccgtccacatgaagcaccccttggcgtccgcgctggtgacgttggcactggcgtaggcgcggcacgcgcagttgctcaggcagctgagccggcactcctccaggcccagcgccatgtcaaccgtcgcgttcgccgactccggcagcttcatattcctcgtcacggcgaacccgtcgccgccggtacagttgagcgccgtgcgcctgatgcacccgccggacccgtcacgcagcgcccatgccttggggtaccgcggctcgaacccctccgcgcagccgcacatcggcgactgctcgacgttgcagacgccgtaggcaccgcaggcgcggtaggcctcgcactcgtccatggggtacgacgagaagacgctccacgaccgcgtcgtgtcgatccacatcagcctctggatctgccccgacgagttcatcacgaaccgcgtcaggatcgtcgtgctgtcgtccacctcgtaccggtagtatgcctcgtcggccgtcgacacgtactggtagctcaggagggtgttcgtcctgaggttcggcacgccggagaactggtacccgttccacgggccgctgccgtacgtcctcgtggaccaccggtacaggaaaaactccggcgagccgctcgggtcgatccggaaggagtactctccgggggacgggtcatcggccgccctccacgagttcatgtaccggtcaaggccggtgcggaagtcgatgccaagcttcatgccggggagcagagtgtcggtcgggtagtcaaagctctgccacgcaacgccggcgctggcgaaccgcagcacgaagttgccgttgtcaaggagctgcgcctcggcgctgccggcgctcagcacagaagccgacatcaccggcgacgcccacacgaccctgccttgcccgtccacaatggcaaggctcccattgccgttgatcttgagcgtgggcgagctgccgaccaccgggctctgacgattggcgacccacacgacggtccgcgctaggatgttgctgtaccatatcccgaggtacctgcgccctgccggggcgacgtccggcgtgaagaagccgagcgtgaaggtccctccggccgacacgatcgtccggttgcccgcgagtggagcctccatggtgaccgtatcgacggacgcggccggcgagaggaagaggaagagaacggccgccaacggtagagcgcgccacggccatgtcaccatcatgtttcttttggcgaggcgagttgtctgttcttctaagaacgcgacgcgatgggcgcgcgggtttacgctcgttttgaggagcactcgcgcggcgaggccgtgtgccccttgtgtttcttccttttttgtgtgtgtgttggggtgcggctggatcggcggagttgtgtgggtctggacatgcgctgggccgcactgggatggactcgtgcctcatggccaagacaaggggtccgtccctcgtcttgtttgcgtggccgatgtgcgccaggcttgcgtggttagttgggtggaacgggtcgcgttttggttc

SEQ ID NO: 10017 - DNA, 1388 bp, Oryza sativa
  ref <308>: DATABASE ACCESSION NUMBER: AK107365
  ref <309>: DATABASE ENTRY DATE: 2002-08-28
agttagctctcgtgtaccaccgcgtgaacggctgggacctgccaggctcgtgatgtcgtagtggcggggtgccgggttcgccgcatgtcatcaaagaggggaagggcaacgaggggagacgtatatcgtctcttgctgacgcagccctctcttgtcaatcaatcgcaaccacctccactgtatttgaactgttcataaacgttatacccatcgccttgcttttacgacgtacactacagcgttacacaataccacgatggcggacaccaaagagcaggtattcgacatcccaaagacgtgcagagcgggtgtggtcgtgaacgaggggcccgacttcaccgtcgaggttcgagatgtaccggttcccgagatcaaggacaatgaggtcctgatcaagctcaatgcgacgggtatctgccattcagatctccacttcatgctcaacgactgggcgctgcccaagatgtccgacctcggcgtccagtgtgcaggccacgaaggcgccggagtgattgtcaaggtgggcgcgaacgtgaagacattgaagcccggcatgagggctggcctcaagcccgtccaagatacctgcggctcctgcgagctctgccgaaacggcaacgagtgctactgctccaacgccgtcatgaccggcctcatggtggacggctcctacaaacagtacgttgtgtctcccgagcgctacaccaccgtcatcccagacggcgtctcggacatcatcgccggcccgatcatgtgctcggcctcgacagtatacacatcgatcaaggaatcacagctgcagccaggcgactgggccgtgttccccggtgccggcggaggcgtgggtatgcaaggtctgcagctcgccaaagccatgggactgcggccggtcgccatcgacactggcgcggacaagaagaagctgtgcctcgagaacggtgcggagacgttcatagattttaaggaagtggacaagatggcagaggagatcatcaagatctgcgacggcatcggtgcccacgccgtcttcgtgacggccgtgcagtcctacccgcagtccatcacgtacctgggcagcagagtagggggcaaggtcatgtgcatcggtctgccgcctgcaggtacgcagcacatcgacgtggacccgaaccagatgtgcttccggaagcagtcggtgcagggcacgctggtgagcagcatgggggacgtggacaagacgctgcagtttgcgcagcgaggcctgctgaaaccgatttgcaccgtgtacccgctgagcaagttcaacgaggtggtgcagaagctgaggcgaggagagattgcgggacgggcggtgatagacttcaacactgagtagatgcatgtacgaattgtgaataagttgaaacgcg

SEQ ID NO: 10018 - DNA, 1642 bp, Oryza sativa
  ref <308>: DATABASE ACCESSION NUMBER: AK107366
  ref <309>: DATABASE ENTRY DATE: 2002-08-28
gtcgctcataccttcgaacaatcaagcttcgaaatctgagatcttaacaccttacttccacaaaccgacactttacaaccgacatcatgggtaaagagaagactcatatcaacgtcgtcgtcatcggccacgtcgactctggcaagtcgacgaccaccggacacttgatctacaagtgcggtggtattgactcccgtaccattgagaagttcgagaaggaagccgccgaacttggcaagggttccttcaagtacgcatgggtcctcgacaagctcaaggccgagcgtgagcgtggtatcaccatcgatatcgctctctggaagttcgaaacccccaagtactacgtcactgttatcgacgctcccggtcaccgtgatttcatcaagaacatgatcactggtacctcgcaggctgactgcgccattctcatcattgccgccggtactggtgagttcgaggctggtatctccaaggatggccagacccgtgagcacgctctccttgcctacaccctcggtgtcaagcagctcatcgtcgctatcaacaagatggacaccaccaagtggtccgaggagcgtttccaggaaatcatcaaggagacctcttccttcatcaagaaggtcggctacaaccccaagcacgttcccttcgtgcccatctccggtttcaacggtgacaacatgattgaggcctctcccaactgcccctggtacaagggctgggagaaggagaccaaggccaaggctactggcaagacccttctcgaggctattgacgctatcgacacccccgtccgtccctccgacaagcccctccgtcttcccctccaggatgtgtacaagatcggcggtattggcacagtccctgtcggccgtgtcgagactggtgtcatcaagcccggtatggtcgttaccttcgcccccgctggtgtgaccactgaagtcaagtccgtcgagatgcaccacgagcagcttcccgagggtgttccgggtgacaacgtcggcttcaacgtcaagaacgtctccgtcaaggagatccgtcgtggcaacgttgccggtgactccaagaacgacccccccaagggtgctgagtccttcaacgcccaggttatcgttcttaaccaccctggtcaggtcggtgctggttacgctcccgttcttgactgccacactgcccacattgcctgcaagttcgccgagctcctcgagaagatcgaccgccgtaccggcaagtctgtcgaatcttctcccaagttcgtcaagtctggtgatgccgctatcgtcaagatgattccctctaagcccatgtgcgttgaggctttcaccgagtacccccctcttggtcgtttcgccgtccgtgacatgcgtcagaccgtcgctgtcggtgtcatcaagtccgtcgtcaaggccgacaagggtgccggcaaggtcaccaaggctgcccagaaggccgctaagaaataagcgatcacatttcgtgtggcttattcctttcatccaaaagtctctagatatccgcttctggggatgtggtggcttgaggccattatgagttatggcttatgatgcataatggggttcgaaggttggcgttgtccttccgtagatttagttatgataaccaataaatccatggtttggac

SEQ ID NO: 10019 - DNA, 2205 bp, Oryza sativa
  ref <308>: DATABASE ACCESSION NUMBER: AK107367
  ref <309>: DATABASE ENTRY DATE: 2002-08-28
agctagccaagaacaataagcaacttcatagtgtcctagcaacggcgtcaccggccatggcttccggccatctcgtcgccgtcgccgtcgtcatcggctcgctctgcgtcgcggcagtcggtcaggggaacaatatcgtgctcccgttcgcgccgtcgtgctcgaccgccggcaactacaccggcgacagccagtacaagaagaacctcgaccagctattcaccactctctccgccggcgccatcgccggcgactggttcaacaccagctcggtcgggacgggcgccgaccaggtgttcggcctcatcatgtgctacgccgaccgcaactcgacgcagtgccaggaatgcctcgccggcgctccggccgggatcgtgcaggtgtgcccgggaagccgaacggcggacgccaactacgacgcctgcctcctccgctactccgacaagtccttcttctccgagctcacctacggcgccgaccccaccatcgcctggaacgtctacttcacccccttcgtcgacaacatgaccaccatgaacgacacgcggcggcggctgatgagccagctcgccgagagggccggcgacaccaagctcaggctggacaacggcagcttgccgtacgccgactcgaagctcggcacgtcggcgttgtacgggctggcgcagtgcacgagggacctggcggcgagcgagtgccggaggtgcctcagcggctacgtcgacgacctcagcaacaccttccccaacaacagcggcggcgccattaaggggtacagctgctacctcaggtaccatctttggccgatcgacatcacgctgccgccgccgccgttgccaccgccgtcgcggcctccgtcgtcgtctccggcaccgccttcacctcctccctcggtgtcgggaggactcgtggccggatcgaccgtcggcgccgtctcgttcttggtggttcttggtgtctcaatctggctcctcttgcgccggcggcggaagcgcgccggcgaggcgagggagctggagatggacgagggcgacttcttcgacgatgaggccgatgactttgagaaggggactggtcccaaacggttccactacggcgagctcgccatcgccaccgacgacttctccgacgagcacaagctcggtgaaggcgggttcgggtcagtgtacagaggattcttgaaagagttgaaccttgacgtggccattaagagagtgtccaagagctcgaagcaggggaggaaggagtacgcgtcggaggtgcggatcatcagccgcctccgccaccgcaacctggtgcagctcatcggctggtgccacggcggcggcgagctcctcctcgtctacgagctcatgcccaacgccagcctcgacacccacctctacagcgccaacgccggcgtgctcccatggccactcaggcacgagatcgtgctcggcatcggctcggcgctgctgtacctgcacgaggagtgggagcagtgtgtggtgcaccgcgacatcaagccgagcaacatcatgctcgacgccgccttcaacgccaagctcggcgacttcggcctcgccaggctcgtcgaccatggccggggctcacacaccacggtgctcgccggcaccatggggtacatggacccggagtgcatgatcaccggcagggcgaacgccgagtccgacgtgtacagcttcggggtcgtcctacttgagatcgcctgcggccggcgaccgataatggcggaccaccaatccgaggtagacgaagaccggatccacattgctcagtgggtctgggatttatacggcaatgggaggattcttgacgccactgaccggcggctcaacggcgagttcgacggcggggagatggaggctgtcatggtcgtcgggctctggtgcgcgcaccctgaccggagcctgcggccaacgatcaggcaggccgtcggcgtgctgaggggcgaggcgccgccgccgagcctcccggcgaggatgccggtggcgacgttcctgccgccggttgatgctttcaaccacacatcatcttcagttgcgacaggaagcagcagcgccagcacagacactgctcggtcgtccaggacgaccgagacatcttccttgctgaaatgacacttgagcaatgacgttttttatcagattaattaactgcaaaaatgaattgattttgacaggagcatcatacctgtttttgact

SEQ ID NO: 10020 - DNA, 1662 bp, Oryza sativa
  ref <308>: DATABASE ACCESSION NUMBER: AK107368
  ref <309>: DATABASE ENTRY DATE: 2002-08-28
acaccagccaggaatcagaagccagaagcagcaacgctcgctctgattctttctttcctcctcgagctaggaagtagttttaatttggtgtgatcgatggcggcgatgatggcggtgacgacgatggtgacgaggaacaacgccgtcggcggcggcgcggtggcggtggtggacaggaaggggtggttcgtcccggaggtgtcgttcccgtggagctcggtggaaggggagtgcatcaacagcagcagcaagaggttggagttccctcgccggacggctgcgccgccgctgttcgccagcgtcgggctcagcttgccgtctgcggcgaagggccgggacaactgcgacgtcgcgcggcagctcgccgccgcggaggccgaggaggcggcggggaagaagaggcagggcaggaagatgaagggcggcggcgggctgctgtcgctgaggaaggtgagggtgaagatcgggaacccgcaccttcgccggctggtgagcggcgccatcgccggcgccgtgtcgcgcaccttcgtggcgccgctggagaccatccgcacccacctcatggtcggcagctgcggcgccggctccatggccgaggtcttccgctggatcatgcgcaccgagggctggaccggcctcttccgcggcaacgccgtcaacgtcctccgcgtcgcccccagcaaggccatcgagcatttcacctacgacacggccaagaagtacctcaccccggaggacggcgagcctgccaagatccccatccccgtccccctcgtcgccggcgccctcgccggtgtcgcctccaccctctgcacctaccccatggagctcgtcaagacccgcctcaccatcgagaaggacgtgtacgacaacgtgctgcacgcgttcgtgaagatcgtgcgggagggcgggccgggggagctgtaccgcggcctggcgctgagcctgatcggcgtggtgccctacgcggccaccaacttctacgcctacgagacgctgcgccgcctgtaccgccgcgccacggggcgcgccgacgtcggcccggccgcgacgctgctcatcgggtcggcggcgggcgccatcgccagcacggccaccttcccgctcgaggtcgcccgcaagcagatgcaggtcggcgccgtcggcggccggcaggtgtaccgccacgtgctccatgccatgtactgcatcctccgcggcgagggcgccgcgggcctctaccgcggcctcggccccagctgcatcaagctcatgcccgccgccggcatctccttcatgtgctacgaggcgctcaagaaggtactcgtcgaggaggaggcggcgccggagctggaggcggagtgcgcggaggagatcaaggagaaggttgcgtgaagtggtttgggctcgccggcgccggagaagatggtggctgattgtgcatgggtgtgatgatggaagcatgcaagaaaagaagaaaaaaaagaagcaaaaaatggagagaagtttgtggttgctgtggtttgaagttggatgaatcatcgtaggattcgatttcctctgttcaggaggcatatggtgtgttttcaatgaagtgatgcatttcaagtttgttttcaatatatctatgtattgcatttcaagtttgttttcaataaaatctatgtatttccagttcaattt

SEQ ID NO: 10021 - DNA, 1361 bp, Oryza sativa
  ref <308>: DATABASE ACCESSION NUMBER: AK107369
  ref <309>: DATABASE ENTRY DATE: 2002-08-28
gtcactgcagtgcctttgagctttcgttctctagagtgtctagggtgaatcttgagcgagtgagcgagcgatctctgtgttgtgtagtttgtgagctagggtgatggctaacaccggacttagcatccccatggtgaatggtgccacaatccacctcctccctggtttccggttccgtccaactgacgatgagctagtcatcaaatacctctacccccgtgcttttcatgtgccactgccctgtgcgatcatcaccgatgttgacatccatcatcacaacccctgggacatcgtcccagtggcggagagggagaaagggaagcacttcttcacaagaaaggaggtcaagtaccctggtagccgccgtagcaaccgtgttgctggtaatggcttctggagagcagcaggctcggaggtgcccatctattacaaaccagaaggtgctgctaacgacatgctagttgggatgaggcggactctagtgttccactacggaaagtcacgatctgcagagcgcactgaatgggccatgcatgagtttcagcttgctggtgctggtctccttcctcaccctatgatgaggcatgcaaccagcaatggttcagagccaccctgtggctgccttgaagcgacaatcgctaagaaaagtgatggtctctctgcaactcttcgtgccaagcgtgattctgcccctcttatgagaatcatggtagaacccgatagctcatgggtgatctgctgcatctacaagaagaggcagcgtgccccgcctgttgttatccctcctgtcattggcgatgtaggggaagctatcatccctcatgctattggcgatgcaagggaaggccaacttcacttcattgacttcctggggcagccagctcgcaatgatccatcctcgccccatagctgcaccattgacccctcctctttggaggaagggagtgatgagtctgccggtgatggtgaagataaggatggtgatggcatgaatgaagcaaattgatcgagtgtgaaggaagtgaactgagtctcaagaataaaaactgcaagtatggcgctccattccatggaagacctgcatgcatcctatatatgtgcttttatgttcaagttggagaactatgtgtgttgtctttaagttggagtactctaagctattcgatctggagattatgctgtttttaataaaagtttgaagtgtatctgtcctgtttaattagtttcaagaaagccaagcgtgtttgggttctaggatgaacaaagtcgtccaagatgcaagaagttctagagaggtagctacatttctggaaattgttgcatcttcctttcttcaatatatatatattgtcctatttcat

SEQ ID NO: 10022 - DNA, 1610 bp, Oryza sativa
  ref <308>: DATABASE ACCESSION NUMBER: AK107370
  ref <309>: DATABASE ENTRY DATE: 2002-08-28
acgacaactcgcaccacacaccaccaccatcaaactccttgcatttctaccaacgatgcggcacgcggcgctgctcggcgtgggcttcgcgctctgcctcctccgcgcgcaggcgcagccgtacgactacccgacggcgaagccgtccacgacgtgggcgaacaccgacgccgcgctgcgccaccacgtcgcctacaccgacggctccgtggcgcgcgccgcgctgctgcgcctcaacccggcgcgcctcggcccctccttcgccttcggcttcttctgcaccaaccaccgcgccggggcgccgtgcgccgacttcctcctcggcgtcgccgtcgtgtactgcaacagcggcgccgggatcaccgcggtcaccaccggcatcccgcaggtggtgtggtcggccaaccgcgccgcccccgtcggggacggcgccaccgcggagctcacggcggacggcgacctggtcctgagatcgcccggcggcaaggtgctatggtcggccggcgcggcggggcgcggcgtctccgggatgagcatcaacagcgacggcaacctggtgctgttcgacgggagcaaccggacggtgtggcagtcgttcgaccacccaaccgacacgctcgtcgtcgggcagtcgctgaagcagggcgcacggctcaccgccaacgcgtcgtttgacaactcgtcggagggcaggatatacctcgccgtcgccgacgacggcctcgccgcctacgtcgacgccaagccgccacagcgctactacgtccttggctacagcaagaacgccggcgcctacgcggcgtacaccaacggcagcctcgccgtgctcgaccgccccggcggccagcagctggccaccgtccagctccccgccgtcgccgccggcacggtgcagtacatgcggctggagcacgacggccacctccgcctctacgagtggcgctcgaacgggatgagatgggaggccaccggcgacgtgctccacccctaccccggcgactgcgcgtacccgacggtgtgcggcgcgtacggcgtgtgcacggacatgcagtgcagctgccccgacgccgccaacttccgggcggtggacttccggcggccgaaccgcggctgcgtcccgacgtcgccgccggcgccgccggcgacatgccgttcccggcgcgcgcggcaccggctggtgtcgctgcgcgacacggcctacttcaacagccacgacaccagcatgcggacgctggagagggtgggcgaggcggcgtgcaaggcagcgtgcttgggcgactgcgcgtgcatggcggcgcagttcgtgtacggattcgaccccaacgacggcttctgctacctgcagtcggaggtgttgtcgctggagacgatgcagccggaggtgtttcactacaactcctccatgcatatcaagattgcccagggcaggttgccaagacgattctgatcgcctttttacagtctactatactatatcaaggaggagaaatccttgtaaatacatacatgaataaattcacgagaactagctaggattctcgattcatatgtttttgtattcaacatttgtttgtgggttttaacaaaatataaagaaaacattttttttt

SEQ ID NO: 10023 - DNA, 1894 bp, Oryza sativa
  ref <308>: DATABASE ACCESSION NUMBER: AK107371
  ref <309>: DATABASE ENTRY DATE: 2002-08-28
gattcccccttctcctccacaccaccgcgcctcactagcctcgtgccctcgtagctgccctcgcgcgccaccaccatgccgtccgccatgaacatgatcaccgccgccttccgccgatacctcggctgcttctccgccggatcaacccaccgccgccgccgcggcgccgctgaacccgtcctcgccggctcacttacacttcccgccgccgccggcggtgacaacgcggccaggcgccttgatgtcgtcgtccccgcccccagccgccctgatggtgtcactgtgagcggcgaagatttcatcggtagccttcctggccatgtccgctccgccatcgtgtcgcgcctcccggtcgcggacgccgccgctcgcaccggcgtgctgtcgtcgtcgcagtggaacgggctctggtcgtcgacgccgctcgtgttccaggactccgacctcatcctcgccgcgaacttcaccagcgtggcccccgtcgccgccaccgtgtcccgcgtcatcgagaaccacccgggccccttccacaccgtcaccctgaccagctacttcccggagtccgagcgggacaccttcgccggctggatccgcgccgtcgccgccaagggcgtccgcgacctcaccctgcacaacatcccctggtcgggcctccacgtgctccccgccgacctcctccagtgctgcgccgccctggagcgcctccgcgtctgcgtctggcggttcccggccacggccggcgtcctccaccccggcggcggcgacggcgacggcgccgcgccgccgtcgttcccgcgcctgagggagctcgtcctcaacaggagcgccatcgaggaggccgacctggagaacgtggtggcgtgcagcccggcgctgcggacgctggtgctcgccttcagccgtggcgcgccggggcgcgtccgcctcgccagcggcagcctccggtgcgtcgtgctgtgccagtcgctggtggacgagctcgccgtcgtcgccgcgccgctgctggagcggatcgtgctgcggtggtgcgcgtcgggcacccaccacggtcacctcatgaggatcaggatcagccgggcctcgtcgatcaaggcgattggttacctcaaaccaacctgtcatggcctgcatattgatgccactgttataaagcctgggataacggctagccccgatgaagtggctgttccaagcgtcaagatattgggtttacaagttcgatttggagttgctgcggaagcaacgatggtgtcctgcatgctcagatgttttcctaacgttgaaacgctgcatatcatgcctatcgaagatcctcagtctacccagcttgatgactttgagttctgggaggagatcaattcagttgaatgtgtcagatccagcatcaagaaggtagtgttccatgggttctcctggaagaattctgagatagcgttcatcaattccatcgccgaaggaggactggtgctcgagaagatctgtatcttccagagtcgacatggtgctgccccagatgatgatgaactgaatgctaagctgagcatggtagcttctctgaacatcggccttggccgtacagagatcatattttcaggtgaagatccaacctggtgctatagggcggcggctgatctttctcgtgctgatccttttgattgctgccgttgaagatcgatgtctctgtgctttgatcatcttcgtactatatatacattttgtgcttcagaatgtcacacagtctgcaaaggttgctcaaggtagttatatagcgaataaatatgtgacatctggaaattttatcatgtgtgtgtaccagttaaattctatcctgtggtattaataaatggtactggcgaggcagtgtgcaacgctttgtactgctggattgtgtttt

SEQ ID NO: 10024 - DNA, 1382 bp, Oryza sativa
  ref <308>: DATABASE ACCESSION NUMBER: AK107372
  ref <309>: DATABASE ENTRY DATE: 2002-08-28
gaaaaatcatccgaatcctctcctcctacctcactctcctcccccaaatcacacggcactacagccctccccgtcgcctcctcttacctcagtctcctcccccaaattagacggcgttgtagccctccccgtcgccgtcgcccactgctcaccggagccggcggccgccgccgcgggggaggccgcgacgacgaggagctcggcggcgagcgcggtgagtgagagggagagcgggagcggggtgcagtggagccggaacggggtgcggttgcggcgacatcctccatggccggcagcaagcggatctgctacagcgtcggtgatgaagacctccacggctggcggtaggggtgcgccgagcacgtcgtcgtccacagccggctgaggaggctggggaggcatggtacaaggtaggcaccagatctgtcgcctcctcttcctccgccgccgccccactgctcgacctcctcgaccccgcgactcctcctcctcctcctcctctctcttggggtatcacgctgatacccaggtaccaaggtctaatacctaggtactagcttgatacccagggtaccaggtatcagtcgataccagggtaccaggacctctcgaccccgcgactcctcctcctcctcctctttcttggggtatcacgctgatacccaggtaccaaggtctaatacctaggtactagcttgatacccagggtaccaggtatcagtcgataccaacgtaccaggggtaccagctaccagccgataccagtgtaccaggtaccacctcggtaccttacccaagataccaggaggatttggcggtgaggtagctgctactttgggtgctcaggggtgacgacgccgacgaggtatcacccgagcacgcgataccgaggagaatttttggcggtgaggtagctgctacttcagcaatgacgccggcgaggtaaggtagccactgctccggtgacgatactgagcaggcagtggctaggtgtcgagacaaatcacgagttctgtggggtgctcctttatgtgccgatcggctgccagcctggtgctcgtgataaccaggaagtccaacagttgtcgttgcttttttaattatcccgtgagtgcactatttccacagtatcccgtggggtagcagccctctaagtagtataggaatttctgatagtgactagaatatccgacacatataataggaatatccaacctgctccggctttatgttttcgcattaagttcaaaattagtgtgttatcatgcatcacttttcaatacaccattacactttattctaaaattggcaaaattaatgctcgatgtaagataaatatagtaaataactgaatttttaatggaggctaattcagttgtttt

SEQ ID NO: 10025 - DNA, 1565 bp, Oryza sativa
  ref <308>: DATABASE ACCESSION NUMBER: AK107373
  ref <309>: DATABASE ENTRY DATE: 2002-08-28
tggtgttactgcgaaggggggacggagaaggctatatcagccgggcgacggttgtcccggtttaagcgtgtaggtgtgtgttccaggcaaatccggttcactttacactgaggcgtgacgacgaggcactacggtgctgaagtgataaatgccctgcttccaggaaaagcctctaagcatcaggtaacacaaaatcgtaccccaaaccgacacaggtggtcaggtagagaatacccaggcgcttgagagaactcgggtgaaggaactaggcaaaatggtgccgtaacttcgggagaaggcacgctgtcggtaggtgaaacccctcgcgggtggagctgaaggcagtcgaagataccagctggctgcaactgtttattaaaaacacagcactgtgcaaacacgaaagtggacgtatacggtgtgacgcctgcccggtgccggaaggttaattgatggggttatccgcaaggagaagctcttgatcgaagccccggtaaacggcggccgtaacaataacggtcctaaggtagcgaaattccttgtcgggtaagttccgacctgcacgaatggcgtaatgatggccaggctgtctccacccgagactcagtgaaattgaaatcgctgtgaagatgcagtgtacccgcggcaagacggaaagaccccgtgaacctttactacagcttgacactgaacactgagccttgatgtgtaggataggtgggaggctttgaagcgtggacgccagtctgcgtggagccggccttgaaataccaccctttaatgtttggtgttctaacgtaggcccgtgatccgggctgcggacagtgtctggtgggtagtttgactggggcggtctcctcccaaagcgtaacggaggagcacgaaggttggctaatcctggtcggacatcaggaggttagtgcaatggcataagccagcttgactgcgagagtgacggctcgagcaggtgcgaaagcaggtcatagtgatccggtggttctgaatggaagggccatcgctcaacggataaaaggtactccggggataacaggctgataccgcccaagagttcatatcgacggcggtgtttggcacctcgatgtcggctcatcacatcctggggctgaagtaggtcccaagggtacggctgttcgccgtttaaagtggtacgcgagctgggtttagaacgtcgtgagacagttcggtccctatctgccgtgggcgctggagaattgaggggggttgctcctagtacgagaggaccggagtgaacgcaccgctggtgtccgggttgtcacgccagtggcactgcccggtaactaagtgcggaaaagataagtgctgaaagcatctaagcacgaaacttgccccgagatgagttctccctgagcctttaaggctcctgaagggacgttgaagacgacgacgttgataggccgggtgtgtaagcgcagcgatgcgttgagcttaccggtactaatgacccgtgaggcttaacctgttcagatattaccgtggcagtgtaattgtatacgagtctataatgtatatagctttttatgtat

SEQ ID NO: 10026 - DNA, 1579 bp, Oryza sativa
  ref <308>: DATABASE ACCESSION NUMBER: AK107374
  ref <309>: DATABASE ENTRY DATE: 2002-08-28
atctgccacggcggcccattcctcccgcacgacgcacgcggctccgaccccgtccactggctggtctgcactctcccatctcacgccaccgcgcgacgcgaccaattccacggcctcctcccggctcccacaaaaagcgatgccgcctgccgccaccacgaaacggagcgccacataagtcgtgtccgtccactcacccacgccaccgccaccgccacgcatggccgctccgccgtgcccgccgcggcggcccatctccgcgccgtgcttcctcctctgcttcctcctcggcttcgtcgcgggcctcttccccttcgcccaccgccacctccacctcgacctccacctcccgctccctccccctgcgaccgccatcctcgtcagggaggacccgccgtccgtcgtcgtcgacgtcgacaccccgttgccggcggcggcggaggagcggaagctgctgctggtcgtgacgccgacccgcgcacgcccgctgcaggcgtactacctgcgccggctcgcgcacacgctccgcctcgcgccgtccccgctgctctggctcgtcgtcgagtccggcgccgccacgcgcgacacggccgcgctcctccgcggctgcggggtcatgtaccgccacctctcctcccccgtccccgacgcgccccaggatcgtccccgccgccgcggacggaggcaggaccgcccggctgttgacagccgcgcccgccagcggaacacggcgctggatcacatcgagcaccaccgcctacacggcatcgtctacttcgccgacgaggacaacgtctactcccttgacctcttctaccatcttcgcgacattaggagttttggaacctggcctgtggcaaccttgccccccgggaagagtaagacgatactacaaggaccagtctgtgaaggtagtcgtgtggtgggatggcacacaacagataggagcaagaatcagaggaggttccatgtagatatgtctggttttgcattcaacagcagtaagctttgggacgccaagaacagaggtcatcaggcctggaattacatccggcagctcgacacggcaaaggaggggtttcaagagacggcatttatagagcagcttgtagaagatgaaactcatatggagggcgtacctcctggttgttcaaaaattatgaattttcatcttcatctggaagacaagaatgccatctacctgaacgggtggcaaaccactcaaaacctggatgtaattattcctttgaagaaggaagcaaggcccctactatagctccttgcttaccttgcagatcctcttttcgatgtggctgaagagaaggaatgtatttcaagtcataccagggcgccacagaaactgaggtggttcatatataccagagtgccatagaaactgaagtggttcttttggcttgtcatcttatcgaaagtcagataggatggtttgtggattaggtgtacatacaacataaacacatgaagaaatctgcgcttacttttcacatctaacatgtaaagatgctaatcctgatggcaattttgtttattctaaatccttagtggctgtctgcccctt

SEQ ID NO: 10027 - DNA, 1188 bp, Oryza sativa
  ref <308>: DATABASE ACCESSION NUMBER: AK107375
  ref <309>: DATABASE ENTRY DATE: 2002-08-28
gaagcaaggcgcttaggcgcacgcacgcacgcacatctctcgagcccctcaccctccccttcttcctcctccttccgccgcattgctcgtcgccggcggcgaccaaccctacccctctctctccctctcgagcggcggcggaggcggtttccggtagtggcggcggcggcggggacaggaagaagccatgtgcgatttggtggcgagaacggggcggcaccagcagcgctacgagcatgggcgtcgactcgtggccgggtgcataccttttagatataaagataacaatgatgaaacttctgatgatggacacaagaaacttgtggaagttctcatgatcaactcccagagtggatctggtctcctatttcctaagggaggatgggagaatgatgaaactgttgaagaggcagctgctcgtgaagctattgaagaagctggagttcgaggagatttagtgcaattattgggcttctacgacttcaagagcaagacgcatcaagacaagttctgccccgaggggatgtgcagagctgcggtgttcgcgcttcgagttaaggaagagcttgcctcctggcccgagcagagcacccgcaagaggacctggctcactctcagtgaggcggtggagcggagccgttacccatgggtgcgagaggcccttacaacgggtttcaccacctggcatgagaactggagcaacggggacgaccatgtcgacccaagttcaagatgaccgcacctcaagcatcagggccaggggtcatgctctcttttaccatgctagtggtttcagaaacatgaccacttcggcgtatgtgtgctccctgatgcttcagtagttccgatcgccctatattactacctaggatgggaccaatcttagttctggaaatgtcgagatgggaccaatcttagttctggaaatgtcgagaatcgctggaattgtaagttttaattgattctcgctgctaccattatcagtcctcttggttctttatttctttttacaccatgcagtatcagctggtgtgttgccccttgtgtgtgcgcaaaaatacctgaaatcaaagaaggctttgtggatcaatgtgctgcaatgctccttctgagttggcttgttcgtgagcactggtctccaaaagaatattgcagaaagggggtaaagaaatcctgatgttctttgtc

SEQ ID NO: 10028 - DNA, 1360 bp, Oryza sativa
  ref <308>: DATABASE ACCESSION NUMBER: AK107376
  ref <309>: DATABASE ENTRY DATE: 2002-08-28
acacaccacctatcacagcaacacaagccaaccacaaagaattctcatttccggtaacttttctcaagcctttttggcgctctgagaatcatcacacggaagtcaagcctttgttgttgtcgtgattagtttagtttagtcaccgagatgagctcccgaatggccggagcgacgctgctgcgccacctgggcccccgcctgttcgccgccgagcctgtgtactccgggctcgccgcgagcgccaggggcgtcatgcccgccgccgcgaggattttccccgcgcggatggccagcaccagcagcgccggcgcggacgtcaaagaaggcgcagccgagaagctgccggagccggcggcaacggcggcggcggcggcgaccgacccgcagaacaagaaggccgtcgtgagctactggggcatccagccgccgaagctcgtgaaggaggacggcacggaatggaagtggctcagttttaggccatgggacacgtacacgtcggacacgtcgatcgacgtgacgaagcaccacgagccgaagggcctcccggacaagctggcgtactggacggtgaggtcgctggcggtgcccagggacctcttcttccagcggcggcacgcgagccacgcgctgctgctggagacggtggccggggtgcccgggatggtgggcggcatgctgctccacctgcgctccctccgccgcttcgagcagagcggcggctggatccgcgcgctgctggaggaggccgagaacgagcggatgcacctgatgaccttcctggaggtgatgcagccacggtggtgggagcgcgccctcgtgctcgccgcgcagggcgtcttcttcaacgcctacttcgtcggctacctcgtctcccccaagttcgcgcaccgcttcgtcggctacctcgaggaggaggccgtgagctcgtacaccgagtacctcaaggacctcgaggccggcaagatcgagaacacgccggcgccggccatcgccatcgactactggcgcctccccgccgacgccacgctcaaggacgtcgtcaccgtcatccgcgccgacgaggcgcaccaccgcgacctcaaccatttcgcatcggacatccagcaacaggggatgaagctgaaggatacgcctgcgcctatcgggtatcactgatcatcattcatcaacgggcgatgcctgctcagttcatcaccatcactgctactacatgcgtattttacatcctatttgggataaactttgttctgtgtatatatgtaaataagctattgtcactccgttttatgcctgtacctatatgcatgctgagattatgcaaattgtgaataacaatatagtaagatcttttttggagtag

SEQ ID NO: 10029 - DNA, 1620 bp, Oryza sativa
  ref <308>: DATABASE ACCESSION NUMBER: AK107377
  ref <309>: DATABASE ENTRY DATE: 2002-08-28
actgcattgtagtgccaatgcgcgtcgcatcctagtcggagcaaaggcacaaaggcacaggaggcagaaagcaatgcgaagagccactcacgtgtggtacaacacctttcgcgacactggctaaaacctaatccttcttcaccgccgccgacttcacccaatctgaccgccgcctggcgcatacagccctgtcaacatgcccttcgggcgtctgagtccagtcagcgagtccgtcagcgagactgacaccgagagcttgtactctggtcgccccatctctggcgatcttcaaccacgccatctcaacttctcccgcccaaagccacaggaccttccatcttcccgaaacatccagcgcgacatccactatgctgcttcaacttcttccgcctccagcagcaccacagccggcagcacacgcggcgcaggcgctttctacgagccttcgacgcatgactaccctacagagccgcgcttctcagacgactccgacggcgagggtgaggatggcgacagtatagctccttccacccgctccgccggttcggatctagtatgggacaacgccgccggtgaacttcgctcccagcaaactggcctgcgtcgaaacggcgactttgatgctcagcactacgcggccccgacaccgcgccgcccaggcaaccgcacatttttgagtgacagctctgtggttgacccagaactcccgctgatccccgaactgcccggggatgtaccttcgtctcacatcatcgcccaacaacggcagaagcagcaccagcagcagcagaaagagaagaaacagagagagtatctcaagcaaaaagaagacttcaagcagagggatgtttcaaagcagcaagaggacctcaagccgacctacggcaatttccaggtcgaaagcgcgcctcgcatcgtcaaaagcacatccgtcgaacagcagatcgagcgcgccaacagcctctcttccatccacaccgcaaacaccgcacaaacgcagaccagcctcggcagggtcgccggctgggaagattctcgcagcaaccacacgccgtcggagagtggggacaagaaagattggaagagttctgagttcgacattagtgggctgagcgagaagaaactcgcgaagctgaagaaaaagggcatcaacccgcaactgtacatggagatgaaggctgcaagaggaggaaaaggaaaactagtcggcccgctggttggcaacacgtacattggatgagcacgaatatgccacggctggtgcacatttggagtaggcgtgctccaggttagagcacatcgagcgccatccatccgtggacatcagacgtaattcggcgcatttcaagcacgtgatgaccattggggtgatacatgaggttgtacaccaattaccgatacaagggtcttgaagagcatgttgcgttattaatgaagactgatctgggcagagagaccaggtggaacctgggaatcagctcgtgtaagagacgacaagaaggctcttgcttggacatcaggcgaagtgccgctcacgatagaaatgatatacgcaatagtaacgagcaatattaatagttgtgattgtgaagatagtttgattgaaaatatttctctgtc

SEQ ID NO: 10030 - DNA, 1217 bp, Oryza sativa
  ref <308>: DATABASE ACCESSION NUMBER: AK107378
  ref <309>: DATABASE ENTRY DATE: 2002-08-28
gcttaagcaccaccgcactacaccgttacctctacatttaataccacccgccggaaaactaccaaccaccaaccataatactccaagcaaccgcaaataccacccacaactccgcaatcatggctgtccgcgcagcattcgaaaactccaacgaggtcggtgtcttcgctaccctcaccaactcctacgccctcgtcgccgtcggcgcctcagagaacttctacagcatcttcgaagccgagctccaagatgtgatccccatctgccacaccaccatcgccggcacccgcatcgtcggccgcctgaccgccggcaaccgcaaaggcctgttggtcccgacctcgacgtccgaccaggagctgcaacacctgcgaaacagcatccccgacagcgtcaagatccagcgtatcgaagagcgcctctccgccctcggcaacgtcatctgcgccaacgaccacgtcgccctcgtgcacccggacctcgagcgcgagtccgaggagatcatcgccgacgtcctcggtgtcgaggtcttccgccagaccattgcggacaacgtcctgaccggcagctacatgagcctcagcaaccagggcggcatcgtgcaccccaagaccagcatccaggaccaggacgagctgagctcgctgctgcaggtgcccctcgtggccggcagtgtgaaccgtggtagccccgttgtcggcgccggcatggtcgtcaacgactggatggccgtgactggcctcgacaccaccgccaccgagctcagcgtcatggagtccgtgttcaagctcggcgagggcaacgcttctggcgcgatcaacaccacccacaaggaggccatggtcgagtctttctactagatctggaatatacactacggatttttatggaacggactccctttttttttgttttctcgactggtctatcatttcttcatcgttacttctacaggcattgagcgcggcgttggcaagggtcaggcagtggcggccgcagaaggagatcgcgggtggtggtgataaatgcacgtccggtgcgctagaaatgtggtgaaatgcaaggctggaatagcatgggttgaggtaggagaacgacacatggctttgtgcaggggcgtctcacctgcacattgcaacggctcagaagttagagcggtggaaaagtttgcatgatctcacgaagttgatagagtaactacgagaaagagaacggat

SEQ ID NO: 10031 - DNA, 1565 bp, Oryza sativa
  ref <308>: DATABASE ACCESSION NUMBER: AK107379
  ref <309>: DATABASE ENTRY DATE: 2002-08-28
agtgtgagcagcagcttcatcacaccgagctcgcaaaaaacacaatcaatcgatccccaattcgatccccatgggcgccgcgatcagctgctgtggctgtcctcctcgccgccgtgcaggcgcggccgacgacgcggcggcgggactcaccgacgacatcctcgccgagatcttcctccggctgccgccgcacccggcctgcctccgccgcgtctccctcgtcagccgccggttccgccgcgtggtcaccagccgccgcttcctccgccggttcagcgacctccacggcggcgcgccgggggctcccctcgtcggcttcttcagcaaccacaaccatggcccctgggcggacacccgcttcatccctgtcggcgtcgacggcaccggggacagccgtcggagccgctgccgcagccgccgcgccaccgcggcgcgtaatcccggcggggtgctcgccctgggcgacgacgccgagtggcacgtcatcggctgccgcggcgggcgcgtcctcctcctcagccccacgcggctccgcctcctggtgctggagcccatgctcggccgccgccagtacatcccggcgccgccggcgccggagtacaggccggcatacttcagcaacgccgccgtggtctccgccgcggggggccacgacgagctccgcctccggccgcacctgttccgcgtggtgttcgtctcgagcaacgccgccaccaagcgctccaccgccttcgtctacaactcggcgacgttccggtggaccaaggcggcggcgacagagatgtcgtcggtgatcgacggccggccgagcgtcctgatcggccagaccctctactggcacctcatctcgcacggcctcgtcgcgttcaacctggagacgcacgagctgcacgagatcctggtgccggccgacgcgttcgacgacgtgcacgatgccaacctgagcatcgtcgtccccaggagcggcggcggcggagtcggcctcgccgcggtgtccgggtacatcctccagctctggacgctgcgcgactacacccacggcgcgtccacctgggacctgcgcaacatcgtggtgctggacgcgctgctccccctgcgcaacgctcggctgccgccgccgccgcagctgccggcgtcggcgaagccgatgcctctggtgtggttgatggcgctggacgaggatgagaacgtggggtacgtgtggaccgcggctggggtgttcgctgttcagcttgacaccatgaattaccacaaggtgcttggacctgtttgtagggggatgcaattcgtttttccctacaaaagcttctttctccctcaaggtggaagtgcagccatgattatgtaattctactccttcctgggaaaagtggcaatggcaaggtgatgacgtgagaataaccgagattttgctcattaagctaatatataataggctggctgaaaactctcggaattagatgatttatttaaagtaatttgttgttgtttgatgagaccttaattaattatagtaagatgcacttttctgtaattaacatgtgtgcttcggtatttgcttctgc

SEQ ID NO: 10032 - DNA, 2282 bp, Oryza sativa
  ref <308>: DATABASE ACCESSION NUMBER: AK107380
  ref <309>: DATABASE ENTRY DATE: 2002-08-28
tgcagggtacccggagcaggatagccaccgttcactcaaaaaagggcctaccctttattgcatcactcgactccaactatagtcaactcccataaacaaaactaggctctcctctgccctccctttcctaaaaggtcaactcatctctccattcccccccgatccccaaaatccaaagcccgagagagggagagaggagaatgggcaatggcatcaccaagaatccgtgcttctccggcgacccgtacgccgccgccgtggcgtccgaccctctcccggacgacagccacggccactccttcacgtacgtgccgtcctccgcggccgccttcgaccactccccgaggtccgccgcggcgtcctccgagacgtcatacttctcgctctccggcgccgccatcagcgccaacccggcgacgtccgcgtcgatgccgtcgttccgcctctacaacgagctgacgtggccgccgtcgacggcctgcaccttcgagagctcccgctccttcgccgcggcgccgctcatccaggccgcgccacccaggctgtccatgtccgggccgctccacgcgacgtcggggcgcttctccgaggcgttgggatcggcctccaccgcctccgaccgcttctccgaccacccgttcatggacggcatgctcgaccgcgcctcgtcggcctcctccaccgccaggctcatgcccagcttctctcacctcatgtctgagccccgcgtcgcgcagtccggcctgagcaatgagcgatcgctcatccgatcccttgtcagggtcgcctccaagctccggtttggggtgccgctctccggccgccggtcgaatggacctgccgaaccgacgaccaagagcgacggcgactaccgctccacgcccaagggcaatgtggagtgggcgcagggcatggccggcgaggaccggttccacgtcgccgtctccgaggagcacggctgggtgttcgtcggaatctacgacggcttcaacggccccgacgcaaccgactacctcttcgccaacctctacgtcgccgtgcaccgcgagctcaagggcgtgctctgggacgacatacaaggcgtcgacgtcgtcacggacaacctcccggaccctgctctggccaatgccacacacctctgtttccttgacgcaggcggcgtcggcggcggtggcgacgacgaccccgacgcagagcgcaaggcgaagagggggcggatcgagcgcaatgccgatgacgacggcgcgtcgtcggtgcaccgcgacgtcctgaaggcgctggcgcgcgcgctggcgaggacggaggaggcgttcttcgcggcggcggaggagcacgcggcgcagagccccgagctgggcctggtcgggtcgtgcgtgctggtgatgctgatgaagggcaaggacgtgtacctgatgaacgtcggcgacagccgcgccgtgctggcgcggcggcgcgagccggacttcaaggacatcttcttcaggcccgaccaggacttgcagctgctcaaggccgaggtgatgcgcgagctcgaggcgcacgacaggaatggcctccagtgcgtgcagctcactcccgagcatagcgccgccgccgaggaggaagtgaggaggatcaggtcccagcatctgactgatcggcaggccgtcgtcaacggcagggtgaaggggaagctcagtgttaccagagcatttggtgccggctacctgaagcagccaaaatggaacgacaggctgcttgaagccttcaaggttgattacatcggcgccgagccatacatcagctgcacgccgtcgctgcgccaccaccggatcagctccaacgacaggttcctcgtgctgtcttctgacgggctctaccagtacttcaccaacaaggaggtggtcgatcaggtcgccatgttcaccgccgagcagcccgacggcgacccggcgaagcacctcgttggagagctcgtcctccgcgccgcgaggaaagccggcatggattgccgcaggctgctcgagatcccgcatggcgacaggaggaactaccatgacgacgtgtccatcatcgtcatgtcgttcgaggggaggatatggagatcgtccgtttaggctttgccaggcctgaacaaacgccagaagcttcagaagagagtcggatgccttgcttcgtttaggctatagtaggctacagtagacatcggaaaaggcaaaacaaaacagtagtagtgcccaagcacatgtgctcaacacctaaaaaaaaaaaagagcacatgtgctgatctcctaaaaaaatct

SEQ ID NO: 10033 - DNA, 733 bp, Oryza sativa
  ref <308>: DATABASE ACCESSION NUMBER: AK107381
  ref <309>: DATABASE ENTRY DATE: 2002-08-28
acagcgatctctccgaacgaacacacagggtagcgctcgcgtagtcgcgtactccccggcctgctcctcacacagacgcgatggcccagggaagaggcagtgcagcgcaggggctcgccctcggcttgctcctcgtgtgcctcctcgtcggctccgacgtcgccgccgccgccacctacaacgtcgactggtcgttcggcgcggacagctggtccaagggcaagaacttccgcgccggtgacgtccttgtgttcagctacgacccgtccgtgcacaacgtggtggcggtggacgccggcggctacagcggctgccgggagtccggcaccaagtacagctccgggtacgaccgcatcacgctcggccgcggcacgagctacttcatctgcagcttctccggccactgtggcgcagggatgaagatggccgtcaccgccagctgaagaggaagccaacgcagcacaaaagcagggccaggctgctgccgctctagcctgtagctatacatatttacatgtgtcgcccgaacagcaataataagaggcagcagccagcaccgcgtcattgtgcaggttttgttgtcatagtgcgtcgcaaacaatatatacagccatatatgtgtgttatgtagggagagtggtaggtgaggcatgagtgatgtgtgcttgtatgtattatcagaagtcaggagttgattactagtaaagcacatcagcttgtttgtttgctctct

SEQ ID NO: 10034 - DNA, 1424 bp, Oryza sativa
  ref <308>: DATABASE ACCESSION NUMBER: AK107382
  ref <309>: DATABASE ENTRY DATE: 2002-08-28
atccatctcccaagctcaacctcaagctcaagctcgcattctacgccagcaaattcgtccatttctctcaacttcttcacccaaaaacacatctaatccataaccatggctgagatccgccgaaagctcgtcattgtcggcgatggtgcttgtggtaaaacctgtttgttgattgttttctccaagggcactttccccgaggtctacgtccccaccgttttcgagaactacgtcgccgatgtcgaggttgacggcaagcacgtcgagctcgccctatgggatactgccggccaggaggattatgaccgtcttcgacctctttcttaccccgactcccacgttatcctgatctgcttcgctgttgactctcccgactcccccgacaacgtccaggagaattggatctctgaggttctgcacttctgccaaggtctccctatcatccttgttggctgcaagaaggatttgcgatacgaccagaagatcatcgaggagctccgaaagaccagccagaagcccgtttcccctgaggagggtgaggagatccgcaagaagatcgccgcctacaagtaccttgagtgctcagccaagaccaacgagggcgtccgtgaagtattcgagcacgctactcgcgctgctctgctctcacgaagcacccgtggcaagtcccacaagaagtgtcttgttctgtaaagggcccatcgaagccctctgaacgcagcccacgcacacgtatcgtggaccctgcgttataatccttgtcgtcacagttcaacctcaacttggtcctcggtagctcggataaaacgggctcgtggcagccaagaaggccaaatttgtcgacatgcatcggttttctcggaatctggagtttgatatcgtctcgctcatgtctggtccatcggcctacgcgccggcccttctcgctggattgatggttttctggtcggcggagcccatggtttcttggaccttctgaatctcgcaggggggtttgctattaccgacagatacctcatctattttattatcaccactggcaggcgagcgggacctctgttttatgtatgtgcttgtcacgcgcggggaggtgggccaggtgtctttttttgttggggccattgaggaggaggagtgactctcgttccttgctctcctgcccagtctgtcagttgcaggctgatggacgaggaatcacttgggagatgttacaggaggccaggagaggcttcgtggactggttacggcgagagcgtttgcgtctgcttgtgtgtggatatggggtccggctggggaaaccaagtcggatcgggccataaatcttttcgttttttctcttggagcctcgagaccgttacttagaccatggagatgggacatctattgcgtagggcctgcctgtttaatctcttgattttttgtat

SEQ ID NO: 10035 - DNA, 2047 bp, Oryza sativa
  ref <308>: DATABASE ACCESSION NUMBER: AK107383
  ref <309>: DATABASE ENTRY DATE: 2002-08-28
aagttcagactcaccaagagcgtccggcaattcggccgtgcgacgaacttcttgctgccgcgactgcgacctgacctcgacctctcttgttcgagtcacatcacacactcatccaattgaacagtcatcttcacccttggctgtcccatttattgtcttctacacttctcctctacagccttgcttctacgttatacccagaccctcttctccaaggcgcagcgacacatacacacgcgaccatgtgccctcaaccagacgagccacaggccctcggtgccaatggcgtgcaccaaaacggcaacggcaccaccaacggtgatcacgaaggctaccgcgccttcaagaccgaccagagcaagaaggtccagagcagcaacccttacgctcctgtaggagacttcctctcaaacgtctccaagtttaagatcattgagtccactctccgcgagggcgagcagttcgccaacgccttcttcgacaccgagaccaagattcgcatcgctaaggccctggacgacttcggcgtcgactacatcgaactcacctctcccgctgccagtgagcagtcccgcctcgactgcgaggccatctgcaacctcggtctcaaggccaagatcctcactcacgtgagatgtaacatgcaggacgccaagctggccgtcgcgactggtgtggacggtgtggatgtggttatcggcaccagcagccaccttatggagcacagccacggcaaggacatcacatacatcaagaacaccgccatcgaggtcatcgagtacgtcaagtcacaaggcaaggagatccgtttctcctccgaggattcgttccgcagtgaccttgtcgatctcctcaccatctacagcgccgtcgacaaggtcggtgtgcacagagtcggtattgctgacaccgtcggctgtgcaactcccagacaagtctacgacctcgtccgcactcttcgcggcgttgtcagctgcgacatcgagactcacttccacaacgacactggctgcgccattgccaacgcctactgcgccctcgaggccggtgccacccacatcgacacctctgttatcggcattggtgagcgcaacggtatcacccctcttggtggcctgatggcccgcatgatcgtcgccgaccgcgactacgtcaagtccaagtacaagcttgagaagctgaaggagatcgaggacatcgtcgccgaggccgtcgagatcaacattcccttcaacaactacatcaccggtttctgcgccttcacccacaaggctggtatccacgccaaggccatcttgaacaacccttccacctacgagatcatcgacccgaaggactttggcatgagccgttacgtccacttcgcttcgcgtctcactggctggaacgccatcaagtcgcgtgctgagcagctcggcctcgacatgaccgacgcgcagatcaagaccgtgactctcaagatcaaggccatggccgatgttcgtcctctcgccatcgatgacgccgacagcattatccgcacttaccactacaacctcaacgctacccaggagaagcctctcctccagcttactgaggaggagaaggagaagttcgccaaggccgagcgtgagcttgctcaggaggacgagaagaaggcgctcgagcgcaaggccgacgacgaggccgatgtgccccgtgccaagaagcagaagaccgagactgtcgcatagatgtctgcgattgacgagatctgaggagtctgctcttacgagtgaacgtgtaaaagaaggagcagaagaagcaggaggaggaggatgacgagaagaatgtgtgctacaagtctctttttatactggcggaagagcatcgaaaaggtttcggctcctccgcccatctgggcattttcatgtatttgaagacggcgctgggattacgaaaaaaatcgggcgctgtacctttgtttgttttgctgtaccttttatatcacctagctttggttgcgagagcgaaatggcgaccacctttgaaataggcaggaagcaatgcaaaaagaacgatctacttg

SEQ ID NO: 10036 - DNA, 2157 bp, Oryza sativa
  ref <308>: DATABASE ACCESSION NUMBER: AK107384
  ref <309>: DATABASE ENTRY DATE: 2002-08-28
actcaaaacactcatcaatgaaatctgatcagcggtagctttttttttttctttctgaaggaacaaaagtgagcaatagctagcggtacatctctctctgtggcaatggatcaagcgaggatctcgttcttcccggatggtctccgtgtgatgatcatcgacgacgacgcaaaggccgtcagaagggcaacggcgacgttgtcccaactgcagtacgcagtggtggcgacgcactccaccgcaagcgctggtctgcgtgccctctccggcgacaacgtggtagaaatccaagccatcctctgcgatgtccacaaggtggtctcctccggcttcgacttccgccgcgtcgtcgagtccgagcttcgcatccccgtcatctaccttctgtcgaagatggaggaggaggacatggtcgccggcgaggacgcggagttcctgaaccacctcctgctgacggcgacctacatcgtcaggaagccgctcaaccccaccgtgatggcccggctgtggagggtggtggcatggcgcatgtactgcctggaagaaaggattcaggccaatgtcgctgccaatgctggcgctggtggcgaagacgacgacgacgacgacgacgtagttatcgtcgaggagccccaagtgcacttcaaggtggtgagaagaacgtccggtggcagcaggaagaggcagctgacaatcaacgtcgtcgacgacggcaaccgcggcagcggcagcggcggcggcggcggcggcggcgcagatgccaacccaaccaggatactgcagcacatcactagcaacttacaggaattccgcacgaagcaccagaagaaggacatggccatcgagcgtcccctcatctcgtcggactccatgttcctcaaagccatcctcccgacgctcaaaatctcaccatgcaaccccctgaccctcactggcggcatcggttcaagcagtgtcgccgcggaggccttcgctggcggcagctcttcagctgcaccacttcaaattccagttttccagcagcaatccaccggcaatggcaacacggtgattagcttcagcaacaatgcttcaccgatggccatgcgtgcgccaaccgacaatactatgatatcgttcaacaatgtctctgctgcgccggtcgccaatgcggtgatctccttcagcaacatttctaggtctgctgccatgcaggcaccagcggcaagggggcaacatctgtccggtgatgtccagcagctggattttccccagcagaagctgtactttgggcccttctcctaccaagggcctccgccaccttccatgcacaaccacatcaacctactcccgccgacgtcctcccctgtgacctgctccatggacaaaggcaaggttcctattatcgagctcccatatgggatgcctgtggatgacttcctcgtcagtcaaaccacatatggcggtgccggaccatccatcggagccactgacgctgctgccgctgcgtacccttacacagatgcaccgagcaataacgttgcaactggctgtctcatggtgccaccaatggggccagcattcagtatcactgagccaactgtggtggcccaaggtgagggcaccggcaccggtgtcgacgccggcacatcagagaagaacgcgatagtagaagcaccaaacaaccccgcgccattaatggtactggatcaggttgctgctgatgctgcaatggatgttcaagaagacatcatgttctctttggaatctcttctggggccggactatgacctgctacctatggaagacgttagtgctccggacaccgctgcagccggtgatgcagctggtggctcactggacggagaggaaggcggcatggacattggttgggatctcgacctggatgacatcctggtggagaacgttaatgacttcgcgttcctggacaaccttgccgggagcgagtagtcagtagtcatctcatcgcaaatatattatctcaagttaattaagctagagattagagagaggggatgtgtgctcagtatgataaaacaacttttagtctttgttgcaagtactctaaacattgatgatttttcctccgttatcatgccaggaatgtgaacttttaaaactccaaattcctatattgcagatatgatattatgatgc

SEQ ID NO: 10037 - DNA, 1339 bp, Oryza sativa
  ref <308>: DATABASE ACCESSION NUMBER: AK107385
  ref <309>: DATABASE ENTRY DATE: 2002-08-28
atcatccttgcttgatatcgcggccgtcgccaacgtcgctgcccgtccccctcccaacttcgcggagtacatcaagcacttccccaagcatcgacaccaccttggccatcaccatgaactcgttctactacgacagcgtccttgacgccttcaagaagcccgatgtcaccatcccccctattccccctcacctcgagcaccccatcgtgtccacccagtggggtcacacctacctctgggccgtcttcttcatcatggctggcttctccgtgctcttcttcatctcgtcccagcgcgcttcctaccgctaccgtctgatgcacaccaccaccttcttcatcactgctatcgccgctctctcctactttgccatggccaccggcgtcggcaagaccctcaccaccattggcgaacaccgtcacggcgcgccccgcgagttcttctacgctcgatacctcgactgggccctcaccacgccgctgcttctcttcgacctcaccctcctcgctggcctgcccgttgccgagatcatcgtcctcgttctcgctgacgaggtcatgatcgtcaccggtgtcatcgctggcgttcaccccaccaagaccggcaaatggggcttcttcaccttctcgtgcgttgccttcgcctgggtccttttccagctcgtcacctcgggccgctccaccgccttcctccgcagccccaaggtcggcggcctctacaaccagatctcgctcgccctcgtcgtggtctggaccctctaccccgtcgctttcgccctttgcgagggcaccggcaagcttagccccgacaaggagatcctcttctttgccatccttgacgttattgccaagcctctctggggcgcctggctcctcattgccactcccgacgagggccacgtcctcgttcccgaaagcctctgcgcccccgccggcacgcctgcttcgggcggctacggtgccatctcccaggagccccgcgccgaggacgcttaagcaacactcttggctgcgaagaggacttgactgcgcagtgacgcccggaagccgctagcccttcccgttccggcgagggcacggctctggggtccagtacctccctcccatcgtcctctcgtgtcgatgtacttcgtttcacctgtatctcccgcttttccactcccggatgccctgcagcggtcaggcaatcattgtccacgggatctctcgagccgcttctttgcaggctggttcgggctttccgcgttcaccgcctgcctttccatcatctctcgatcgccttatcatccctgtagctttgcgtttcgattcgatgtctcaatgccatcgcctttgatgat

SEQ ID NO: 10038 - DNA, 1517 bp, Oryza sativa
  ref <308>: DATABASE ACCESSION NUMBER: AK107386
  ref <309>: DATABASE ENTRY DATE: 2002-08-28
aaaattaaaccgactctttctccgttccgcttcccaccgccatgccttcctccgccgcctctcgccgtcgccgccaccgccaccgccacgccggcaagcccgactacccaccgtcggagctgccggacatcctccgcgtccgcgagctccgccttgcccctcgcgcctcttctctcccaaaccctaaccctcacaaaccccagccccaccccacgattccctcctccaccaccaccaccacctctggacgccgtcgcaaccgccgtggccgtggacgcggccgcgggcgcaaggagggggatgcgagggactgggcgggggggctgccgctggacgcgatcctggccatcttccacaagctcgaccacatcgagatcctgatgggggccgggcaggtgtgccgctcctggcgccgcgccgcgcgcgacgagccccagctctggcggcgcatcgacatgcgcggccacgccgacctctccttcgagctcaacctcttcgggatggcgcaggccgctgtgcgccgcagcgcgggtcagtgcgaggccttctggggcgagtacgccgccgacgaaaaattgctccatttcctcggcgaacgagcaccatctgtgaagagtcttcgtctgatctcttgctatgatatcctcaatgaaggattttcagcagccataaagaagtttccactgcttgaggagcttgagctttcgctttgttcaaatataggtgagagcaatgtgtttgagattgttggcaaagcatgcccacagctgaagcgcttcagatttagtaaagactgcttctacagctttgaagataatgaatacgagatggacgaggaagccctaggtattgcaactatgcatgagctacggtctctgcagctttttgctaataatctcaggaatgaaggtctggcagctatccttgacaactgcccctacctggaatccctcgacattcgtcattgcttcaatgtcaatatggatgacaccctgcgagcaaagtgtgccaggatcaagacactgaggcttccctatgactcaactgatgactatgacttccaagttcagaagcctatctcgcttgctgacttctactctgacagtgatgatgattgtgtttatggtggccccgactatattcttgactcagatgagtacgatgactactgtgacccttaccgctaccttgatggtgtctatgagggcgtcgcgtcagggcgagctcgatgaagaagatcggatgatgctcaagactatgcgcacgttcctgaaatgaatgccatgcgtatggtggtacttctgcatggttcactggatctgctgctctctggggtgtcaccacttaatggaagattgcttagcaacttggttcctgttccctctgaattcggtatggtggtgtatgactatgtgcctacagccagaacaagataatggcacacttctatcagtatatggtatgttccccggcctaaaaaaaacgctcgcgctatgattatcatttggttattcccc

SEQ ID NO: 10039 - DNA, 1504 bp, Oryza sativa
  ref <308>: DATABASE ACCESSION NUMBER: AK107387
  ref <309>: DATABASE ENTRY DATE: 2002-08-28
aattggctgtcgagccttatcttcaatttctctcgatcggttcgatcccatgaccatgtgagggggatgatgccggaggcggctctgagctccggcaagccgatgccgcgggtcggcatgggcacggcttcgttcccgctcggcgcgaccgacccgtcgacggtgaaggatgtcgtcctgcgcgccatcgaggccggctaccggcacttcgacacggcggccgtgtaccagacggaggccatcctcggcgacgccgtggcggaggcggtgcgcgccggcctcgtcgcgtcgcgggacgagctctacatcacgtccaagctatgggttgcccacgcgcaccccggccatgtcctgccatctcttaggcgtgcgctccggtgagtataactgcaacttattttgttggactagctatatatgctcatgcgttgcaccgggatcattaattattcgtgtcattcttcatgtccagctgcgtagctactctaaccagtcgatataaattttctatatacctagctagaatattatatttgatccatgtagtataatctgagacccgtcaagaaattctaatagctagccgcctagaaatacgaaaagacaaatagtaaaaaataaaaatgaaataggctagaaactagcctactagcagcaggttgtgggagggaggcatggaaatgggtgagtggtttcacatgacagcggcggtggtggccaggatgctaactggtgcatgggcactagtatcttttttcgtttttcttttttccatctttttcgtttttctttttttcgcttcctctcccctcacgtgttttccttcttttttttcatgtttttttttcgaatttttaatcggtagcacacgtgttaccaaaaaattttttggtcaaaagttttcaaatcttaacttaaaaatttttcaatataaaaaaatttaaatcttgagttgaaagtttttaaatctgggttgaaagtttcaatttttaagttgagagttttcaaatctgcgttaaaagtctcaaatttgagttgaaaatttttcaaatttgagactacaagttgaaagtttttaaaatttgacttaaaaaatttaaattagagttgaaagttttaagtttttaaatctggattgaaaaagttttcaaaagttaactttacgtatagttttctttttaatctattagtaaaagaagatcattaaatataaaaaaaattaattatggttattatctacaactaaccaaagtaaacatctccggtaaaaaaggaaagtcccgcaaaaaaggaaaaaggaaatactaaccgttatcattattggaggctggcgctaatcgcaccatcctaattggattaggccaattagctaccgataaatcagcacttgcgtgcatgccccggtgaccatctcggcatctgcgccaattagcaaaaccggcggtggtggtaggatggcggaaccatcaccatcattgttgtctttcttttttaactaaccaac

SEQ ID NO: 10040 - DNA, 2566 bp, Oryza sativa
  ref <308>: DATABASE ACCESSION NUMBER: AK107388
  ref <309>: DATABASE ENTRY DATE: 2002-08-28
acacctcccacccttcaccaccctcctcttaccatcacacacacagcaaagatggtgcaatccgcagttctcggcttccctcgcatgggtcgcctgcgtgacctgaagaaggccaacgaagcctactggggcggcaagctgtctcgcgaggacctcctcgccgagggcaagagactgagactcgggcactggaagatccagaaggatgccggcgtcgatgtcatccccagcaacgacttcgccttctacgaccacgtcctcgaccacatccagatgttcaacgccatccccgagcgttactccaaggacaacctcgagcccatcgaccagtacttcgccatgggccgtggccaccagaaggacggcatcgacgtcccctccctcgagatggtcaagtggttcgactccaactaccactacgtcaagcccactctccaggacaaccagaccttcaccctctcctccgaccccaagcccgtccgtgagttcaaggaggccaaggaggctggcatcaccacccgccccgtccttgtcggtcccgtctctttcctcgccctcggcaaggccgaccgtggccagtccgtcgaccccatcactctcctcgagaagctccttcccgtctacgagcagctcctgaagcagctcaaggaggctggtgccgagaccgtccagatcgatgagcccgtcctcgtcttcgaccttccctccaagatcaaggaggccttcaagcccgcctacgagaagctcaacgctctccagggtgccggcggtccccagatcgccctctccacctacttcggtgacatcgtccacaaccttgacgtcgttgacagcgtcctcaagaacacatacgctctccacgtcgacctcgtccgcaaccctgagcagctcaccaagatcatcgagcacctcggcgagaagcagatcctctccgctggtgtcgttgacggccataacatctggaagaccaacttcaagaaggccatcgaggtcgtcgagaccgccgtccagaagcttggcaaggagcgtgtccttgtcgccacctccagctccctccttcacactccccacaccctcgccagcgagaagaagcttgacgaggaggtcagggactggttctccttcgccagcgagaaggtcgttgaggttgccatcattgccaaggccgtcacggagggccccgactccgtccgtgagcagatcgaggccaacgccaagagcatgcagtctcgcgccacctccaagcgcaccaacaaccccgatgtcaagaagaggcaggacgaggtcaccgccgagatgcacaaccgcaagtcggtctttgacactcgctacgcccagcagaaggagcacctcaagcttcctcaattccccaccaccaccatcggttccttcccccagacccaggacatccgcatccagcgtaacaagttcaccaagggtgagatcactcctgaggagtacgagaagttcatcgagaaggagatccaggatgtcgttgccatccaggacgagctcgaccttgacgtctacgtccacggtgagcctgagcgtaacgacatggtgcagtacttcggtgagcgccttgacggctatgtcttcaccacccacgcctgggtccagtcttacggctctcgctgcgtccgtcccccgatcattgtcggtgacatctcccgccctgctcccatgaccgtcaaggagagcaagtacgccgcctccatcagcaagaagcccatgaagggcatgcttactggtcccatcacctgtctccgctggtcattcccccgtgacgacgttcaccagtccgtccaggctcagcagctcgctctcgctctccgcgacgaggttgttgaccttgaggccgctggcatctacgtcatccaggtcgacgagcctgccctccgtgagggtcttcccctccgctccggctctgagcgcgagaagtacctctcctgggctgtcgacagcttcaagctgtccactgctggtgtccaggactccacccagatccactctcacttctgttactctgagttccaggacttcttccacgccatctctgctcttgatgccgatgtcctctccatcgagaacagcaagtctgacgccaagctcctcaaggtcttcattgacgaggcctacccccgccacatcggccctggtgtttacgacatccactctccccgtgttccctccgagcaggagatcaaggaccgtgttgaggagatgctccagtacctcaagcctgagcagctctggatcaaccctgattgcggtctcaagacccgccagtggaaggagaccaagaccgccctcaccaacttggtcaacgccgccaagttcttccgtgagaagtacagcaagtcttcttaaacgacttcgctgtttgtacaacaatacaacaaccacattccgcataacgcggagtcagaccttacttgcctagagcgagccgcatgtctgaccacggccagcacttaactgctgtgcctggattacttttacgagatttgatgcttcaacaccctgtgatacccaagttttttcaacattattagcgacggagttc

SEQ ID NO: 10041 - DNA, 1494 bp, Oryza sativa
  ref <308>: DATABASE ACCESSION NUMBER: AK107389
  ref <309>: DATABASE ENTRY DATE: 2002-08-28
attgcatatgctcctgccatctccatcaaccaatccaagctatctatctaattccattctcacaacacatttgcatgcatctatataaagtgtaatataatgtttattacaacacgtcgctgtcacaaaagcaagcttagttgacgtgtacacatcgaactccggcgagcggcggcggcggccgccggcggcgaggggggggaggtgggtgcgcttcaagaaggacctccgcctccccgacaactgcgacgccgacgccgtccgcgccaggttcgacgaccacaagctcatcatcacgctccccctcgtcgccgccgccgtcgacgtcgacgagtcctcggcgacgtcgccggagttcaagacgccgccggctctgtcgccggtgccgccgccgccgccgcctcctcgtactcgtacgcgcgttgagccgccgcaccgtccacctccggtgaaaccccagccgccaccgtcattgccaccaccacctcctcctccgccgccaccgccgccgccacgtccaccgtcggtgaagccccccgttgtgcagccgaagccacagccgccaccatcattgcaaccaccatctccgccgccgccgccgccgacacgtccaccgtcggtgaagccccccgttgtgcagccgaagccacagccgccaccaacattgccaccaccatctccgccgccgccgccgcctacagtaccaccacgaactccgggggacacccctgccgttgtcgagccaaagccgcagccaccaccaccaccaccacgagctccggtgaagatgccacgtgttctcgagccaaagccctcgccgccgccgccatcgccgctgccaccgccgccagaggattattggtctccaacggcagtgactcctccggaaccaacaaagccaaagccaccgccgccatcgccgccgccgccgccgcagcaaccgtcacagcggtattggaccccgcctccggctatcacccctgaaccagcaaagcccgccgccggcaagccgacatcctcgtcgccgccgagcacaaaagactcgccacggccgccgcttcctgcgccaagtccagcagcaaacggcggcgatccaaggctaccggcgactacgccgctttcgaagcagaagaggaaagaggagaagagagagaaggaggcgcaagaaatgggtcgagctggagcggcagcagcggaggaggagcggccgccggcgacggcgacggcgagcggaggtgggaggagggaggcggaggagaggaggctgatggtgaacatggcggcggcggcggcggtgctcgtcgggatcatcgtatccgtgtggcgcaccttgagctcttgactcttgtgtctctgaccaaacagatgccaaatgtgaatgatatgtaattaagctaatgtgattacatgtaaattaacacctgcaaatgtgtatactgaaacaccacattaataaccaaaatgtactactaattgcaagtatacttttgttac

SEQ ID NO: 10042 - DNA, 1519 bp, Oryza sativa
  ref <308>: DATABASE ACCESSION NUMBER: AK107390
  ref <309>: DATABASE ENTRY DATE: 2002-08-28
atcctctctctagtcgcccccatccatcgctctccgtcgtcctcaaccagcgccgatccccaatctccatcgcccccaaccatcgccgatccccaatctttccctacctgattcggttcctccgtcacccccaaccctgatcctcactctctcccacctcaatccggttcctatgttgcactcaacttcaatccccaatccctaacctcctcacctcgcctctcgcctcaacagtcggcgtgggcgcgtggcaatggtgcggccggcgcgcgtcgattcactgcccgtcgcggctttggaggaaacggctcggctggttagaagggccgcacccaagcggagggtggcggaactgaacattgaagcacaacaggcaagtggagcaaggcgaggtggatgtaggcgccatggtggccgtggtggtggggtgcttggtgccgacggcgtccaggtactcaccgaggagcgccatggtggtggggtgctcggcgccgacggcgtccagttactcaccgaggaccagcatgcatgtggatacttgtctgatgcggagtggcaccccggcggttgcttcgtccctgagtcggaggaccaggcgtgtggcggcatcgacaactcggagctaccaccggacagtggatttgtccatgtctcccaggacgaggcaagtaacgatgtccctgactccgacttgccacccgacggcggcttcgtccctgactctgaggatgaggcaagtggtggcgtcgacgactccgagctgccacccgatggctgcgttgttcctgactccgaggacgaggcaagtagtggtggcgacgactccgagctgccacccaatggctgcgttgtccctgactccgaggacgaggcaagtggctgcgtccacgatttcgagctggcacccgacggttgcgtcgtccctgactccgaggacgagacgagtggtggcgtccacgactccgagctgccacccgaaggctgcatcgtccctgactccgaggatgaggcaagtggtggcggcgtccttaacttggagcagaagccggagaaaggcatcttcgccaacttggaggagcagcacatggatggcattgaacagctggtcggtggggaggaggtggctggcctacaagatgatgttggtgtatctgccggagatgggggcgtcgacgaatttgctgaaattcgcgaaagtatgttacggattttacttcccctgtacttcaccatacctcacaaataatgccatggaagatatgccatctaggagtattagtactaatatcactaggagtaagacatattagtattgcattaataatgaggagatcaaggctagagatggaatcctgttttggctaaaccgctttgatctctgcatatatgtaaaaaatgaagaactagcatgactaccaaggctgtttggtgcacactcccttttgcgtagtatgtaagcagtagatgcttgatcaatatgtgtaattaactaattaattataaggaccttttaaagctt

SEQ ID NO: 10043 - DNA, 2475 bp, Oryza sativa
  ref <308>: DATABASE ACCESSION NUMBER: AK107391
  ref <309>: DATABASE ENTRY DATE: 2002-08-28
gcttctgcgccgtctccgccgtgccgccatggccgtgctcatgctagtgtggtgcgtgtccgttttcttgctcctcccatctgccaccgcgcaggccaccaccttcaccagcaacgtcgacggcaaggagttcaccacattctccttccccaagttcgacaagcccctgttgcagctccccgacaacctgaccttctcaggcaacgccaccatcgcccaggacgggttgcagctcaccccggacagcggcaacaggcccgagatattcctcgtcaaccaggccggccacgccttcttcaccgccccgttcgtcgtctgggaatccaagtcgtcgtcgtcgtcgtccaactccgccgccgctgccgccgatggaaagtacgtcgcctcgttctccaccgtgttcaaggttaacctgttccgctcgaacctgaacaagacggtcaagggcgaggggctcgcgttcgtcgtcgcgtcgagcaacgcccgcgggccgccggtcggtagccacggcgggttcctcggcctcaccaacgcctccaccgacggcaacgccaccaacgggttcgtggccgtggagctggacacagtgaagcagcgctacgacatcgacgacaaccacgtcggcctcgacgtcaacggcgtccgatccaccgccgcggcgccactcgccccactgggtatccagctcgcgcccaggaacaccaccgtcgacgacggcatctgctttgtctgggtcgactacaatggcacgtcgcggcggatgtcggtgtacatcgccaagaacgagagcaagccctccgccgccgtgctcaacgcgtcgctggacctctccaccatcctcctcggcaagacggcgtacttcggcttctcggcgtccaccggcgccgcgacgtaccagctcaactgcgtgcgcatgtggaacatgaccgtcgagaggctccacgacggcaccaccaccaccgccacgaagctagccggcacgtccggctggaagttggccgtcggcgtgttgtgcggcgtcgccgtggtgctcggggtggtcgccgcgctgtacatccggaagaggaggagacggagcggcggcgacccgagctcggcgttcaacgccgccattgatttcaggaagatcccaggtttgcccaaggagttcgactacatggagctgaggagagggacgaacaacttcgacgagaagatgaagctggggcagggcgggtacggcgtggtgtaccgcgccaccgtggtcggggaagatggccggagcacggacgtcgccgtgaagcagttctctggtgcaaacaccaaggggaaggaggatttcctcgccgagctcagaattatcaactgcctccgtcatcgcaatctcgtcaagatcgtcggttggtgccgccaaaatggcaggctgttgctagtgtacgactacatgccgaacggcagcctggacaggcacatcttcggcgagccgggcgcggcggcgctggactggaagcagcgctacaacgtcgtcgccggcgtcgcgtcggcgctgaactacctccaccacgagtacgaccagatggtgatccaccgcgacatcaagccgtccaacatcatgctcgactccgccttcaacgcgcggctcggcgacttcggcctcgcccgcgcgctcgagtccgacaagacgtcgtacaccgacatggccggcgtcacggggacgctggggtacatcgcgccggagtgcttccacaccggccgcgcgacgcgggagtcggacgtgttcggcttcggcgccgtcgtcctggagatcgtctgcggccgccgcgtctcctgcagcgacctccccggctggctcagcctgctggagtgggtctggaggctccacggcgcggctggcggcggcggcatcctcgaggccgtcgaccagaggctcgccggcgagttcgacgaggtcgaggccgagcggctcctgctgctgggcctcgcgtgcagccacccgaaccccggggagcggccgaggacgcaggccatcctgcagatcctgacgggcgccgccccgccgccgcacgtgccgccgtcgaagccggcgttcatgtggcccgcgatgcccgtcgcgctcgatggcgacgacgacgacagcgagacgccgacgtcgcgcagcagcatgctgctgacctcgtcgtcgacggggtggaccaaaatcttccaggtgagcaaagagcatgacgtggcggagaaggacgtggccgcagagtgaacagccgggaagagtcagcggctcgcgtgcgggcgaggcctggtcaatcgagaccgtcgagctggtggaacactggacgacgtgcaagagtatgaccaaacaaaacggagtaaaaaaatgtgcgttgccatggaatggcggaggttgtttttgctctaacatttttcaacttgctgcgttaaatacaatctagtggtgtacggcggtgagtgtagtttatgcgagtagtagctgtatttgtc

SEQ ID NO: 10044 - DNA, 1499 bp, Oryza sativa
  ref <308>: DATABASE ACCESSION NUMBER: AK107392
  ref <309>: DATABASE ENTRY DATE: 2002-08-28
tggaacagcaatcaacacacaaaccagctcttggaaacacattcactctcaagcaaatctacaaacaataacactcgctacatctactcttcagacgcttgtctcttcgcttcacaacacaatccaaaacaacaaaaacctcaatcaatatggttggcaagaatgttttggctgctgcggcggtctacttcgctctcacttctgctttggctcttcccaaagacaagcctgatgatattaagagcaagcatgacgatgacgaccaccccaggactggtctgccccatcaacctgatgacaaggactgctccaccaaggcaccttaccctactggcgattccagcaacactgacttcggtactggcattggcattccgactggttacttcccgactggctcaggcttcgtgactggcgtcactcttacaactgaggattctgctactcccaccgccaccgatgacagcgcatccgcgaccatcaccgacgatagctccttgcctgtcatcaccgacgccagcacactgggatctacggatgacagttcgccgactgccactgacgacggcgccagtgcaaccgcgacgcgcatcgccaagcgtgcagctcatcccgataagggcaaggacgatcctacctcgagccccagctcgtcacgttcttccgatgatgacaacccaagcaagacttcggacgacaacggcaagcctactgcctccacttccggtgttgaagataacaccagcaggacttcggacgataacagccagcccaccgctcccccttccggtgacgacaatggctctggtaccgtcaccatcaccatcaccgaggcacccacggtcacaatcaccatctcaacatccgtgcctaccacaagctccacctccaggtccaaaggccaaaggggaaagaagtcgaagacttcatcaaggtctttgactacttccgattcgtccactagctctacttcaaccacctcttccacttcttcgacctcttccgtcgaagatagccctacaccggccgcttagatgggtaaaacaggcgaaaagcattgtcggcgagctggtggcgcgtctgcatacgcatacttccgagagcaggtctctcgagtccaaccggcgtctatcattaccacttactggaatcttgggtcaaggaagcccacctcgtcattcctcaacattcgctcaacaatattgggaatcgattgctctctgatcaacactctttttcggaacattcattgacaacattcgtcgagctggactcgaccatggattatggcgctggcaccccgatgtgaggctgaacgattgcatgggctgtttccacgacgttctctacttgggttttggcaacgctgggttgggacgagggtgccggccaccccaaagggtctagacattcatttgtttctttcatcactctcttttgataaatatggttctggtaggagttacataggcgttaacaggttcaatcacgtttttacc

SEQ ID NO: 10045 - DNA, 1562 bp, Oryza sativa
  ref <308>: DATABASE ACCESSION NUMBER: AK107393
  ref <309>: DATABASE ENTRY DATE: 2002-08-28
aagcagcagtgacgtactgacgttaatcgcagctctacccatcatttgcagccaccagcatctgctccggcacgcttctgccaccgccgtcgccggagatccgtcacgcgtccgactccgattgactgaaccgtcggagcacgtacgccgggatgcggtgctggcgtcgcctggcggcggccggcgcactgctcgccgccctctgcgccgcgcttgctctggcggtggcggagcaccggcgccctgacaccacggccagcagcagcagccgccggccgctgcggttcgcgtcgggaggagggttcaaggtggcgctcttcgccgacctgcattacggcgagaacgcctggacggactggggcccacggcaggacgccggctccgaccgcgtcatggccgccgtcctcgacgccgagaagcccgacttcgtggtgtacctcggcgacctcgtgaccgcgaacaatctagggatccccaacgcgagcctgtactgggacagagcgatttctccgaccagaggcagggggatcccgtgggcgacggtgttcgggaaccacgacgacatgccgttcgagtggcctcctgagtggttctctcctgcaggcgttccgccgctgcattgcccaccaccgagcatgtcagattcagactgcagcttccgaggaacaccgcgacttgaactgatgacaagtgaggttatccgtaatggattgtcatattcatcaaatggccccaaggacctctggcctgctgtttccaactacgtcttgcaggtgctatcacagaagcgagatgatccagctctgctcatgtatttccttgactccggtggtggatcctatccagaagtgatatccagtgctcaggttcagtggtttcatagtcaatctcagttccttaatccaaatggaaggattccagagatcatcttttggcatattccaagtacggcatatgccaaggttgcgccgaaagctaagtccgaaataagaaaaccctgtgttggctctatcaacagggaagaagtagcaccacaagaagctgaatggggtatgatggatgcccttgtcaagagggcttcagtgaaggcaattttcgttggtcacaaccacggcctggattggtgctgcccacacgagaaactctggctatgttttgcccgacacacaggctatggtggctacggtaactggccaagaggagcaagggttattgagatatctgaacagcccttctcaattcagtcatggatacggatggaggatgggacaacgcacagcgatattagcttgagctcctagacttgtaaatgaaatgtagttgctggagttttatttcagacaaataaagagtccaagtaggaaaatgaaggtggacactgtatataattaagctgagcccccttgtaaaattgtaatatatgcgtacagagtaagaaaaggttggcagaaagaaagagaaaagagtaggaaaaatgatgaacctatgggatccactgccacgtgtcaagctacgtggtgccatgtcagatgaaatcaccagaaaaaaaagttacagggagg

SEQ ID NO: 10046 - DNA, 1431 bp, Oryza sativa
  ref <308>: DATABASE ACCESSION NUMBER: AK107394
  ref <309>: DATABASE ENTRY DATE: 2002-08-28
ccgcactatttccgtccccttgccctcccacacaatcgccgagtgtccgagacgcagccgccgccgccgccgccgcgcacccatcgcctcctcctcacatcgcacccccgagcagccgaatcctccgtcgcgcgccgccccttcctccccgctctccgccgctgcccgtgccgcaggcgcgggcggactctctcgattgggaggctagctgcttacaattgagtctttgacttgcttttgttgttgtcacaatgtcaggcctactgaattcaaacctgaacaattctgcatcaaaccttcaagactcatctggaagaccgtttacagcatccttttctggtcaatctggatcagttccaggggcgttccatcactctggcttgcacaacatccatgcaaattttaatctgccaaatatgcctggatcgcttgctcagaggaatgctgccatgagtggccttccatcctctggggttcaacagcctggagggagcatttctgcaagatttgcttcaaacaaccttccagttggaatgtctcagcttcctcatgggcattcaggagtcagttctagagtgaatgttggcggaggtccagcatttagtagtagcttgaatattggaggtaccattcaaggcttatcctcaaacttgggtgctggtggtaatcggaattctgttcctgggatgtcagtatctccagctttgggaaatttgggccctaggatcactggttctgtaggaaatattgtgggtggaagtaacattggaaggaatataagctctggtggattatctgtgccaagcatagcatcacgcatgaatttgagtggcaatattggcagtggcggtctaaatgtccaaggatccagcaggatgatgaatggcattcttcagcaaggatcgcctcaaatgatgaacatgatggggagttcatatccgacgtctggaggttcattatctcagaaccaaatacaaggaggaaataattcccttggttccatggggatgctgcatgatgccaatgacagtgctccatatgacatgaatgattttccccaattgactggtcgacctagttctgctggtggtccgcaaggacaatatggctcactgcggaagcaaggagttggtgttaacaccattgttcaacaaaaccaggaatttagcattcaaaatgaagacttcccagctttacctggatacaaaggtggttacagctatattattgtagaacgttcgttgacattcagtgagggtgttttgattaattatacttggtgtatcatgcaatatcagctgcatgactgttacaatttgttgtctcaactttcaactggccctcgctagcatgtcatagaactacgtgttacaaaatccattttgctttgacattttatcttttatggaaggctgccatattttttcttgc

SEQ ID NO: 10047 - DNA, 1399 bp, Oryza sativa
  ref <308>: DATABASE ACCESSION NUMBER: AK107395
  ref <309>: DATABASE ENTRY DATE: 2002-08-28
aatcgacaccacatccctcaccaccctccacacacacacgcgcgcaactccctcacaatggccacccagcgtctctccaacgtcctctcccacatcaccccgggcaagtccccgctcgagcagatcacctcccagaaccccgacgatgttgtcatcacgctcgccatccgcactcctctgaccaaggccaagaagggcggcttcaaggacactcctctcgatggcctggtgttcaagatcctcgagcaggtggtccgcaagagcaacctcgacccacagctggttgaggacgtttgcttgggcaacgtctctgacgccaaagccgcatactacgtccgcgccgcctgccttgccgcgggcttccccaccaccaccgccgccagcagcgtcaaccgcttctgctcctccggcctcaaggccgtctaggacattgcggcccagattcagtccggcgccatcgaggtcggtttggccgttggtgccgagcacatgaccgctggcggcgaccgcctcacccgccccttcgtcgacgagatcgtcaacgccaaccaaaacgccgccgactgcttgcagcccatgggtcagacctcagaaaacgttggcgccgacttcaacatcacccgtgagcaacaggacagatatgctgccgagtcataccgtcgcgcagaggctgcacagaaggctggctggttcgaggatgagatcacacccatcaccgtcaaggtcaaggacccaaagactggcgaggggaaggatatcaccctcaccaaggacgagggtccaaggtggggcaccaccttcgagggcctcaacaagatccgccctgctttccctgacttcggcgacaagtccactggcggcaacagcagtcaggtcaccgatggtgctgccgctgtcctgctcatgaagaggtccaaggccctcgagctcggccagcccattgttgccaagttcgtcggagccaccgttgccggtcttgcgcctagaatcatgggtatcggcccttcagtcgccgtgcccaagctcctcaccaagtacaacctcaccatcgacgacattgaccttgtcgagctgaacgaggccttcgcctcaatggcagtctactgcaaggacgcactcaagatcgaccacgcgaagctcaacgtcagaggtggtgccatcgcattgggccaccctctcggctgcacaggcgcaagacagatcgtcactggtctgagtgagtgccgacgccgcaaggccaaggtcctgctcaccaccatgtgcattggcactggtatgggcatggccggtctgtttgtcaacgagcagctgtaaataatataaggagggaaaaaaatgcacaggacccttatatgtttgcatatgtgttgcatgtatcgaaatgagcgaattcattgac

SEQ ID NO: 10048 - DNA, 909 bp, Oryza sativa
  ref <308>: DATABASE ACCESSION NUMBER: AK107396
  ref <309>: DATABASE ENTRY DATE: 2002-08-28
aacaaacaccaagaaaatcaatcagctaagcaacacaaggaaagaagaagaaatagctcaaagctagagagcacctactgctgctgctgctgccgctacgacctagtaatataattcagaaattcagaggcaagaacacttgtcatctctgatcaaagaagggagataaacttgttcagatactagttgttgcaagcatggaggaggagatggtggcggtggtgatgagctgcgagtgctgcgggctggaggaggagtgcacgggggagtacgtgggcggcgtgagggcgtacttcggggggaggtggctgtgcgggctgtgctcggaggcggtgaagtacgaggccgggaagagctcgccgcgggcgcccgtcgacgtggaggaggccgtgcgcgcgcacatggccttctgccgcatgctcaagcgcggcggccccgccgagcgcgtcgccgagggcatgtgccagatgctgcgcaccgcctcctggaagcagcggcggcgcgcctccggatcctcctcgtcgtcgtcgtcgccgtcgccgcgagccgcgcccgagcgccaccaccaccaccgcgcgccgtcgacgctctcggtccagctcatctgatcgggcgatcgatcatcgccatacatgtacagcgagcgcgcgcgcgcgcggtggcgtggcgtggcgtgcggttcttgtgacgaggtgcacgcagcgcacgacgcatgcaatctccatcgtcttcttcttcctctcgcatctagtagagagactagcagtagtaatatacataaggtttctatgtgaattttgaattttgatcaggtggtgttaaccacggtgaaagagggtgcacatatgtgtaatcaagttcaatatttttcacattcttttcaagtaatatttcacatgatcttgtact

SEQ ID NO: 10049 - DNA, 1960 bp, Oryza sativa
  ref <308>: DATABASE ACCESSION NUMBER: AK107397
  ref <309>: DATABASE ENTRY DATE: 2002-08-28
atcagctagaagtatacttgcctcttccatttgtttctaactcaagacatcgactctcatagcaagcacttccttgaaaacatcattaccttgttctccctctaccacatcatcgacttcaacgaaagaacacacatccctgtaacactagatgtcaccacacgcagtcatggccaacgtaccagaaaagacttggtggaaagaggcagtggtataccagatctatcctgctagcttcaatgacagcaatggagatggcctcggagacatccctggcatcgtcagcaagattccctacatcaagtcgctgggcgtcaacacaatctggctctccccgatcttcgcatctccacaacacgacatgggctacgacatctcagactatcgcgcgattcatgaaccgtacggcactgtcgaagatgtgcaatcactcatcgatcagctacacagcaatgacatgcgcctgctcatggatttggtggtcaaccacaccagcgacgagcatgcctggttcaaagagtcacgaagttcaaaagacaatgcgaagcgcgactggtacttctggagagaccctaagtacgattccgagggcaacaggaaggagccaaacaactggaagtccatcttcggcggcagcgcatggcactttgacgaacagactggacagtactaccttgctcttttcctcccctctcagcccgacttgaactgggcgtgcgaggagatgcgtcaagcgtcttacgatgacattcgcttctggctcgaccgaggcgttgacggcttccgcattgacagcatgaacctcatgtccaagcacccagatcttcccgacggtaagatcgtcgacgacgagccctaccagtctggcgccgagttctttgcttccggacccaaaatgcatgactacatccgcgagatgcgtgcgatcttcgacgaatatgacgccatgactgtgggcgagcttggattcaccaaggacgagcagtccgtcagcgagtacgttgccaaagaccgccacgagcttaacatggtgttcactggcgatatcgtggacatggactttggaccggacggcaagtacggtcgggacgacttccaccctcgcaagatccgtaacatcacaaacatgtggcagcgagtgatgcccaaggtcaacggttggaacagcgtatatctggacaaccacgacagtggtcgctcactcagccgctacgcttccgatgctcctgagcaccgtgccacggcggccaagatgctcgccacatacctgctcacactgagtggtacgccattcatgcttgctggacaagaaatcggcacagcgaaccttgggaaagattacggaacagaggcgtacatcgacgtcgagggcagaaaccactacgacgcagtcctaaagacgcgaggcggagaccactcaaagatgggagacgtgatgcgcgagatccaactcaaggctagagaccacggtcgacttcccatgcagtgggactcttcagcgaacgctgggttctctgcggaaggaaccacaccatggatgaccatcaacaaagactacgtcgattggaacgtcgcaagccagatcgacgtgcctgacagtgtgctcgcctactggcgcaagatgctcgccctgcgaaaggagcacaccgacttgcttacgtacggctcttacaagccgctgagcgagctcgacacaggcgagtgggtgcttggatacgagcgggagagcttcgagacgggcaagaaggccgttgtcctgctcaacttctcagacaaggagcagagggtgcatgttgagtcgccttcgcgcgaagagtacgaggtgttggtgtcgaaccaggaggcgggcatcaagggtggatatgtaaccctgatgccgtacggtgccgtcgtgcttgtcagcaaatagtttcgggcttgttctttggcatatatattattaaatctcctttggcgaagt

SEQ ID NO: 10050 - DNA, 1766 bp, Oryza sativa
  ref <308>: DATABASE ACCESSION NUMBER: AK107398
  ref <309>: DATABASE ENTRY DATE: 2002-08-28
gttgcctcgcctcctcgccgtccggcccacccaccaccccggcggcggcggcggccatggattaccgggcgctcatgacgatggagaaggtccttgttcagatggagaaggacggcgtggactcgcggatgctggacctcggcgccgactgcatgtgcaaactcctcgtggcatccctccccgacccgcccgtctaccccgacgccgtcctctcggccaacgacgacgacgacttgtccggcaccggcgccgaggaccgcatcggcgcgctccccgacgacctcctcggcggcgtcgtctcccgcctccctatcaaggacgccgtgcgcaccgccgcgctgtcttcacggtggcgccgcatctggctctccgcgccgctcgtcctcgtcgacggccacctcctcccgccgggcgaggaggcgggccaactcgcgctcgacgccagcggcgccgtcgccgccgcggtgtcgcgcgtcctcgaggcccacccgggccccttccgctacgtcgagctcacctccaccgccatgggggctcgcgctcgccgcggcgacctcgcgcgctggctccacctcctcgccgtcaagggcgtccgcgagctcgtcttcgtgaaccgccgcaggcccttggacgtcgccctccccgccacggtgttcgccctcgcgcccctcagccgcctctacctcggcacctggaagttcccggacaccgccgccctcccgcgcggcgccggcttcccccacctccgggagctcggcctctactgcgtcgccatggaggaccgggacctcgacttcgtcctcgccaacagccccgtcctggagtgcctcggcatctactacagccagaggcagattgtgctcctccgcctcgccagccacagcctgcggtgcgtgcagatctgcatgtgcatcgcggaggacatcgccgtggtggacgccccgcgcctggagcggctattgatttgggagatgtttgaggatgacaaccatgccaccagattgagcattggccatgcccccaatctacagttgctgggatacttgaggccaggaatacatgtcctggagaacggcaacaccatcatcaaggctgggacaaaggcgagcccaagaaccatcatcccaagcatcaatgtattggccttgaaggtgcgttttgaagtccgcaatgaagccaagttgctgcctagcttcctgagatgctttcccaatgtcgagaagctgcacgtcaagtccgagaaatcagatgaaccggttggcaggctcaacctcaagttctggcaggaggctggtcgcatagaatgcttgcaatcgtgcatcaagtatgtggttttccatgggtaccgaggggatcgtagcgagctcaccttcctgaagtacatcctgggaagtggacaggtgctgcaggagatggtgatcgtggtcgcgaatggaatgttctccacacaggatgaggtgggcgagaaactggtgaagcctctgagttctgtcaagatggccagtggagactgtaatataacggtcgttgagggcacagttcatgatgaagaagattcttgttgcctccgtgatgcgtttgatttttctatcgatgacccctttgatcgctacttatagggaactcaatgctgcctgtgtttgatcgtcaagtggtttctgcattgtgcaccctaatttgattgtgcagatacctgccagtcagatattatatgattcatgcagtcactctgataatctctgtatgttttcttctactgcgtgtgc

SEQ ID NO: 10051 - DNA, 1327 bp, Oryza sativa
  ref <308>: DATABASE ACCESSION NUMBER: AK107399
  ref <309>: DATABASE ENTRY DATE: 2002-08-28
gtccttgcaaatgaaaatgcagagaactcaaactgagccacttgagctccatgtcgtcttccccggcgagctcagcgacgacatcttgctcctcctccggtgatcgatcaggctggccgttgccggcggcgagctcagctcgctttacgccggctcgcgcgggcgcgccgcccagagcgagctgagcgcgcggaggcgctggcagtagtcgccgagcgcgaggagcccgcgcgccgcctgcggcagcgtcaggatcttgtacatgttctgcagcgtctcctgccggagatggtcggcctgcacgtcatcagcaagatgtcagccgagctctgctcgtcgtcggacatggagatgggaggtaggtggtggtgatcggcgatggcgtacatggtcgacgaacgcgacgaggttgctgagcctgcccatggcgctccccatctgcgccatgtagcatccgccgtcaccggcggcggaggacgacggctcctcctcctccggcggcggcggcggcggcgaggcgtcgcaggaggtggagacgacgacggcctcggcgagcagcgagtcggcgagcgtctgcttcagcttgtccatgccctgcgacagcgcgtcctcgaggtggcgcgccttctgctggagcccctgcacgtcggcggcctgccgctccgtcatcggctccagctgcggcgcgagcaccctgatcacctcggaggggcggaacccggcgatccagaggaagaaccgctcggcgccggtgcgccacacgccggacatcacgaagaacacgtcgcgcctcgccgcctcacgcttcgccgcgaacagcctgtcgtagtgcgccagcgccgcctccaccaccgcccggagctccggcccctccgccgccgcctgcagcgacgccctcagctccgccgtctgcctcccctgctcctccacccactgcgcgtactccacctcgaacgtcaccacacctgaacacaacaaatcaacaaaattccatcacaattcttgtcgagctcgatcaatcgatggattcttggagagaagctgacctgaatcgatgggcgctggtagggtggctgggttgctgctgcggttgatgtacgcgctctgcatagctcagccatacgtcagcaatgacagccatggagaagaatctgctcgtcacaagctggttttctttttctttttcttttttttgttcttacctgttgccttgctcgggtgatctcctgctccagatgcgccagcttcatccggctcgtctccaggttctggatgtaagcctgtcacaaaatcaaacaaacctaaattaaatcatatctttgaatac

SEQ ID NO: 10052 - DNA, 1436 bp, Oryza sativa
  ref <308>: DATABASE ACCESSION NUMBER: AK107400
  ref <309>: DATABASE ENTRY DATE: 2002-08-28
atatggtgcctaggtaagctagctagtactaacgacctcgcacgctgctctcgcaagctctctcggccatggcggtcggcacagttcccgatagccaggatcttccacgccgctatggtggaagggtcaccaccttcgtcgtgctctcctgcatcaccgcgggcatgggaggcgtcatcttcggctatgacatcggcgtctctggtggtgtgacctcgatggacggattcctgagcatgttcttcccggaggtataccggcggatgaaggggactagcgtcagcaactactgcaagttcgacagcgagctgctcaccgccttcacgtcatcgctctacatcgccggcctcctcaccaccttcctggcttcgtcagtcaccgctaggtgcggccgccggccgtcgatggtcatcgcggggagcgcgatcctcgccggctcagcgatcggaggaaccgcggtgaatgtctccatggtgatcttgggcagggtgctgctcggcgtcgggctgggcttcggcaatcaggccgtgccgctgtacctgtcggaaatggctcctccgctgcaccgaggagcgttcagcaacggcttccagctctgcgtcggcatcggcgccgtcactgcccgcctcaccaacttcttcacgcagaagatcaggcaaggctggggatggcgcgtctcgctcgccgtcgccgccgtccccggcgggttgctcaccctcggcgcgctcttcctcccggagacgcccaacagcctactgcagcaaggcagagacaagcgcagagttagggtgcttctcaccaggatccgaggtgtcagcgacgtggaggacgagctggaggacattgtggccgccaatagcgacaaggcgaacagcagccgcggcctgcagatgatcgtcacccagcggcagtaccgtccccagctcgtcatggccatcatgatacccttcttccaacaggtcactcctcatcccctgttttctttagatatgtgaattttttttttattctggtctcggcataaggcattccctcaaccatccattattacaaaattttaaccatatgctagccacaaatactatatacttaattaagcttgaatgaaaaccacctaagcacaaagcctatcatcgaccacccaccgatgcttgaatataagcatttttaaagcaccgtttactccaccaaccacaactcatttactacttttttaatagagaaatttcatgtgtatactgaaatttcacctaatccctttatatcttgagttttgctatttctcatgtatagcaccgaattttggttacccttttttttgttagtttgaccgttcaatttctatggaaaggatcattttgcccttaggtaaggaagaaacataaattttgtgaagtatattggtgaagtgtagaaatttattgtacgacactatt

SEQ ID NO: 10053 - DNA, 1377 bp, Oryza sativa
  ref <308>: DATABASE ACCESSION NUMBER: AK107401
  ref <309>: DATABASE ENTRY DATE: 2002-08-28
atttttacatgtctatcttttttgtgtgtagtacataaatgcaaataatgcgtctcttttctctcatcatagcctttcgatcggtagaagctagaatgccagagatggtgagggcgtcaacagccatctctgcgggaagagtcgtcgtcgtcgccggagcggcggcgttggtggttgtcttgctgtgcgcggcgccggcgccggcggccgtggaagctgtcccggccggcgccgaggtctccgagttcccggggttcgacggcgacctcccctccaagcactacgctgggtacataactgttggacatcagccgctaaagagacatatgtattactattttgccacttccgaaaggaactcaaccactgaccctgtcatcatctggataaatggtggcccagcatgttcaggatctagtgcctttttgcattcaatcggaccattgaaaatagagggacccatgattcatgccagagatgagccaaggaccaagttaaatcctttctcatggaccaagatgtctagtgtccttttggttgactcaccagcaggagtgggctattcttattctgaaaatgaagatgactatgtaacaaatgatacaagcagagtattggacctgtatgattttttatcgaagtggttttctgaatatcttgagtttctatcaaatcctttctacattgccggttgctcctatagtggcgtgatagtaccagttcttgcacaagaaattctgaagcgaaatgaagacaatggcagaataaagataaattttaagggttattcactgtgtaatccagctgttgatgtagaaattgaaaataacgcgtttgtaccttatgcatttcgaatgggattgatttcagatgaattatatcagaatttagttagtacgtgcaatgggaagtactggaataacaaaggcccatcttgtctagcaaacttggaacagtttcataagaagccaatgaggaatatgattttggtcagatgtttgagctcctttccgaaagctccgagtatggtttagaatgcaattggagatcatgccttgcttgtcccattttctgcaactttagagtggctaaaaacattgaactataaggaaattgagaaatggcatccatggtttgtagagaaacaaattgcagggtattcagttcggtatgaaaataatatactatttgcaacaatcaagggagctggccatgtcccatcagattacctgccatttgaagtatttgttgcctatcaaagatggatagatggttctgattctttatagtagtttgactaatgttgtgtcatttgtacatgaataatcttaactcagtaccaatatacaatggtgatataacctctgttttgaggcc

SEQ ID NO: 10054 - DNA, 2061 bp, Oryza sativa
  ref <308>: DATABASE ACCESSION NUMBER: AK107402
  ref <309>: DATABASE ENTRY DATE: 2002-08-28
ggcctcctccccctccctctcctccgccgccgcagctgctcccctctcctcctccgccgccgccgcctccttcgcggttggcctccgccgctcgtctcagcgatcccatctagagccttcggttcctccggcttacccgcccgagcctgcgcttcctccggcttctcgggcatggcggcggtgtctccgccgacgccgcagcagcagcagcagcggtgcgtggtggaggtgagggagggcgtggagctgacggagaaggaggagcggatcttccgtcgcctgctcgatgtcgtccgccacttcggcctcggcacccagctccgcgtcgccggcggctgggtcagggacaagctattggggaaagactccactgacattgatattgcacttgataatatgacgggccagaatttctgcgagaaagtaaatgagtattcagaattattgggtgaggaacagaaaggaattggcgttattcagtgcaatcctgatcaatcaaagcacttggaaactgcaaggatgcttatattcgacatttggattgactttgtcaacttgaggtctgaaaaatatgctgaaaacagtcggattcctaccgtggagattggtacagccaaagaagatgcattccgtagggacctaacaataaatagtttattcttcaatatcaacactaacacagtggaagatttaaccggaagaggtattgaagatctgaaaaagggtcttattgttactcctttacctgccaaagctaccttcttggatgacccccttagagttcttcgagcaatccgatttgctgctagattcaactttacattaactgaagatttgaaagatgctgcttctgatgaaaaggtgaagtctgaacttggtagcaagattagcaaagagcgcatcggtcatgaggtagatcttatgatgtcagacaaacatcctgttaatgcaatgtgttatattcgtgatttggggttattttatgttgtctttgcttttcctgagaagcccgaccctccagttcctgacaaatgtgaccggctttgtgtttcacatattgaagttgcatggaatcttgctcattctattggctgctctgtgttcagtggtggttctgattccaagtcacaggatgagcaccgaaggctttgcttttatagtgcactattcactcctgttcggaatacaatatatttggataaaaagtcgaagaagattcctgtcactaactatattattcgtgactctctgaagttaaaagctagtgatgctgacacggttgtcaacgtacatgctgcaagtgaaaagtttgctgaattaattaatctccttgagtcgaatgaaaatctgacaactgtgaaagagaaattggatgatgaataccttgagatcccaacagactcagttaaacgtgttttggcagggcttatacttcgggagataaaggacttttggcgtgtggcactgtttatctgcactcttacctacccggaggttagcagtggtggtgattctctcggccagccagacgaattacatcaaaggaaagaaaaatacacaagagctgaacgtttaataactgaactggagcttgatggcgtatggaagatgaaaccgttgcttgatgggaaggccattatggggattatgcaggtcaagggaggtccacttatcggaaaatggcaacaacgactgttgaagtggcagcttgcttatccaaggggaaccacggaggagtgcatcgagtggatgaagcagtcgcagtcgaaacggcaaaaagtatagcgcaacacctgagaatcttctgccacatcaacattttgctggagcattggcagccttcagaattctgatagggcacaaacttaacttcccaagttcctaggagtgcagcgttatcttgcgtgacatgtaacagcgcgttgttaggagtatagctttatcttggccgtcttctcttccgggtatccatggttgaaatttgcaaaattttgtggtcgaatatactgtactgttataccctatgatgaaagaggaaaatacttagtgtattagaggagc

SEQ ID NO: 10055 - DNA, 2954 bp, Oryza sativa
  ref <308>: DATABASE ACCESSION NUMBER: AK107403
  ref <309>: DATABASE ENTRY DATE: 2002-08-28
actgctaagtggccccctcccaactccgacgaccccgccgccgccaccgccgccgccgccgatgcagaaccccaacggcaccatcctccagctctaccacgccggcaggctcgccgccgccctccgcgccttcgagtcgctcccctcctcctcccccgcctccgccgccgccgccccagcccctctcaccgccgcgacctacgccgccctcgtctccgcgtgctcccgcctgcgctccctcccgcaaggccgccgcgtccaccgccacctcgtggcctcctcatcctcctcgccggatgcacagctcgctgggaacaccgtcctcggcaaccacctcatcaccatgtacgggcggtgcgccgccccggactccgcccgccaggtgttcgacgaaatgcccgccaggaaccccgtctcctgggcctccgtcatcgccgcgcacgtgcagaacggccgcgccggtgacgctctcgggttgttctcgtccatgctacggtcaggaactgccgcagaccagtttgccctcggcagtgccgtgcgtgcttgcacggagcttggggacgtcggcaccgggaggcaggtgcatgcgcatgcgttgaagtcagagagaggcagtgacctgattgtgcagaacgcactcgtcacaatgtactccaagagtggcttggttgacgatggattcatgctctttgagaggattaaagataaagacttaatttcctgggggtcaattatcgctgggtttgctcaacaaggttttgaaatggaggcactacaggttttcagggagatgattgttgagggctcgcatcatccgaacgagtttcattttggtagtgcctttcgtgcatgtggggctgtgggcagctgggagtatggagagcagattcatggcttatccatcaagtataggttggaccgtgatttatatgtaggatgctcactgagcgacatgtatgcgcgatgcaagaatctggactctgcaagggtagcattttacaggattgaggcaccggatttagtttcttggaattccatagtaaatgcatactctgttgagggcctacttagtgaggccttggtcctgttctctgagatgagagactctggtttgaggcctgatggtattactgttaggggcctgttgtgtgcatgtgttggccgtgatgccctatatcatggtaggctgatccactcctacttggtcaaattgggtttagatggggatgtttcagtctgcaattctttactcagcatgtatgcaaggtgttcagatttatcctctgcgatggatgtttttcatgagataaaggatcaggacgttgtaacctggaacagcattcttactgcctgtgcccaacacaaccatccggaagaagccctgaagttgtttagtctcttgaacaagtctgaaccgagtctggataggattagtttaaacaatgtactgagtgcttctgctgaattgggttactttgaaatggtgaaacaggttcatgcatatgctttcaaggcaggactagtggatgatagaatgcttagtaatactctaattgacacttatgctaaatgtgggagtttagatgatgccatgagactctttgaaataatgggaaacaatcgtgatgtgttctcttggagcagcttgattgttggatatgcccaatttggttatgcaaaggaagcatttgatttattttcgaggatgagaagcctaggaatcaggccaaaccatgtaacgtttatcggagttcttacagcatgcagccgagtcggttttgttaacgaaggctgctattactacagcattatggagcctgagtatggcattgttccaacacgagagcattgttcatgtatcgttgatttgttggctcgtgctgggaaactaactgaggcagcaaattttattgaccaaatgccatttgagcctgatattataatgtggaagaccctgctggctgctagcaaaatgcacaatgatatggagatgggaaagagggcagcagaaggtattctgaatattgatccttcccattcagcggcctatgtcttgctgtgcaacatatatgctgcttctggcaattggaatgagtttgcaagattgaagaaggcgatgagaactagcggcgttaagaaatcacctgggaagagttgggttaagctgaaaggggagctaaaagtctttatagtggaggacaggtcacatccagagtctgaggaaatatacgcaatgctggagttaattggaatggaaatgataaaagctggttatgttccaaagcattcatggaaacatgctattgttgatcatattgatagtgatttgttcaatgaagagatgctagctgaatatggttgagtgggagataaagaaaacagtaattgctgactctggggtattcgcatgtcttccttgttgtaagaaatacttgttaatcaccaagataattattaaagctttgtcagaattacaatgcaacatacagaagttgcataagcttggcatcatgcaccatttgagaacttaccagtatgttatagattatattttgcctaaataatttgaaagaagaagtgggttcgacaaatcatgcatagtcagcctgctgaaggagctaagctattcatgtaatcttgctaatgatatgcgaagcacaactggggcttatgtatttgtttgatctgtcacatatttctgccaagtaagatttaatccagtgagccatacacaagggggcattccttttcctcatccagcttgctactcctttctttggcttccagatatgaacttggctaacctgaggaaatgcgttttgcaaggttcgttgactgtgatcttgctatttgatacatgaaggcaggctgtatttgttttatcagccagatatttctgctatgtaggtttcagttcagtgcgctatacacaagatgagaacttgatctcttgc

SEQ ID NO: 10056 - DNA, 1415 bp, Oryza sativa
  ref <308>: DATABASE ACCESSION NUMBER: AK107404
  ref <309>: DATABASE ENTRY DATE: 2002-08-28
gtgtgcacgccggcgctactcgctgcaatacaaaaccctctcgcctagactcgcccctcgatcgagtcatcgagccatggaaagcccgccgcacgccaccgcctccgccgacgagatgccgagcatatggaaggagcagcacgcgcaggacgcgccgccggggttcgtgccgccgatgggccccggcgaggtcgccgccgtggagtcgctcctcggctacgagttcagggacaaggcgctggtggaggaggccctcccgcacggctccttctactacccctaccgccccggcgtgacctacgagcgcctcgaatacctcggcgacgccgtgctcacctgcgtcgtgtcgcgggaggtcttcctcacctacggccagctccagccgggccccctcacccgcctccgcgccgccaacgtcgataaggagaagctcgcgcgcgtcgccgtcgtgcacggcctccaccacttcctccgccacaaggcacccaaccttgacggccagattacagatttcatagaagaattgtcgatgtacccaattcactccaacggattattggatcctccaaaagtgctctgtgacgttgtggaatcccttattggtgccatatattgtgactccaacttcaaccaagaaatagtttggcaggtttttcaaaagttggctgatccacttattagtcttgagacattaggcaagcatcctgtaagcgagctttttgagttttgccaaaaaactcgccgaggtgtgaaaattgtgaaggatgaatgggataagaatttgacagttgaagtattgattgacggtgagatggttggaagggcaacttatgctcaaaagaaggagatagcgcagaatcgtgctgcaaaggctgctctggataaattaaaggagacattgggacaatcccaaactgaaccaatgtcagcagaagtttccgaacaattcaataaaatagatctaactggaagttgaaaagttcagtgcagtggcaaaccaaggcctcaggccacctaaggctatgggcttggcctgggacagaaagtccattggattacctgtttttcttttctttttttttataaacaaatcttactgcttaggatgtggctcatcccatagagtaccagcccggtactcgcctaaatcctattggtctgccgctggttggggctaatcattcatcgatgtcaaaaaaagtaaggtggatttagataactaattcttttacattttattttattaagttgaaatgtaattatcgatatgtaaaatatattgaagtcattatcaagatttcataagccaatggtttttctaagttaacttgttaggtgttcgtgagttgcaacaggaaaagaagtatgtatcaatttagaatcacatcatgtaaaccttaataatctttgagcgt

SEQ ID NO: 10057 - DNA, 1276 bp, Oryza sativa
  ref <308>: DATABASE ACCESSION NUMBER: AK107405
  ref <309>: DATABASE ENTRY DATE: 2002-08-28
aaaccaaacccctcgcctccgctttgaccaccgccgcgccgcgccacgccgcgccaccgtgagagagggagacagatggatccggtgacggcggcggcggcgcatgggggtgggcaccaccaccaccaccacttcggagcgccaccggtggcggcgttccaccaccacccgttccaccacggcggcggggcgcactacccggcggcgttccagcagtttcaggaggagcagcagcagcttgtggcggcggcggcggcggctggtgggatggcgaagcaggagctggtggatgagagcaacaacaccatcaacagcggcgggagcaacgggagcggcggggaggagcagaggcagcagtccggggaggagcagcaccagcaaggggcggcggcgccggtggtgatccggcgtcccaggggccgccccgccggctccaagaacaagcccaagcctccggtcatcatcacgcgcgacagcgccagcgcgctgcgggcgcacgtcctcgaggtcgcctccgggtgcgacctcgtcgacagcgtcgccacgttcgcgcgccgccgccaggtcggtgtctgcgtgctcagcgccaccggcgccgtcaccaacgtctccgtccggcagcccggcgcgggccccggcgccgtcgtcaacctcaccggccgcttcgacatcctctcgctgtccggctccttcctcccgccgccggcgcctccctccgccaccggcctcaccgtctacgtctccggcggccaggggcaggtcgtgggcggcacggtcgccggaccgctcatcgccgtcggccccgtcgtcatcatggccgcctcgttcgggaacgccgcctacgagcgcctcccgctcgaggacgacgagccgccgcagcacatggcgggcggcggccagtcctcgccgccgccgccgccgctgccattaccaccacaccagcagccgattcttcaagaccatctgccacacaacctgatgaacggaatccacctccccggcgacgccgcctacggctggaccagcggcggcggcggcggcggccgcgcggcgccgtactgatcaacatcgatctcgccggagagaaaaaaaatggaggagaaggatcggagcgagccgtgcatggtgtaggatgaattaagctaagagttaatttcttcttccgcctttgctaatcatgatgctctcgtgttgtttaatctgtggcaatctgcttaattgcaagctcatcactgcaattaagcagcagctaaggatggttggatggttaaaactg

SEQ ID NO: 10058 - DNA, 1445 bp, Oryza sativa
  ref <308>: DATABASE ACCESSION NUMBER: AK107406
  ref <309>: DATABASE ENTRY DATE: 2002-08-28
aaaccaacgcccaagcttgctctgtacctctcaaacctcgatgaccaacgcctcctccacttccccatccagtacatctacgtcttcaccggcacccttgacatggatactctgaaggtggcactctctagagtccttgttgactattacccactcgctggtaggttgagggctagcaatgagcacgatggcaaactcatcattgactgcaactcagagggggttctctttgctgagggatttctgcccggcctcactgctggggacttcatcctagggcatgccaagcctcataagtcttggaagaagctgctctataaagatgagcagagctttgtgtgcacgccaccactagtcgtacaagtaactcacctcagctgcggtggcaccatcctctgcaccgccatcgcccactgcgtctccgatgccttcggtgccgcgcacttcctccgtgcctgggcgcgcgccgccatgtccgaagactccgaactcgcgcatcccgccgtcgcgccctgccacgaccgccgcgccctcgcgccgcgctgcaccccgcgcatcgcgttcgcgcacccggagtacaccgctgccagcgggggcgatgacgcctccgccgtcgcggaggcctcgtcgcgcctcttcgccccgccgctgtcgccggtttccgtgaccttcacggccgcgcacgtcgcgcggctcaagaagctgtacgcgccgtcggcgtcgcctctcgagcagtgcacgtccttcgaggcgctcgcggcgcacgtctggcgcgcgtgggtccgtgccctcgacccgccggcctcactccccatcaagctcctcttcaccatgggcatacgccggctggtcaagcccgagctgtcgggaggctgctactgcggcaacggcttcgtgctggcgtgtgccgagtcgacggccgggcagctggcggcttcggcgcccgacgcggcgaggctggtgcaggagaccaagcagcgggtcgacgacgactacgtgcggtccgtgatcgacctcctggaggtgcggcggggctgtttgccggacttggcggcgaccttcacgatctcctcgctgacgcggcaagggctggaggacatcgacttcggggcggggacgccggtccactttggcccgcttaccagcgaggtctactgcctgttcctcccggtgaccggcgacccgcgcggcgccaccgcgcttgtgtccgtcccgcaggccgccgcggacagcttcgagcgttgctgccatgatggactggatgacgtggacgtggaagacaagaatcagctgcctaacataggagatggcatggcatcctaaaatcctaggcgtttgaatgccatatctcttctagaaacaatatattcatatgtctctccatttggctccaaaataataaaataactagtatggtggtccgcgcagattacgcggctagtatc

SEQ ID NO: 10059 - DNA, 1587 bp, Oryza sativa
  ref <308>: DATABASE ACCESSION NUMBER: AK107407
  ref <309>: DATABASE ENTRY DATE: 2002-08-28
ttttattcatcacaacaccatccatccatcttaattcgcttctacattggggcgcttgttaatttacatgcgagcttgttgaggttgaagcgatcgggatcatcgttgagagctgtagtacgtggtgagcatgggagagcagcagcagcaggtggagcggcagcctgacctgcctccgggctttaggtttcacccaacggacgaggagatcatcaccttttaccttgcacccaaggttgtggacagcaggggcttttgcgtggctgccattggagaggtggatctcaacaagtgcgagccatgggacttgccagggaaggcgaagatgaacggggagaaggagtggtatttctactgccagaaggatcggaagtatccgacggggatgaggacgaacagggcgacggaggcgggatactggaaggcgacggggaaggacaaggagatcttccgcaaccaccacatgctcatcggcatgaagaagacgctcgtcttctacaagggcagggctcccaagggcgacaagaccaactgggtcatgcacgagtacaggctcgccgacgcctctccgccacagccgccgccgccgccatcctccgcagagcccccgaggcaggacgactgggccgtgtgcaggatcttccacaagagctccggcatcaagaagccggtgcaggtgcccatgcagatgccgatgcagatgcagatgccggttgctcatcaggtgcccgccgccaactaccagcagcagatggccatggcctccgccagcatcatccaagtccccatgcagatgcagatgccctccatgtctgaccagctgcagatgttggacgacttctccaccggttcactcatggcgccgcctccgcctccgccttcctactccactctacctggcttcccgcttcagatcaacggcggcgcccagcagtttgttgggaacccgtcgatgtactaccagcagcagcagcagcagcagcagcagcagatggacatggccgccggaggcttcgtggtgagcgagccgtcgtcgctggtggtgtcgccgccgccaacatggacgctaccatctggaagtactgatacatacatacatacatacatacatacatagatacatacatgcatgcgccgatgcgcgagtgtgatgacagagggtggtgggttaattagctatactccatttttatgcatatgcatcatggcttttgcattgcctttggcttcttgtgtgatcgatgtgagtgagatttgctgagagattattagttattatagattggctagctatattatcatatactgtatgtactaataatatgtgtgtaccagcaatatgtatgtgtgtgagcgtgcagccgtgcaccgtatagcaaggtatagttacaggtatatacatacaagatatatataggtatacatgcatgcgtgatagataaatgtgtgtactgcatgtatttgtgcgtgagcccagcttgattgtgttgtacatagctagcagtgcatgccttctatccctccgtacggattgaattatgtgaattaattattttgtttaattataacatgcatggtgtatggtgt

SEQ ID NO: 10060 - DNA, 1764 bp, Oryza sativa
  ref <308>: DATABASE ACCESSION NUMBER: AK107408
  ref <309>: DATABASE ENTRY DATE: 2002-08-28
acatttttcctgacttgagttggcactgcaagtcttgtatcacagcagcacatgtccttgtaatcttcccccgcaggagcatcattctttcccaggactcgccttctatgagtacgcaaaatggcaccctcttccacatcctcctcagcacccgctggcccacagcaatcttcccacccggccaccgaacctgaacatcaaacgaccgagtctgagaaaaacactgaatacgcctccattatacctgcaccacggactgaggacgaccaacaaggccgtctccaactccaacgcacagtctcatcagtcagccaccatgacatggccaatgtgcaatacgtcgcaacaggcgacaacgacaccatctacaacaagttcaccccacggcgaaaaatggtcattgtcgccgtcgtctccttctgcagcttcctagcccccatctcctcgacgactgtcctctccgccgttcccgaagtagcaaagaccttttccacagacggctccatcatcaacgtatcaaacgccttgtacatgctcttcatgggcctatccccctgtttctacgggccctacggaaacatctacggccggaaatgggtcagcgtagcaagtgcagcgttattcaccgcattcagcatcggcacggcgctgagccccaacctcgctgccttcttcgtcttcaggatcctgaccgcgttccaaggcaccgccttcctcgtcatcggatcagcagtcataggtgacatttacaagccgacggagcgcgcaacagcgctaggctggttcctgtccggcacgctgattgggcccgcgctgggcccgtttatcggtggaattatagtcacgttccgctcgtggcgcgacatcttttggctgcagacggctcttgctggtgccgcgactgtgttttgtttcttcctccagcccgagaccatacacaagaagcgcgccgatgaactcgccggcctgcctgcaaagcagcgcgcaagcaaaatgtgggcgtggctcaaccccttccgcgtcgtgagattatatcggtacccgaatattctcctcacggccctcgcgtccgctagcttggtctggaacatgtacagcctgcttacgcctatccggtacgtgctcaatccgcggttcgacctgcagacgcccttgcaatcgggactcttctacatcgcgccgggctgcggatacctcgtcggcaccttcttcggcggccgctacgcagaccacgttgtgaagaagtatatccagaagcggggccagcgcgtgtcagaagaccgtctgcggtcttgcgtcttcttcctcgggggcgtcatacccgcttgtatgattgtgtacgggtggagtgttgagaagcgcgttggcggtgttgcgctccccgtcatcatgatgttcctccagggcgtggcgcaattgttttgctttcctagtctcaatacgtactgcttggatgttatgcaggggaggagcgcagaggtggtcgcggggaattacttcatgcgctacatgtttgcggcggcggggtcggcggtgtgtttgcctgctgttagggcgattggcgtaggctggttttcgacaatcagtgcggggttcttggttgctggggcgagtatgacttatgcgacggcggtttgggggagggagtggagagaggggattgaggagaagaaggcggcgaggaaggagggggatggcaaggtgtagaggatgaatagagtccgaagaaaccgcccacttgtaaatcacaccggtaacgccgtg

SEQ ID NO: 10061 - DNA, 2780 bp, Oryza sativa
  ref <308>: DATABASE ACCESSION NUMBER: AK107409
  ref <309>: DATABASE ENTRY DATE: 2002-08-28
aatcgtcctgggtctctatcacgaagctacatcaacagtgacagcgccgccgacgacatcacctagactcaactccagccgcactgttcagctcgttccgtccgccatcaagatcgaacaccgggctgttccaacgctctccacgtccgctgctctttcacacggtcaatatggtcgccatccctcgagtggctgctgcgcgctcgttggcgcgacagctggccaggtacaacattcgagtcggtggcatctctgccactcctttgcgcgtcgcagtggctgcggtgccgaccgcatcgtcgagccgcgcgccaagctctttccgcaactttagcatctctacccaccgcagtgcagccgccgcagctgccgtcaaggcgccaccagcgcaagacgccgcagcacagtccgcgcacgatggctcgcatcagccaacatcagaactcaccgaggccgacttgagccgcctcgttcgccagcgcaacgttggtatctcggcacacatcgacagcggcaagaccaccttgaccgaacgcgtcctcttctacaccggaaggatcaaggacatccatgaagtgcgaggacgtgatgccgtcggcgccaagatggaccacatggagctcgagcgtgagaagggtatcaccattcagagtgctgcaacctactgcagctggaaggccaccccgccgacagaaaagtcgagcgtcagcggtgacgccgccgacatcgagtctaaggacctcatggccaagaaggaggacttccacatcaacatcatcgacacgcccggtcacgtcgacttcaccatcgaggttgagcgtgcgcttcgtgtgctcgacggtgccgttctcgtgcttcgcgccgtctcgggcgtgcagtcccagaccatcaccgtcgacagacagatgcgccgatactcggtgcctcgcatcagcttcatcaacaagatggaccgtgccggctccaacccatggcgcgtcatcggccagatccgcaacaagctcaagatgcctgctgccgccgtccaggtgcccatcggtgccgaggacgactttatcggcctcatcgacctcatccgatggaaggccgtctacaacgagggccacaagggtatcgagatccgcgagaccgacgagattcccgcagagtacctcgagctggccaaggagaagcgcgccgagctcatcgagcagctcgccgaagtcgacgacgagatgaccgagatcttcatcgaggagcgtgagcccaccatcgaagagctcgctgctgccatccgacgcaccaccacccgatgccaattttcgcccgtcttcttgggctcggccatcaagaacaagggtgtccaggccatgctcgacggtgtgtgcgcctacctacccaaccccgctgaggttcctgccaccgccatggacatgagcgcctctgccaccaagaaggctgccgaggaggcggccaaggcggcgggcgaggatgaggaggctgccgccgaggcccgcaggaacgctgcaccacccgtcctgccactttcgcctgcctccgaggcaccgctggtcggtctcgccttcaagctcgaggagggcaagtacggtcagctcacctacatgcgcgtctaccagggcacgctcaagcgcggcaacctcatcttcaacgcacgcacgggcaagaaggtcaaggtgccgcgtctggtgcgcatgcactcgaacgacatggaggacgtcgaagagatcggagcgggtgagatttgcgccatgttcggtgtcgagtgctcgtccggcgataccttcaccgacggcactacgcagctgagcatgacgagcatgttcgtgcccgagcccgtcatctcgctcgccatcacgcccgagggcaaggagtcgcagaacttctcgcgtgcgctcaaccgattccagaaggaggaccccaccttccgcgtgcacgtcgacaaggagtcgaacgagaccatcatttcgggaatgggcgagcttcacctcgagatctacgtcgaacgcatgcgccgcgagtacaacgtgccgtgcaccacggcaagccgcgcgtcgctttccgcgagacggtcgagaagaaggccacgttcgcctacacgcacaagaagcagacgggtggtgcgggtcagttcggtcgtgtcatgggctacatcgagcccatggaggtggaccccgagacgggcgtcgacacggccttcgagaaccgcgtggtgggtggatccatccccaacggctacatcgctgcctgtgaaaaaggattctacgatgcgctcgagaagggtgcgctatcgggccacgctgtcacgggtgttcgcttcgttcttgaggacggtgcggcgcacagtgtcgattcgtccgagcttgccttccgactcgccactgccggcgcgttccgcgaggcttaccagaaggcgaacccggtgatcctggaacccaagatgaccgtcgaggtggtggcacccattgagttccagggtgcggtcatcggcgctctcaaccagaggaagggcaccatctcggacaccgaggtgcgcgaagacgagtttacgctcaccgccgaggtgtcgctcaacgacatgtttggctacagctcgcagctgcgtggtctcactcagggcaagggtgagttctccatggagtacaagtgccacacgcccgtcatgatgaacatccagaaggagatgcaggaggcctaccgcaagaagcagaccgagaagaagtagccgcgttgcggtttttgtttctgtacgactttgatagacaagattggatttcccccac

SEQ ID NO: 10062 - DNA, 1569 bp, Oryza sativa
  ref <308>: DATABASE ACCESSION NUMBER: AK107410
  ref <309>: DATABASE ENTRY DATE: 2002-08-28
aacgacctatcaactctcgactccagtgctgagcacgaacaacacccatcatgccgcccatccccggcatggtccactggcatagcctcctcgcgaggcatgccaaaagtctcaagactgcctggatccgcgccagcagagcactcgatgctcaactggtcagaggttcccaggcacagcttgaacccatcctcgtacgcaacagcaacaggcacccgttacacaaagttgctcgcatccgccaaagccaatctcgctggtacagcactgcccgtggctccttcgaggccacagtgaggcacttctcgaccgctggttcccggcccggatccaagttcgaccgcgcctctctgcccaagtcgagggtcagcgcccagatctcccagtcgtctggtcgtgcaccattcgcttcgacactacgaccgagcttgacgggtggaacactgggaaggacagcaggaggatacacactcgggtcaggtcgtattggaggtgcacggcacttctctcatggccctgctgctcaggcacaggttgtgcagaatgtctcgcaagccgtgcgtgccttcttcatttcgggtcagaaggctcaatttggtggcgtgtctcccacgaccggcgagaagcgctacaaggccgtgaccgcgctgcaggatgagacaggccgcaagatccgttccatcccgcagatcactcctggctcctgggttgacttcccaatcaaccccactatcaccgcccttactcccctcaatggtcttactggcttcaactccaacacttccgagtcggtcgaccacctcaacaccgacggcctcatcaatgtcctgtccgtggacttctcccgggcattgaaaggcctcgccgcagttttgaacgacttgaagcgtctatctgcgttgggagatctgccaataacctaccaaggtgccagtctgcgcgtgcacttccccggctgcgattcagacacagtggaacgcatgtgtgcagaacttaacatcacgcgaggcacagtcacacaagatgaggctttcgatgcattcgcgggtacacagatagcactgctatttccattcgctcccagcgaagacgtatccgaatgcgagagccttttcgactacgagcctgcgccccacaagcaaagtcctttgatccaccttgaagacatgcttaccccatcggaaagtgcccaagactactcgacacattccgactctggccttgaagatgtactcgcagatgacccatggctctcagatccttctgggttcgaatcgattcgctccggcagcgatctctcagacaaagggaacccactcgagtatcaaggtatcgaagggatttatcgtttcctcgagcaatgtgacgctgtacgtcgctagcttaaggatcgagtcagattcgggcatggcgtttgtttggaatttgaaaacgatggacacgaagcaaccagcatcatcggctaagaatgtatacccccctcatgattgacaatcggtgttatgggattccttttgtttttgagaatagctgcaagatacttcgtatcgagagaatgttcttgctcat

SEQ ID NO: 10063 - DNA, 1479 bp, Oryza sativa
  ref <308>: DATABASE ACCESSION NUMBER: AK107411
  ref <309>: DATABASE ENTRY DATE: 2002-08-28
accatcaaccccctcccccaacacttcctccacatccacacccgatcctcacatccaaaatggctatcgagaagatccaggcccgcatggtcctcgactcgcgtggtaaccccaccgtcgaggtcgacatcaccaccgagaagggtctcttccgcgccgccgtcccctccggtgcctcgaccggtatccacgaggctgtcgagctccgcgacggcgacaagaacgcctggatgggcaagggcgtctccaaggccatcgacaacgtcaacaacatcatcgcccccgagctcatcaagtccggccttcccgtcacctcgcagaaggagatcgacgacttcctgatcaagctcgacggcaccgccaacaagggcaagctcggcgccaacgccatcctcggtgtctcgatcgccgtcgccaaggccggtgccggcgagcagggtctccccctctacaagtacctcgccaacctcagcggcgtcaaggccccctacgtcctgcccgcccccgccatgaacgtcatcaacggcggctcgcacgccggcaacgcccttgccttccaggagttcatgatcgtccccacgggcgccaagagcttcaccgagtcggtcaagatcggcaccgaggtctaccacaacctcaagaaggtcatcaacaccaagtacggcatcgacgccaccaacgtcggtgacgagggtggattcgcccccaacgtccagtcggccgacgaggcgctcgagatcctcaccgaggccatcgccaaggccggctacgagggccaggtgcacatctcgctcgacgttgcctcgtccgagttctacaaggagggcaagtacgacctcgacttcaagaaccccaactcggactcgtccaagtggctcacgggcaaggagctcgccgacgtctacctcggcttcatcaagaagtacccgatcacctcgatcgaggaccccttcgaccaggacgactgggaggcgtggtcgcacctgcgcgccaacgccggcatcaccatcatcggcgacgacctcacggtcaccaacccgctgcgcatcaagactgccatcgagaagaaggcgtgcaacggtctgctgctcaagatcaaccagatcggcaccatctccgagtcgatccaggcggcgcagctcgcccagtcggacaactggggcgtcatggtgtcgcaccgctccggtgagaccgaggacgtgaccatctcggacctcgtcgtcggtctgggcgtcggcatcatcaagaccggtgctccttgccgatcggagcgcactgccaagtacaaccagctcctgcgcatcgagagcctcgagccctcggccgtgtacgccggcatcgacggcttcacccagggcgagaccgcccccaaggtcattaccaacaagtcggcctaaactccgccccagcacgagtcgcctcggctgtggcgccgtagctccggcgttgtgtgcaattgtagatccgttgaaaagtgcg

SEQ ID NO: 10064 - DNA, 1560 bp, Oryza sativa
  ref <308>: DATABASE ACCESSION NUMBER: AK107412
  ref <309>: DATABASE ENTRY DATE: 2002-08-28
caataacaggtctgtgatgcccttagatgttctgggccgcacgcgcgctacactgatgtatccaacgagtatatagccttggccgacaggcccgggtaatcttgggaaatttcatcgtgatggggatagatcattgcaattgttggtcttcaacgaggaatgcctagtaagcgcgagtcatcagctcgcgttgactacgtccctgccctttgtacacaccgcccgtcgctcctaccgatccgcgcctctctctctctcccgtgcctccctccgagatccgctgcttcctctcccgcatcgcatcgccgctatcgactcccgtcgccgccccagtctgccctcccaccgccgcctctctcccgtcgatccaatccgccgcccagtcccggctccgatcccccctctctctctctctcgcaaaccctagctcctcgcgatccccgtcctccgcgcagccgccgatctccgtcgcgcctccaagagttgccgcccgtcttccgttgccgatccccgtcgaccacgaccacgaccacgaccacgaccacgccgcccgccgatcctccatcgccgccttcaccgagtcaccgcccgtcatccacgactacgtcgccgctgatcccccaaccgcacacggctctggaccaccatcgtcctgggaattcaccatctgaactcctagcctaaggagaaatccgccttggcatccgtcgttgcttttgagattatggaggccgacgacgacattaatatttttgtgaaggatatgaatgcgaatgacggtgagcggcacccgaggggggagaagcgcaggagggttgggaacgatcagaaggtgaaggtggatgaccgtgagcagcactggtgcgaggagaggggggagaagcgtaggagggttgggcatggccagcagaggagccaccagcgtgaccaggagaggagccaccagcatgaccaggagaggagtgtggagcgtgaccaggagaggagccaccagcgtgaccaggaggggagtgtggagcgtgaccaggagaggagccaccagcgtgaccggcataggagtgtgaagcgtgaccagcataggagtgtggagtgtgaccagcagaggagccgtcagcgtgaccagcagcagggacaagaaaaggtggtggggagtgaccacccgagtaaggagcagcgggggcgggaagaattcatcactatatccgacattgagacatcgtttgaatttgatggaagattagttggcaagagacttgtggatgctaagtatgacaagagatctacacctaaggggcataggagaagacacaagggacggcgcaggaggcgtagctcttcttcgacgtagctcttcctcgatacatatatgaccctatgtggcgcccccaaacctcgtgggtccggcggccacagtactgtacctgtgcaacatgtaccagtcccaggatacacaagctagtacacacagaacatcagtgatccacacttgcttaatttctgcagaattgtgctcaagtttctatacaccaatgatatgttatgagttctgttgtgttgacc

SEQ ID NO: 10065 - DNA, 1814 bp, Oryza sativa
  ref <308>: DATABASE ACCESSION NUMBER: AK107413
  ref <309>: DATABASE ENTRY DATE: 2002-08-28
caacttcagctttgctagcttcaagttccttggctagcatgttcttctgttcaatcagggtttccatttctgaactggcaatcttgtcattgttaaggtcttcttccgccgcttcgagcttcaacctaaggtcttctatctccaaccttaattcatcagcttccttatcagcagtatgaaaatcttctttctgcttggctacttcatcctccaaagacctgaccttatcctgaagtgcttcgatttcagattctttttcttggagcagagtcatttttgcatccaattctttcattgctgattctaaggactcgcccttgagaatgttagactgatcagcttcctccaacctgacctccaattccagtgtttttgtcttccatttgccaagtaactcctctgacctcgcgcgcgccttcttaacatcagcgatttcaacttcaagctgttcaaccacaccttccaattcaactgccctctgctcagcgacatttgctttctcaagctcaagcttcaatccagagttctcttcttcaagcttcctaatgtgctccacagcaccttttgacgagctccctacctcggaatcaagcagccctttgagatgcgccacctccgcatcgaggagcttgatcttctcggcattctcatctgaagccctcatggcatcatctgcctgggtaagcgccgcgttcttggcatcgattgcatccgctagctcatacctggcctgctcaagctgctccaccgtcgaacgcagtgcggccatgtcagcctcctgctggctctgcatgctcgccagcttcgtccgcagctcgtcctccatgctcgcgctcgcctgctccgcttcggcatcgccggactgctccgccgccgactcctccgccgccttgctctgcgcagcgagcgcctcctggagcttcgcattggcctcatcagccgccctcttggcacgctccagttcatccaggactttccccctctccttctccttctccaccaactcctccttggccttcacgagctcctgctgaactgcagccagcagcgcctgctgctcctgctcctgggacgacggcttcacggccaccggctcttgaggcgacggcttcgcggccaccgactcctgagcgggcttcgtcgccttcccttgcttctacaaaccataaaaaaaaaacactcagattccagccaaaaagcaagcagttttcagttcagcatcaccggcgagaggaggaggagcatgaattggcatacctctggaggggtggtgatccgggaggcgctcttcttgcggtcggccgagccgggggactgggacttgtcggcggaggggcgcggcggcgccttgggcacggccggcttcctcgcaatcttggcgctcttgggcgtcggcggcgtgcccttcgcctccgccttgccgttgctcttcgcctcggcatggccagatctgcagcgccaagaaaaaccgaaccgccgccatcagatcaaagaaccacaaggccagatctatcttgcccacaccaaagcaagatccagcaagccggagaagcttgctgcaccgatcaagaactcgcagcagagtgcgcaggagggttagccaatgcttacttggtcttggagccctgcattgctgcctctgcttccgcttctgcttctggttcttggttcgtgcacctctactactctaaccaaaggagtcgccttgaatgcgaaattggaggaaggagtggtgaggtgagcggttgtggccgctctgctgtgccactagtagaagaacatggaggagtggagggtggaattaacttgctgcc

SEQ ID NO: 10066 - DNA, 2027 bp, Oryza sativa
  ref <308>: DATABASE ACCESSION NUMBER: AK107414
  ref <309>: DATABASE ENTRY DATE: 2002-08-28
atactgcctcccgcttccgattgctaatcccgtgtcttggactgccatacgtgttctaaagtggccattgcgcctcagacaccgagctcaccacattcgctcgcgacatcgcgagcagacatacaacgaatatggcagacccagatcccacccaggcaaaggtcgtgatagatgagaaggagcagaaagacgtcaaggaagagtcgccaagtagtgaagcagcctctgccgcgccagactcagcaggaccaacacctataagcgcaaccacacagttctcgccgccgacctcgccgcctgactcccctcccgatgctcggaaacattccactatcgaggagtactactcgtcgcgacctaagcatgacaaactcggcaacccaatcccggaaaggaggaggcctcaaggagctatgtcctcggtgtttggaacagcgaaggtcagattgcctggagatttgggcgccaacgatccaagaaggccgcgatcacccgcaccaaactccctacctggcgatctgggacccaatgatcccaggagaccatcaagccgcaacgtcagcccagcgccttccggtcacagcaggcaaggaagtgatcctttggactcgccaggaggaagacgaattttgaaagacccgaagccgccgcctgcaccagagagcgagcccgcagacagcgaccaagatggagatgcggacaatgacacggacaacgaaagcgagcgtggcagacagaagaagaggcccgagcctggtcgtacaacagcaggcaaatcggtgaacgtcagaggcgacagtgcagactcagaggtcgtcttcccacagttccaaggagagcggaagccagatcccaccaagggcgaaagcgcaatctctttcaaacttacaacacctgccgagaaggcgaaaatgaagaagagagtacacccgatgagcgctttcgactctgcaccatctggattatccacacctgtaggctcagatgacgaatcacactcggaaatgctcgccgcacagaagctcagtctcacgatgtcagccgtccacagcacaccgtcggcgcatcgcgtcatccgacaaatcatcagaggcgactatgcacatttccagcgcgaggccgaggaaggtcgcaaacgtcaacgaatgtacctcgttgcaactgacatctctcccgaggctgaatacgccttggaatggaccattggcacagtgcttcgcgatggcgacactctcttcgcagtttatgcggccgacgaagaagcagccagcgaaggtggcgtagagatcggacacggtgcggagaatgttaaggacaccgccagaatcatccgagatctgcccgcaactaccaatgcagtacctcaagcgactaagccgtctcctctcgcacagagcgcgacccccggcgaaggtgccagcagaacccacagctcagcagaagcagaacgtcgtcacgcggtcgaagacatcacacaacgatgcgtgcgtctcctacgcaagacacgcttgcaagtccgagtcgtcgtagaagtctttcactgcaaatcgccacgccacatgatcaccgaactgattgatttcttgtcgccgactttggtcattatcggctcacgcggacgaagtgcagtcaagggagtgttgctgggtagcttctccaattacctcgtcaccaagagctcagtaccagtcatggtcgcacgaaagaaattgagaaagcatagcaagacagtcagaaatcgcgacggcactacggtgccgtacagcggcatcacagggcgagcgggtcgcctgagtaacgtgatcgaagcgccaaagggtaatggtttgagggtccaaggatgggacaaggtaggcattgactagaaattgcatgcgcattggggagctgggtaagcaacaatcgtacaataaagatggaccccgatccctatcgcacattcccgaaaccgccttggttcgccggtctcagagactcacacttcaatgtttccccaaatgtagtcagtcgaaagctcctccaacaag

SEQ ID NO: 10067 - DNA, 1999 bp, Oryza sativa
  ref <308>: DATABASE ACCESSION NUMBER: AK107415
  ref <309>: DATABASE ENTRY DATE: 2002-08-28
catcaattcgacgtctgtcccaagcttctctgtgaccgtccttcattcgaagatcgacatcaggtcgaccagcataaagcaagagacaatgtcctctcccgtagactccgtggcggacccggaccagtacacgctccgcaagactcccttccgacttcacgtcacgccgttcagcgagatcctcaacaaaaagtacgacggtgccggcaccaaggatgacccctatctggtagagtggctgcctagcgacgccgaggatccgcaaaactggcccgcctactacaagtggctgctcaccatccaggtcgccatcgccaccctctcggtcgcgttagcctcgagtgcctactcgggggctgtcgaatccttgcaggcgcagttccacccgtcgaaacagatcatcctcaccctcggtgtatcggtctttgtccttggattcgccttcggccctctcttttgggcacccttctccgaggtcgtcggtcgtcgcaacctcttgatcttcacctatgccgtcttcaccatgtggcaggccgtctcggtcgcctcgcccaacatcgagtcgctcatcgtcttccgattcctcgcgggcttcttcggatccagcccgctcgtcaacaccggcggtacgctcgccgacatgttcaacgcaaaccagcgtggcctcgccatggccatctttgccagtgcacccttcctcggccccgccctcggccccatcaccggtggcttcctcggcgagtcggccggctggaagtgggtcatcggcttcctcgccatcttcgctgcgatcatcaccgtcctgggtgccatctccatgcccgagacctacgctcccgtcctcctccgttggcgtgcccagaaactcagcgaggtcaccggccgccactacatctgcaagctcgacaagggtcgcgatcttcgcctcaagacccagttcaaggtggccctcagccgtccctggctcttgctcttctacgagcccatcgtcagcctgctttccgtttacatcgccgtgatctacggcgtgctgtattcgttgttcggagcctttcctattgtcttccaaaaaggccgaggatggagcccaggcatcggtggacttgctttccttggtgtcttggtcgggatgctcatcgccctcgcctatatcatctttttcgagaacccgaggtacatccggatcgcgactaaattcggcggaattgccccacccgaaacccgactcgtccccgccatgattggcgccgtggccattgtaattggtctcgccatctttgccgccactgacagcccagacctcccgtggatcgcgcccatcatcggcggcggtccgttcggtctcggcatggttctcatctttttgtcgaccatgtcctatctcaccgacgcctatctgatctacgccgcctcggtactcgcatccaacagcgtgatccgttcgctgttcggcttcgccttcccgctcttcacctcggacatgtaccagatcggcggaaagaacggcatccactggggtccggctatcgcgggcctgctcgcgctcatctgcctgcccttccccttcatcttctacaagtacggcgcgcacatccgcgagcgctgcaagtacgcctcggaggccaagcagatgctcgagcagatgcagtcttcgtccaaggccaagcagcccgcccaggctgtcaagcacgacgacgtcgacctcgagggcggcgagaagacggcgcgcaccgacagcaactcggacagcggcaaggcggccaccaccacccgccccagcctcgaggtggaccccagcacccaggcgcataccccggacgacgagtcgcactcgggctccggaagttcgcatcacggcacgcgctgagctgccactccatcacgcattcaccacaaaacacagcatcccctcatgcccatgtcacgcacgtagaagctcatacctgtactctaagcatcgtaccatcaattttgcacgcatcgaacgcagatcggcttg

SEQ ID NO: 10068 - DNA, 1471 bp, Oryza sativa
  ref <308>: DATABASE ACCESSION NUMBER: AK107416
  ref <309>: DATABASE ENTRY DATE: 2002-08-28
ggcgtaccggggcaggtcgcagtcggtcggctgccagcgccacttctggtaggagtcgtcgcggcggccgttgcgcatgcaggtgacctgctccgtcaggaactcgcactgcgactccttgtacaccggcgcgttcacctcgtcgtacacccagttgccgcggtacaggtcgcaggtgtccggcacgctcaccacggtccgcagcgccgccgtcgccgcggcggccttcgccgaggactccttctcggcggcctcctcgtcctcccgccgcctcgcctcgtcggcgccgccttccttgacactcgggagcgtcacgtcccgctccctctcctgcccctcgtccaccttgacaccggcgtcggcggcgttggcgttggcgttggcattggccttggccacctcaatcgtgctgttgttgctgctgctgccggcggcggccgccatcgccgtggaggcgggcgcgtcgaggacacggacgatgacctcctcgccgcgcttggcgatgctgccggcggcgaggtgcgcggcgcccacggtctcctggaggacgtggaggtcgggggacttggcgcggagcgcgccggcgccgaaggggaagtcggcgatggacttgatgtcctcgttgtagaggaacgtcgcgaacacgaagagcgcgaacaccaccgccgccagcgacagcggcgcgccgttcctgcgcgccgccacgccggcccccagcgccgcctgcttcatcgcgaacggcgccgaggcgaacaccgacttccgccgctgctgcatctccggagcgcccaggaaggcctcccgctccgccgctttaaagaaaacttaccaccaccaccaccaccaagccccggcctttcccggtggcttgcaaacccgagaagtaaaaaaagcttcttgctttgcttcccctctcttcctcttcctcctcctcctcctctctatatgagtatatggaatggattaatggagcttcttgctgagctctttgcctctttgcttagctctgtgtaggctaggaggctaggagctccttggcctggctgtccttctcgactggacacctcgctctcctatatatgtgtcgatccctttacaagtttggtgacttttgctggatgtttgcccttttctttgcttccctttggtatgtttggtttggttcgcctgctttcttcttttatggttgcaagatctcttcccctccaccaacacttgtaaactcccccctgttctagctgcttaattgaatctcattccctttcattttgtatatagagagatagagggtagtactactactgaggggtgggtcaaatgagtaacatgcaaggctgcaaagcttccatggggggtttggaggttaagctgttgtacacatgtaacaacacaggcaatgtgcgtgtgtgtattctactactagtattctatttgttcgttgcatgttttaattatatgcctactatatcat

SEQ ID NO: 10069 - DNA, 1491 bp, Oryza sativa
  ref <308>: DATABASE ACCESSION NUMBER: AK107417
  ref <309>: DATABASE ENTRY DATE: 2002-08-28
acgctgctcctcgatcggctctctcgcgctccctgatcattcctggctggttcgtacgttgtgattgatcgagagatcggcgttgcacgcgatggcggggatcagtgcctgtgcctcgtttcctgtggttgcggtggactccgcgttgagaccagaggcggtggaagggcagggcgcggcggcgacggcggtggcggcgcccaagacggtgaccgagtctgagtcgtcggcgtcggcgtcggcgtccatggagccggaggagcaggtggaggaaccagcgaagaagaggaagagggacccggcgccggacgtggggagctccagcatggacggtactgacggccaaggaagcgacgacgacaagaacgacgacggcgaggaagcgccggtgctgcaggcggtgtccccgccgcggcagaatgctctccagcggcttgtcgacgagtgccgcgtgctgctcgatggctcctccaagtccactcagccgcccaacagtactaccgtctcccgtatcgtcgccttgctcaatggaattggaccggatgacctcaagctgggcacggtgctcgacacctccgaggtaacgagagctgccgctttccgccgccgagaccccatacaggttatcgggggcaattacctgtacgaatgcgataatttcacggtggcggtcttctacctgcccgccgggacggtgatgccgctgcacgaccacccggggatgacggtgttcagcaagctcctcgccggctcggtgcacgtccagtccttcgactgggtcagcccctccgtctacggctccggcgggaagcgcgctgttcactctaagaatacgaagctggtgaagaaggtgctggaccacgtcgtggaggcggggtgcggcacctgggtgctgtacccgtccaccggcgggaacctgcaccggttcgtcgccggcgtggacgggccctgcgccttcctcgacgtcctcacgccgccctactcggagggccgcctccgccggtgcaccttctaccgtgattaccccttccaactccaccgcaatcacaggttcgcccgcaacttgagcgcccaggagaagagccagtttgcatggctgcgaccgatcaacgccagcgcgccgccggaccttcggatcgtccccttgacgtacagtggcccgccggtcgtctaggccggccggctcgccggcgggctggccggccgccgccggccgccgatcgaatgaacggtggccaccgcgcgcgcgctagctcgatcgtgtgtcgcttactgttgacgaacgaataaattggtgtgatatgatcgatggtttgcgacgatgattattagtattggagcgagtactcgatccgcttgttatcttagcagtactttgcgttgcagcaacttgctctcttcgtgtgcagcaataataaacaataatgaccatccccagatgttttaattactttgagtgtccttagtgtaatttgttggtgtgaatttctc

SEQ ID NO: 10070 - DNA, 1728 bp, Oryza sativa
  ref <308>: DATABASE ACCESSION NUMBER: AK107418
  ref <309>: DATABASE ENTRY DATE: 2002-08-28
gtgcctatcagccctgttcgtcgtcgtcctctccaagctggtatcatctgccatgaagccaaggctcaaccttcccccggggccatggacgctgccgctgatcggcagcctccaccacctcgtgatgacgaagagcccccagacccaccgctcgttgcgcgcgctgtcggagaagcacggccccatcatgcagctgtggatgggcgaggtccccgcggtggtcgtgtcgtcgccggcggtggcggaggaggtcctgaagcaccaggacctcaggttcgccgaccgccacctcaccgccaccaccgaggaggtcttcttcggcggccgcgacgtcatattcgggccgtacagcgagcggtggcgccacctccgcaagatctgcatgcaggagctgctcaccgccgcccgggtgaggtcgttccagggcgtccgcgagcgcgaggtggcgcggctcgtgcgtgagctggccgccgacgcgggcgcgggcggcgacgctggcgtgaacctcaacgagaggatcagcaagctcgccaacgacatcgtgatggtgagctccgtcggcggccggtgcagccaccgcgacgagttcctggacgcgctcgaggtcgccaagaagcagatcacgtggctcagcgtcgccgacctgttcccgtcgtccaagctcgcgcggatggtggcggtggcgccacgcaagggcctcgccagccgcaagaggatggagctcgtcataagacggatcatccaagaacggaaggaccagctgatggacgacagcgccgccggcgccggcgaggctgcggcggggaaagactgcttcctcgacgtcctgcttcggctgcagaaggaaggtggcacgccggtcccagttaccgacgaaatcatagtcgtgcttctgtttgacatgatttcaggggccagtgagacatcgccgacagtgctgatttggaccttggcggaactcatgcggaatccaagaataatggcaaaggcacaagctgaggtaagacaagctgttgctgggaagaccaccatcacggaggatgatattgttgggttgagctaccttaagatggtgattaaggagactttgcgactccatcccccagcgccgttgttgaaccctcgtaaatgccgtgagacaagccaagtcatgggctacgatataccaaagggaacatctgtgttcgtaaatatgtgggcgatatgtagagactccaggtactgggaggatcctgaggagtataaaccagagagattcgaaaataatagtgtagattataaagggaataacttcgaatttcttccatttggctctggtcgtagaatttgtccaggtataaaccttggggtggccaacttggagctaccattagctagtcttctttatcattttgactggaagctacccaatggaatggcgcctaaggaccttgatatgcatgagacgtctggaatggttgcagctaaactcattaccctaaatatatgccctattactcatattgctccaagcagtgcgtaacatccgtcctaatggaatgcatcctcaaagacagcgcatatatatagtagtttattgaaaaaataacgtgctgggagaaaagggtttatatgtatcctatgtacaattgttttttcgggcagactggcctatttgtgtataaactttcatgttgcatgttatacatgatgtatcattccagtgtgtaatgctaccactactttaat

SEQ ID NO: 10071 - DNA, 993 bp, Oryza sativa
  ref <308>: DATABASE ACCESSION NUMBER: AK107419
  ref <309>: DATABASE ENTRY DATE: 2002-08-28
gcttttgcatttgcatacgcacacactgccatctcagtgtagtgtagtgtagcgaagcaaccggcggcgatggcgatgcggtggtgctatgtcggcaaggccaccaagatcttcttcaccgtcctggccctcctcgccctcatcggtgtcgtcctcgccttccgcgccctcctccaccgcgccaagtcgcgcgccagctcctcctcctccgcctgcgccgccgccgacgagtgccagcccatcctgcccgacaccgtcccgcagccctccatgccgtcaacagccgccaccactcctccgccgccgcaccaatatccctccttccccccaccggacgccgccatgcccatgcccatgccgcagcccccaccccctctgcagccaccacctccagcgattgcgcagccccctcccgcattcgcctcaccgcctcctcccgacgctctcgtgcccccgccgcctcctcccgctgcgcctgcgctggtgacgccaccgccggcgttaccgtcagctcctccgcccgcaccggaggcgccaagcccaacggcctcctgatgccgccgattcttcatctcagattcagagcggctactctagtgtgtcagttatctgaggagcatgacagcgatggatctcatctgtttgtttgtgattgtgccaattaaattacctacctatctcgtaccgtacacacgacggatgtttgaccggcattgaccatccttggatcctgaacatccctttccaactgttttcttccgtgcttcagttgctaattgcttttctttcctcagaggaagtaaattgggggatgcattcagattcaccaaactactctttgcgcatcttctccttcctcaaggatccaaaataaaacactcaaggcatttcagtgtcaaagagaagatgtcattttcaagcacaaaaataactgtaacagaaaagtcagcaatatataatcttctccacttgttgcatgcatggtggatagcc

SEQ ID NO: 10072 - DNA, 1834 bp, Oryza sativa
  ref <308>: DATABASE ACCESSION NUMBER: AK107420
  ref <309>: DATABASE ENTRY DATE: 2002-08-28
aagatcaaagcaaccttcccctctttcgcttggccctactcctgcacttgctcttgatcatactcggcgaaagatgttgctctctcacttgcgagacacgcctcgcgaagcgcgcggctggcgcctttggttcagcgcttgggcagtcggtgcccttggcatctcacgaggtctggacgagggtatcatctctggtgttctcaagcagcatagcttcatcaagacgtttggcttcgacgacaactctcctcaggaagcgaccatcgcctcccagctccagctcggctcggttgccggctcggccatcgccttcttcctctgcgatcgcctcggccgtcttcgcacctcgatgctcgcctgcttgctctggctctttggtacggccatctggatgacctctgccggcgtaagcggcacccactcccccggcaactaccaccagctcctggccggccgctttatcgccgggctcggggtcggttttacacccgtagtggcgccagtatatcttgcggaaatcgctcccaaagcgatccgtggactcaccgtatgcattttcagtggctctgtgtacatcggtatcctacttggctactggtccaacctcggcacttccatccactacgacgacgcaaggcagtggacgatccccgcttccatcaacttcatctttgccggtctcaccttcatcgcctgtatctttgccaaggagtcgcctcgatggctcatcaagcagggacgttacgaggaggggcgaaagacgctcagctaccttcgcaaccttgacgaggatcatccctacattgtcaacgaggtcgaggtcatggagcagcagatccttgccgaaaaggaggcgctcgagggtctcagcatcttccagatcctcaagaagctcgtcaccaacaagaacaaccagtacatccttttcctcggccttggcatccaggtgctcggtcagatgagcggtggtggtgtctacactgtgttcgcacccaagatcttcggacttctcggtgtgcctggaggacagaggaccaagcttctcaccaccggtatctttggtattgtcaagctgctcagttcgctcgctgctgccttcttccttgtcgacatgctcggaaggaagacggctgtcaccaccggtctgctgctgcagagcttgtgctcactctaccttgcgctcttcctcaagttcacctccggtgtcaccaaggccaacgagacgcactcggacaagtcggctgctacgggcgccatcttcttcttctatctctcgggtctggcttgggcgatcggtgtcaattcggtgcagtaccttacgcagaccgagatgttcgacatcacggtgcgagcgctgggtgttgctatcgtctcgctggtgcactttgccatgcagtacgcggccactcgttcgctcaaccccatgctccacgcgtggggcaactttggcaccttcctcttctacgccatgattgctctcaccggctgcctctttgtcttcttcttcatgcccgagacggccggcatgcagctcgaggatatccatcagctctttgagaagccctggtaccgtatcggctggaccgccaaccgtcctgccaacaggaagggcgccacctcgtcaaaggtggaggccgacgagtcgcaggacggcgccgatctcgcctactcggctcagctcggccagaagaagtccatcgaggaggaggaagacgaaaagaagcactaaacagcctgagtctcgccatgaccggcccgctctcgcaagccggcttggctgcatctcaagctcgtcatcccacagcatgttgcaatttgtaaaagtgatctccat

SEQ ID NO: 10073 - DNA, 1990 bp, Oryza sativa
  ref <308>: DATABASE ACCESSION NUMBER: AK107421
  ref <309>: DATABASE ENTRY DATE: 2002-08-28
gtcaccttcattggctccttcccgcccgcctccttccagtgctccttcatatacgacccgtccatcttcctagccgcctcatcatccgttctgcagaaactagtattcctgcgattatgatcttcacatccgccgctgagcccgtcaaggagcttccggaccacctcgacgtctatggctttctgttcgaatactttccctcatctcgtcccgatacgcgcaacaccggtctcccgctcttcatcgacgagcagaccgcccaacaatggactttcgaagagaccaaggagaacaccgaccttctctccgtcgcgctggcagagaagtgcggcatcaagcccgacacgcgtgctgccatctacgccaccaacagcatctactatcctgccaccatctgggccatgcatcgcctcggagccgtcgtctcgcccgccaacgctgctttcatggcaaaagagctcggcctgcagatccaagagtccaattccaagctgctctttgtgagcgaggatcccgtctcgctcaagaatgctttcgaagccgcaaagatcgccaacatcccgcgcgaccgcatcgtcatcatccaggaaccctacaccgtactcaagtatcccgaatccaactacggccgcatccagcgcaagtcgcagggcgcatggacgctcgccggcctcatcgaggaaggtcgtgacattgtcaaggccaagggcgacgccatcctcacctctacacgatacaagctcaagccaggcgaggccaagaccaagatcgcgtttctgttgttctcatctggcacgactggactaccaaagggtgttgcgatccagcactttgcggtcacttccaacgcactccagaccatggctttcaacaaggtcggcagcagtcttggcgccaaaggccgcttctgccctggcaaagacgtctcgcttggcgtcctgccccaggtccacatctttggcctcagcacctgtacgcactttcccttttacgccggcattgtcaacgttgtcatcagcaagttccgtggcatcgaagccatgatcaagaccatcatcaagtacaagatcagcgtgtggtggctcgtgccgcccatggtggtgctcttctgcaaggacccgagcgttgcgccgtatctggacgagctgcgcaaggtggcgcgttttgccatggtcggcgctgcaccactgtccgaagacctcagcaggcaattcagcaagatcttcccgaagctcgactggggccagggatccggtatgaccgagacgtgttcggtcacgaccatgttccctgtgggcgagcctgtcgtcatgggatcggcagggcgtctcttctccaacaccgaggccaaggtggtcaattcggaaggcaaggaggtcggctccgacgagcttggtgagctctggctgcgtgggccccagatcacactcgggtatacgaacaacgaaaaggcgacgcgcgagacctatgtggaaggaggctggctgcgcagcggcgacgaagtcaggatcgacaggaacggcgatgtctttttcatcgaccgtctcaaggagctcatcaaggtcaagggcttccaggtagcgcccgctgagctcgagggcttcctcctcgaccatcccgacgtgtcggatgcgggcgtgattgggattcaggacgaatccgcaggcgaactgccgtttgcattcatcgcgctctcgcaggacgccaagaaacgcgccgcttccggcggcagcaagcagcaagacgaaatccgccagtccatcctcaagtttgtcgcggacaacaagacccgctacaagcacctgtgcggtgtagcattcatcgatgcgatcccaaagaccgcttcgggcaagattctgcgtcgcgaaatgcgcgacatggccaagaagctcgcgccagaagatctgcgccagaagcgcgacgttgccgcaaagctttgagcgctcgaatgcggatgcaattgtcgatactaatacaggttgagtcgcag

SEQ ID NO: 10074 - DNA, 1552 bp, Oryza sativa
  ref <308>: DATABASE ACCESSION NUMBER: AK107422
  ref <309>: DATABASE ENTRY DATE: 2002-08-28
cacaacaacacaaagatgctcaagttcgacgaggttcaaaaacacaactcgcgcgagtcgtgctgggtggtggtgcacggcaacgcgtacgacgtgaccgagttcctccccgaccacccgggcggagcgggcatcatcctcaagtatgccggcaaggacgccacggaggagtacgaccccatccacccgcccggtacgctcgaggaaaatctgcccaaggaaaagtgtctcggccccgtagacccctcgacgatcaagaaggaggagaaggtggagaagaagcaggtggtcaaggatgaggggggcgtgccgccgctgtcgcagtgtctcaatctgtacgactttgaggtgatcgcaaagagggtgcttaagccgacggcttgggcgtactactcgagcggtgccgatgacgaagtcaccatgcgcgagaatacctcggcgtttggaaggatctggttccgacccaggattctcagggacgtcagcaaggtcgatttctccacctcgctgcttggtcagaaatccaccctgccggtctacatcaccgccaccgccctcggcaagctgggccaccccgatggagagaagaacttgaccgtggcggcgggtaaagagggtgtgattcagatgatccccacgctggcctcgtgttcgtttgacgagattgtggccgccaagacgcacgatgcccaggtgcagttcatgcagctctacgtcaactcgaaccgcgccatcaccgaaaacatcattgccaaggccgaaaaggcgggcatcaaggggcttttcgtcaccgtcgatgcgccccagctcggacgcagggagaaggatatgcgcatgaagttcgacgatgtcggcagcgatatgcagaaccagaacaaggacaacgtggatcgatcccagggcgcagcacgcgccatctcgagcttcatcgacccctcgctcagttgggacgacctcacctggttgcgatcggtcaccaaaatgccgattgtgctcaagggcgttcagacgtgggaaaacgccgtacgtgccgccgaactcggtctgagcggtgtggtgctctccaaccacggcggtcgacaactcgactttgcgcgctccggtatcgaggtgctcggcgaagtggtcgaagcgctcaaggccaagggactcttccccaaccccatgttccagatctttgtcgacggcggtattcgccgcgccagcgatgtcctcaaggccgtagctatgggtgctacagccgtgggtatcggtaggccgttcttgtatgcctactcggcgtacggaagcgatggtgtcgtgcatgcgttgcagctgctcaaggccgagatggagatgaacatgcggctgctcggcgcgcctacgctcaaggacgtcgtgcccgagatggtggatgccagggctctgggaacgcacgtcaactttacgcccgtgtcgcatggacaccagatctacgaaaagctccagactgcggtgggcatgcccggcgaaccggccaacaagctttagaaccgaccatccgcactgtatgcaatgatcatgtaatttgtcg

SEQ ID NO: 10075 - DNA, 1625 bp, Oryza sativa
  ref <308>: DATABASE ACCESSION NUMBER: AK107423
  ref <309>: DATABASE ENTRY DATE: 2002-08-28
tcgggagctaccaggtgtacatgaagtgcagggccgccgggcagccgccgctcgaggccgtctgggagctccaccccgtcgtcgtccccgacggcggcctcgccttgagcctcacctgcagtgaagcttcacaagctactcatcaagcggcggcgccaacagctgggtggcccttcgtcaatggcgccggcgaggcggcggcgacgacggcgagcccgaccattccgccgtggcttcgccggtatcaagatccagatcacgccacgccggcgagctgcggcaccggtttgcagatacaagatctgtggaatcccatgagaaatggatcagcaccacaccacacatccgagcttacattgagtttctcctctccatcaccttcttccatctcaggatataccagctgctacaacaacaacaacatgatgagctccaagccatggcaactcgaagcgaggcagccatggccaattcatggacatgaaggtcagagaatggccatggcatcatatcatgatcatcatccgttggatacaaaccctagcccagagtccaactcggtgtccaattcattggatggcggtgagacgaggcggcccaagttcatcgagctcaatgcagagaacctcaagatcttgtgcaatgcgctcgagagccgcgtcccgcaacatagcaacattgttccagacattgcgagcaccgtgctccaatgtcgatccggcatgaagaagatgaagttgaggcataaggagatcatcaaggcaagctcaaccacttggttactattccaaggaagagatgttgatggtaagaaggccatggcacaagagctcgcaaagcttgtctttggttcatctaccgagttctcttccatctccttcgatgagctcacatcgccctactccgattctagctccggtgagctcaccctcaagaggcaaagatcagcagacagcaatgagcatagctttgcgcagagactatgtgaaattgtgagcaaaaacccacaccaggtcatagtgatcaatgacattgagcaacttgatcaagattcagaaattagtatcaagaaagcgattgcgaacggaagaatgagaggatgcaccggtgaagaagttgatttcgaggatgctatcatagtgttgagctatgaagaagaattcgattcgaggtctagggcttccccctcccctcgggtcaagcagaggctcatgaacaataatgatgatgaagaaagtagcagcacggagaagggagataattcaccacaacgttttagcttggatttgaatgcatgtctcgaggatgaagaagaggatgaggggtttttgctaattgataatggtgtggggatgcatgatattgtggatggtgttttcttcttcgggttgatggcagatttctgacattttccttgttaatttggcaaacaaattaacctagagtaatttttcatgttttattttccattttgtaccaagttgatagtcctagatatcttgtaaaagaatttgggtgtatttctacaatgaattggcatggtcctttgtggaaattatgtagaaggaaagcaagcatgcatgtatattatctttgagctaatggtagtagtttttaattataat

SEQ ID NO: 10076 - DNA, 1575 bp, Oryza sativa
  ref <308>: DATABASE ACCESSION NUMBER: AK107424
  ref <309>: DATABASE ENTRY DATE: 2002-08-28
aaggggatcatacatcgacctcatcatccaatccaccaactgaccaacaacatttatactactagtagtagaagaagaagctctagatagctatatatcccagctgctgcaaaggtagtagacagcaatgtcgcagaggagagttgcagggcccatgggagtgatgagcaagcagcagcaggaggccatggcagaggagatgatggagctgaggcgaggaccatggaccctcgaggaagacaacctcctcatgaactacattgcctgccatggcgaaggccgctggaatctcctcgcccgctgctccgggttgaagaggacgggcaagagctgcaggctaagatggctcaactacctcaagcctgacataaagcgcgggaatctgacgccggaggagcagctgctcattcttgagctccattccaggtggggaaacaggtggtcgaggatagcgcagcatctgccggggaggacggacaacgagatcaagaactactggaggacgagggtgcagaagtaggccaggcagctcaaggtcgacgccaacagcaccgtcttccgcgacgccgtccgctgctattggatgcctcgcctcctcgagaagatggccggagcagccaccgaccccactccgccgccgccaccgccactccaccaccacgccgccatggccaccgcctcctcctcgccgttcgacttcgacacccacctgcagcaagcagaagcagcaacggcgtgcgtcgtcccgaacaacgtgtaccaccaccacatcgacccgagcccgagcacgtcgacgtcggccggctcgacggcggccgcggcggcgttccagccgctgccctgcttctccgagctgagatgggaccagcagatgcagtcctccggcgagctcgacgacggcgccgccggcgtgttcgtcgactcggcgtcggcgctgggaagcctcagcctcgacgggctggaccttggtccggccgagtactactccgactcgacgctcctcgactacctcaactccagctgcaccggcagcgccatgatgacgatgatgaccgcctccggcaacgccggcagctacaactactgcggcggcgccatggacggcggcgacacgtggaggtccgacgaggtgtgccaagcggcggcgagaaagctcggcgagtggggaggaggaatctagctagctagctaggtagctacgtatccagctgagcttagctgtagctaaaggctaagtggatggatggatcatggatagatgagatggtaagttgcttcttgtgatgtctctccattaaagcgagatgagatgatgatcatgatgatgatgttgatgatgctgtcacattagctaatggatgagttgttccatcatatcgatcaagatagaagtactagtgatcgatcaagcaaaaatcaaaagtagaagatgatcaatagcgtgatgattccgatcgatggagagaatattattgagatgtgttaacatattagctagagctagctagcttcttgtagtggttgatcgatcgatggtgcatgtaactattgttagtagtagtactttgttaatgt

SEQ ID NO: 10077 - DNA, 1453 bp, Oryza sativa
  ref <308>: DATABASE ACCESSION NUMBER: AK107425
  ref <309>: DATABASE ENTRY DATE: 2002-08-28
aaactcattgagagactcgatctttgatccctcttcttcctcctcctcggttcttcacctcccaagaaccccagaaaccagaggcgggctggttgatccattctttcaattggattggattgagctgtggatcggaagaggaactgtatagtgtgggagagatcgattgattgatcgatcgagatggagcaggtggtgaacgcggtgctggacctggtggtgccgccggcgagcatggtggtgctggcgttcgcgtggccgacgctctccttcctgcgcggcgtggagtgggtcgtcaagacgctcaccgtggagaacatgcacaacaaggtcgtcctcatcaccggcgcctcctccgccatcggagagcaaatcgcgtacgagtacgcgcggaggaacgcgaacctggtgctggtggcgaggcgggagcaccggctgttcgcggtgcgggagaacgcgcgggccctcggcgccggccaggtcctcgtcatcgccgccgacgtcgtcaaggaggacgactgccggaggctcgtcggcgacaccatcagcttcttcggccagttaaaccatctggtgaacacggtgagcttgggccacgatttctgcttcgaggaggccggcgacacggtcgcgttccctcacctcatggacgtcaacttctgggggaacgtgtacccgacgtacgccgcgctcccctacctgcggcggagccatggccgtgtcgtcgtcaacgccgccgtcgagatctggctgcccatgcccaggatgaccctctactctgcggccaaggcggcggtgatcgatttctacgagtcgctccggtacgaggtgggcgatgaggtgggcatcagcgtggcgacgcacggctggatcggcggcgaggccagcggcggcaagttcatgctcgaggaaggcgcagagatgcaatggaaaggggaggagcgagaggtgccgctcgccggcgggcaagtggaggcgtacgcgaggatggtggtcgccggcgcgtgccgcggcgacgcccacgtggagcaccccaactggtacgacgtcttccttgtcttccgcgccttcgcgcccgacgtcctcgcctggacgttccgcctcctgctgtccacgccatcgccgtcgccgccggcgagcgcccgtcgccaccagctcgccgcgctgccggctccgccgctccacccgctgctcgagtatccgtcggctcggagccccgggcgcgccgcccagcagcacaagctggagtgacgacaagtttgggcgacagtgctagctgcgtgcgttatgtgcagctgtgcgcagatgacacgatgcagtgatatatgtatgaacatgagttcgcgccatcgcatgatattgctgtgtgatatctggtggtgactgtgatatctatgaactgatttggtcggtgtttgaataaaagatacgatatctgtagcgaatatgaatc

SEQ ID NO: 10078 - DNA, 1640 bp, Oryza sativa
  ref <308>: DATABASE ACCESSION NUMBER: AK107426
  ref <309>: DATABASE ENTRY DATE: 2002-08-28
aaattcctccgtcgtctggtagcttcttctcgcggctgcgcgatggagagctgggtccgcgcggtggtggaggctatccactcatctcgcgcccaggccgtcatctacctcgccggcggcgcctcgcaggcgctcgggtggctgctgtccgtgcccggcgcgtccggcaccgtcctcgaggtcgtcgtgccctactccatggcctccatggcgcagctgctcggcaagatgcccttgcagttcaccagcaagcaggccgcagaggacatggcattggccgcgttcaaccgcgccctcaagctttctggaccaggtctacaagtaatgggtgttggcttcactgggtcactggctagctcacgtccaaaacatggtgagcataggttctatgtgtcaacacgaacacaaaattgcctcaggacatcacatgttacattgtcaaagggtttacggagcagagaggaagaagataaagtttcaagctactttctgctcaaggcaattgcagacggctgcaaagttcctgcaaccattcagtcagatgttcaagaacctgaacttccaaaagaaagcgtggaacaatttgatgaagaccaagaactccagcaagttattgatgggcaagtctgcatgaaagtgtatcacttttctgattcaatggataaaaacttcaacaggaaaataattctacctggttcattcaatcccctgcatgatggacaccttaggctgttagaagttgcatcaagcatgtgtgatgatggtcttccatgctttgagatatcagcaatcaatgccgacaaacctccactatctatcgcagaaatcaagcgccgggttgagcaatttagaaaaggaagaatgtgataatatctaaccaaccatacttttacaagaaagcggagctatttccaggcagtgcatttgtaatcggtgcagacactgcagctaggcttgttaatcctaagtattatggaggtgattacaatagaatgctagagatacttctcgaatgtaaaaacacaggtacaacatttcttgttggtggtcgaaatattgaaggagttttcaaggtccttgaagatttggacattccagtcgagttaagggaaatgtttatctctataccagaggagaagtttcgcatggatatttcatctacagatataagaaaaaaacaagggccttgatgtatcaaacatgctgttcttcttatatactccccccgtcaccccgtcctaaaatatagcaacatgtctaatcgattactaagttgctatattttggaacagggggaatagtagattcaaaataaaaaaattggtggttcaaattattggatgaacttcgtgaaccgtcatggcagtgtgtcatgccataggttttggccctacgaataacaacttcttttctgtatcttagtaaaacaacagtggttggagatgtaaaaaacctacttccctgtttatctttctcttttcttggatgattaggcaattatgcccagttgtcctttatactattctttttttgtttggatgcttttcacatgtacctgtacaggctccacaatgtcacattatcagttgaaaaaaggacaccgctgaattcttgatagtgacatactcacatgctttgtc

SEQ ID NO: 10079 - DNA, 1765 bp, Oryza sativa
  ref <308>: DATABASE ACCESSION NUMBER: AK107427
  ref <309>: DATABASE ENTRY DATE: 2002-08-28
tcatccaacccaagtacccaacccgcgtcgtcatcgtcgtcttcctacttcctcctcctccccaccccacgcacgcgcgtgcggcgccgatcgcggccgacgccgagatttccgcgtgcgcgtggagatagggcacaccccttctctctctccctctctcgggctctgaagcgcttcgcttggtttggcgtgttgtttggctgccgcggcagttttctcctgtcacatatcgcagagggttctggaagtgggaacatggaggcgaagcagaggacgaggcatcgcgacggagaggagaggaggctcgtagcggcggcggatggcggcgccgaggagtacgacccatggacggcgtggctctacaagccgcacaccatctcggtgctcctcgtcggtgcttgccttctaatttgggcaagtggagcgcttgatccagagggtgcttcttatcacagtagtgcgacatctattaagaggggtgtctgggctatgattgcagtcttccttgcttactgcactctccaagcaccttcaacgatacttattaggccccatcctgctgtctggcgcctggtgctcggactggctgtcgtttaccttgtcgctctagcctttcttcttttccagaaccgcgatgatgctcgccagttcatgaaacacctttaccctgatcttggagttgaattgccggagagatctcatggagctgactgccgtctgtatgttccggaaaaccctaaaaacaagttcataaatatttatacattatttgacgaatttgtggttgcccatattttgggttggtggggtaaagccgtaatgatacgaaaccagcttcttctttgggtcctctcgattggtttcgagctaatggagcttacattcagacatatgttgccaaactttaatgagtgctggtgggatagtattattttggatatcttgatctgcaactggtttggtatatgggcggggatgcacacagtccgttactttgacggtaaaacatatgagtgggttggactgagccgacagccaagcatcatgggcaaggtgaaaagatcactgagccagttcacccctgcacaatgggacaaggatcaatggtaccctttcatggggccgttgcggttcgttcaagtgttgttcctgtgcgttgttttcatgacagtggagctcaacacattttttcttaaattttgcctctggattcctccaaggaatcctttggttgtgtacagattaatcctatggtggttgattgctattccaaccatccgtgagtacaactcctacttgcaaaacagcaaaccggtgaagaaggttggggctttttgctggctctctctagctatatgcattgtagagcttcttatatgtatgaagtttggacatgggctgtttcatgatcccatgcctacttggttgatcatcttttggagttcggtgggggtagcactagtggttttcttgcttgcatggtcttggaggaatcacctgaaatatcagagaaagcggctataatggattaatttttcggaagattttcgactctggacccccttcaaacttgtttcttcttcttgataggatgtacatatgtgatgggtgatgatgtaacttaaatgtgatgggtaattatgtaactttaaatcctaggataaagcaattttcagctacatttcacattatgttttacaatagccaattgttgcctcgcaagagggatggctaatttcagattaataagtgaaatattaccatg

SEQ ID NO: 10080 - DNA, 1689 bp, Oryza sativa
  ref <308>: DATABASE ACCESSION NUMBER: AK107428
  ref <309>: DATABASE ENTRY DATE: 2002-08-28
acctacagcagcaacctgcatattctcgatctggatctaggcagctgcttgcaaaattcgggtggcagcgtgaaaatttctcctgaggatttttgggttagcaccggccggtgagaagttcacgggatggccagaaaaaatgagttcccggctgcgtcagggaaatcaacgagtggatactgcagatcaaccggccacacgtcaacgatctcgtcaagtggggactgtgggtgaacaaatggcatcgatcatgccattgatagaagcgaacaagacatagatgatcagcaggcctctgatgttgccatggatgatgcagaacaaattgcctctacactgctaaactcaagatgtatgatttgtttcaaataatatttttgccatggtttaattgaactatttacattgaaatgtctattttgactgctcctgtttttactgacataggtcgtgctccaaggaggggggggggggggcgaaaagtcaccatcaataccaaacttgttaagaaaagggcaagaagagaaaggctagatatttcttttcctcaaccatttagaaaagtgtgtggaaagcatgcaaaattatttaaaagtgaggttaccgttattgtaagaaatcatgtgcctctgaaagccaaaaaatggaagaccattgaaaagcaacatcctggtacaatggctaatgtttggaagaagttgaaggttgttaaatattcttatgtcaacatattttacatatttattttttttttagttgccaacatggaacttttgctgacaggatgcatttcctgagctacgcaacgaagatgaagattgtgctatgaagcaggttgaagagtagtatagtaatcgacgttatcgtctccactgcttgcaccataacaagaaaccaaggccaacccatgtttcaccagaagattgggcttggctgataaagcatgtgtggaccggtgaggattttcagaaaagaagcaaccagaatgcagctaacagggcaaagcaggagatgggctctaaagtgggaactaaatcaattgctcaaattgcacatgaactgagaaacaaagagacaggtgaatggcctacaacaatgcaagtttggaaagcaacctatcaaaaggctgatggaacatggtctgttcctaatggtgaacgagttctggtatatatctttacttatgacaacttgtttttttagatttcagcctaaactatatgatatgtgtcaatgtaccttctgagtagtactattttaccattggaaacgcttccatctgccctatctgtatgattcttttgcttactgttgttttcacattacaaatgcttctattactctaaaatttcaccttaacaagtccacctcacaagaagtgcatatatttctcacgcttcgcttcttccaatggtgtttcatcctcacgatctccatcagatgaccattagaatgcatgaagttgatctccagaagtctatttaatcaagctgaagacatcctaagtctatttcaccgaataatttagtattagtcccatttaagtttctactggttgctttagttctcatcatgatgtttatgtcagcatttcgtgagaaattttgagcttcttgttgagtgcaacatttgtttggttgtaagacttctgaataaatatttcaatatcattgttccttaatttggttt

SEQ ID NO: 10081 - DNA, 3117 bp, Oryza sativa
  ref <308>: DATABASE ACCESSION NUMBER: AK107429
  ref <309>: DATABASE ENTRY DATE: 2002-08-28
ataaaagctgagatacgtggctatgaggaaggttcaagattcttgattgtatttcgtttggggccatcagatggaccaatcaggattgagaaccggacaagtagtacaactatcagtgctcgacagtctggtttgggagaggattcttggatacaagtgaaaccactttcaaccaaaaaatattcttgggatgacccatatggacatacaacttttgatgttagcatccagcaaggagatgttactttctttcagtgtgttgacctggaaaaccctgatgaatgttccgctggttttagagaacatcacctcaagctcagtatagttgagactgctgatgttaagattttgaagtttgctgattacccaagaagacaagagggagggtacagatctgatctgggtgatcaccaagcctcgccagttatgcaaaatgatacagatacaggtgctggactattggaacttattgttgaacttggagttgttggagtctctttgattgatcataaaccgagagagcttttgtacttacatctgcagaagctttttatttcatacatgactggttacaattctggtaccactagcaggtttaagttaattattggccatatgcaactagataatcagttgccattgtctataatgcctgttgctttggcaactgagagcatgcctgactcaaaccatcctgtatttaaagcaaacatcgccgtaagcaatgtaacttcaaatggtattcaagtctatccacatgtctatatccgggtaactgatcaaacatggaggttgaatattcatgaacctattatttgggcattggttgatttctacagcaatcttcgttttgtcagcaccaacaacatctcaactgtaacagaagtggatcctgagatacgaatagagcttgttgatatatcggagataaggttgaaaatatctctggaaactgcgcctactcaaagaccacgtggtgtccttggcatatggagccctgtcctatcagctgtaggcaatgcacttaagattcaggtgcatctgcgtaaggtcatgcacagaagtcgttacatgcggaagagttccatcattcccgcaatcacgaaccgaatcaagagagatctgatccacaatcctctgcacctaatattttcagtagattttcttggagtgacaaaatcaactttgtcatcacttagtaaagggtttgcagagctctctactgatgggcaatttcttcagctgagatcaaagcaggtttggtcaaggagaataactggtgttggtgatggactagttcaagggactgaagcatttgctcagggtttggcttttggggtttctggtgttctaagaaagccagtcgagagtgcccgacagtatggtgcaattggcattgcacatggtcttggccgtgcttttgtggggtttattgtccaacccttaagtggggcctttgatttcttctcattgacagttgatggaattagtgccagctttatgagatgcgtggatattctgaataataaacatgtccctcagaggattagagatcctcgtgctatacaccgagatggtataataagagagtacgacaaagtacaagctgcgggccagatggccctttacctagcagaggctagcagatattttgcatgcacagatttatttcgggaaccttcaaagtatgcatggtcagattactatgaagatcattttatcgtacaaaatcagaaggttgctttggtaacaaacaaacgagtgatactgcttcagtgcgtggatctagataaaatggataagaagccttcgaaaatactttgggacgttccttgggaagatgtgcttgcattggagctggcaaaagctgggtatcaaaggccttctcacgtaatcatacatctggagaattttaggagatctgaaaactttgtaaggcttataaagtgcaacgttgatgaggagcatgaacctcaggctcttctactttgttcttcaattcgaaagatgtggagatctcaccaggcagatatgaaagttgtacccttgaaggttcctgggggccagcacgatgtatatttcgcatttgatgaagatatgagggagttccacagttttgctaggcctttgctaagcccaaggggagcagcaagtaatgttgaggagcgactcattaacgatacagttaacttccagaacatgtggagcagtgaacaagaaattcgaagcagatgcaaactactttcaaagcaggttgcagatgatggaagggtgtttagtatctggaggcctctctgccctagtgggtatgtctcaatcggagatattgctcatgttggcattcatccaccacatgttgctgctgtctacaaaaatgtgggtggaaatttcgctctgccacttggctatgacctggtttggagaaactgtggtgaggattacaggaatcctgtatcaatatggtttccacggccacctgaaggatacgtagctctcggatgcgtggctgtatctgcttttgaggagccccctctcgactctgccttctgtgttagtgagagatttgcggaagatgcagtatacgaggagcaaattgtatgggcttcgtcagatgcctacccatggggatgctatgtttaccaagttcagagcaagtcactgcaattcatggcgatgcggcggccaaaagaagagtgtgagctaaaacctaagaaggtatcagagtcttatgcccagcaagcattggagaggtcctgagatgagaggcaaacatgccatgcattagtgtagacactagacacatgtaaagtgatgtacataacataggtgcgtatacatgcgtgtaagaaaggagtcaggagcaggacagatccagcattttcgtgcaagatgtgtccgaaatgagagtttcaggtttacatttgctcccatttgtaatccatcattctgcttctacctttgtcagacccttggggtcaaagcttgtacgtcgagcacttgtaccaaacaatccgtctgcttgtcaaccagcagaaaaggggttgtaaattttgtacatgtaaaatcggttgtacttttattcagcactaaataaaaagcatgtaagcggttgggcgc

SEQ ID NO: 10082 - DNA, 1066 bp, Oryza sativa
  ref <308>: DATABASE ACCESSION NUMBER: AK107430
  ref <309>: DATABASE ENTRY DATE: 2002-08-28
atccacaaaaccctaaacccaccaaacccgcgaaggcggcgacggagcatctatcggcttctccgatcgtacctacgcgcgtgccctaaaaagctagcgccggccggcgcgccgtacgtacgtccgccatgttgccggcgatgccgtcgttggcgatgctgttcgccgtcctcctcctctgcgtcgccaacaccctcgccttctccttcttggcggtcaggatcttccgcgccgacggcggcccatccaagctgaccgcgtccagcgtccgcaggtcgaccaagtgcatcctcgtcctcgcctgcgtcgtcgaggtcgccgtcctcttcgcctccctccgactcgccgccgaccgtcacgccctctccggcgaggtcgaccacatgcgcgaccagatcgaaaccctgcaggatgatttgaagcagtatgagcaaccgttctctgcgttgagtgattatctcggcctcagcgtgctagagctgggtagcgccgttggacgcttacgtgataaggaggaacatctagtcaaggaatatcgtgatctgaaactcgagattgaacaaattaaatctgatatacagtctctgcgacatgagaaggaagggagaggctaccataaggaaacattaggtggcacctcaaatcagcaaaaacaagagaataacgagaaaacaaagcaaccagcgatagatggtattatgaagtcattacgagcaaaagcaacaaagttgcagcaggtcaagataagctttccttgggagaagatgaagaaagccaagaatatattcagcatggatttcaagctacggccgtagattagtttaagaagttcccgaaaacgaatttaatctagtcatcaaacaagaaatgcagatgtgtaattgtgataattcacatttggatggtctcagtgtactttagtcagagttttgttatttatgaaccgtttttctagagtagatacctcgtggattcttcgtattttcatcctaattgtgttatcaagcttgttgtgcaaatggtatgcccttatgtcaagcataaatagctatactagaaaaaaatt

SEQ ID NO: 10083 - DNA, 1294 bp, Oryza sativa
  ref <308>: DATABASE ACCESSION NUMBER: AK107431
  ref <309>: DATABASE ENTRY DATE: 2002-08-28
gtcagcacaagagattcttggtctgaatcacgactcctccaacttgcattgccaccatttctactcctctcgagctcgttcttggtagctgctgttcatcatgtcctccttcctctataaatttgcaccgctttccgccatctcccacacattgccatcgatcagcagctagctttgcaatcgatcagaattcagaagctatgaaggttattgtggcagcggcggagggaggcgtgaggaggaggaggaggtacgcgctgctgctggcggcgagggactcggactacgtgcgcaaggtgtacggcggctacctggaggtgttcatccgggcgttcggcgacgatggcgatgtcggcgacggcggcggcgaggagtgggacatgttccgggcggtggacggcgagctccccggcgcggacgaggtcgacgggtacgacggcttcgtcatcagcggcagcccgcacgacgcgtacgccgacgacctgtggatcctccggctgtgcctcctcgtccgcgacctcgtcgccatgcgcaagcgtctcctcggcatctgcttcggccaccaggtgatatgccgcgcgctgggcgggcgcgtggggaaggcgaggggcgggtgggacatcggcatcagggaggtggccatggcggagtcgctgccgccgtacaggttcctcgacgacgcgctgcaggggatcacggcggcggcggcgccgtacgccaagatcacggaggtgcaccaggatgaggtgtgggagctgccggcgggcgccgaggtgctcgcctcctcgtccaagaccggcgtcgagatgttctgcgccggcgaccgcgtgctcggcatccagggccacccggagtacaccgccgacatcctcctcaacctcgtcgaccgcctctcctccgctggatccatcaccatggcggtcgcagagggagtgaggaggcagctggaggatactgggcctgacagggagttctggatcaagctgtgcaaaagcttcctcaaggctgaagaagaataacaactattgacatatataccttgtatttgtagcctgtgatatgtgttatgacagtgtgaggcacagatgcctgttgcttcctagtttgtgctggtagtggtaggcacagatgctcacttttagcatcaaatttattgtgaatcagtgtgttgaaagtctctatcaccagtgttgacctgcaaaattggaataaacaaagcttgattttcaggtcatctggttatgtgtgtggaattttgcatgctcatgcaaattaatggtctactttattttgc

SEQ ID NO: 10084 - DNA, 563 bp, Oryza sativa
  ref <308>: DATABASE ACCESSION NUMBER: AK107432
  ref <309>: DATABASE ENTRY DATE: 2002-08-28
agcaaaagaaaaacattccgtagtcagttcgatcggtgctcatcaagtagctaagctatttaagcgagcattaataagacatacacactgtcacttacgtactagttgagctagctttgttaattcccctcgtgttaatttgattattagccatgggaggcaagaagaaatccggctctggtttctggtcgtcggcgtcttggttcgcgtgcttgggcgcctcaaaggcggcggccgcgggctccggctcgggcggccacgccgggtatgatgcggccggcgggatggttggggcggctaaacatttctccagttctcacaagataaactttggttaactgttaatggtgcatgttatcatgtttgtactttgtacataatagaattattatctgttcaattactgtagcacacatatgtgtatatatttaggattcataaggtcgttgttaatttgtaaaaagaagtgttcgattaagggccggtcaaataggtcctgaagtttctacttcgaataaaatagaaagagccaggtgaagatgtgaattgggctcttaaatccg

SEQ ID NO: 10085 - DNA, 2109 bp, Oryza sativa
  ref <308>: DATABASE ACCESSION NUMBER: AK107433
  ref <309>: DATABASE ENTRY DATE: 2002-08-28
aaaaaaaatttttttttccatttcttccatccgtcgccggggctcccgctcctctggtgtcgccgccgcgccgcgccgcgccgcttcacccccccaactcatccgccgctcgcccgacgacctcgtcggcggccggatctactcggcggcggagcgtccaggtccagcgcctggcggagcagagcttcgcgggccagcaagcgagcctctccggcggctgcgcgcttaggcaaggcgagaagctaaggccttgtgcaagaccaggctctcctctccgttctgcgtcgccgtctccgacgactccaccgcgcacgacgagctccaagagagagggggcaaagaggaatcaagagttggaatcggggagcttagcgcacagctttcccaaccccagcgtacggccgcggccgccggctttgtctggcctcttctgctcccctctccttcccgttcggttcggccggatctaggactcggagcagaggctgcgccgcgggcttagtagggatcgatccccggcgagctcgcccccccgtgactcctgcctcctctgatttttcaatattaaatcagccttgttattccttcaatagcagttcttggagatcagatgtgataaatatgcacactaaaggggcttcttctgatgttatcagagtaagcacatctagtgcccctagtacatcaagtcacggttctgcacaagatgactgtgattcttcaggtgatgtgtatgtatggggtgaagttatctgtgataactctgtaagaactggttctgatactgtagttaggtcaactgttaggaccgatgtcctgcgacctaagcctttggaatctaatttagtccttgatgcgtatcatgtggattgtggagttaaacattctgctttggtcacaaaaaatggagaagtctttacatggggtgaagaatctggtggacgccttggccatggatcacgagaagattctattcatcctcgtctaattgagtcattagcagtttgcaatgtggatattgttgcttgtggggagttccatacttgtgctgtgacaacagctggggaactgtatacttggggagacggaacacataatgttggacttctaggccatggtaaagatgtaagccactggattccaaaaagaattgcaggagcattggaaggtcttgcagttgcttatgtatcttgtggaacatggcatacagctttgattacaacaatgggccagctatttacctttggtgatggcacatttggagttttaggccatggaaaccgagaaagcatttcatgcccaaaggaggtcgagtctttatcggggttgaaaacgatttctgttgcatgtggcgtatggcacactgctgccattgtagaagttatagtgactcagtcaagttcaagtatatcttctggaaagctcttcacatggggagatggtgataagcatcgacttggtcatggtgacaaagaaccacgactcaagcctacatgtgtggcttcacttattgattatgattttcacaggatagcatgtggccatagtttaactgtgggtctgacaacatctgggaaagttttgagcatgggtaatactgtttatggtcagcttggcaatcctcgttcagatggtaagattccatgtttagttgaagagattgtgggtgaaaatgttgtgcaagttgcctgtggttcctaccatgttgcagttttgataattaagagcgaggtttttacatggggaaaaggagccaatggaagactaggtcatggagatatagaggacagaaaaatacctacactggttgaggcattgagagataggtctgttaggcacatagcctgtggagcaaacttcactgctgctatatgccagcataagtgggtctctggagccgagcagtcacagtgtgcttcatgtcgacaaccatttgggttcacccgaaagaggcataattgccataattgtggacttgtccattgtaaagcgtgcacctcgaggaaggctgtcagggcagctttggctcccaatcctgcaaaaccttaccgtgtttgtgattcctgtttcttgaaattgaacaatgctgtagactctagtgcaattagt

SEQ ID NO: 10086 - DNA, 1912 bp, Oryza sativa
  ref <308>: DATABASE ACCESSION NUMBER: AK107434
  ref <309>: DATABASE ENTRY DATE: 2002-08-28
gttatatctgcagcagctgtcaggattcatggaactgacttagcagaaatgccattcataggaacaaggggcatatataggcgccaagggatgtgccatcggctactcaatgcaattgaatcggccctttcctccctgaatgttcgaagactagtaatacctgccatacctgaattgcaaaatacctggactactgtttttggttttaaacctgttgaaccttccaagagacaaaaaatcaagtctctgaatatcttgattatccatggcactggtcttctagagaagcggttgcttgcaacaggcactattaaccaagagaacactactgttaatgatatgatggatgctcaaacacatgttgaagcaaccggatcccggacacctgttcatttttcctgtgaattaccagtgggtggtgatcctgatattaagcatcatgatgactctcatcctttagttgggaactccaaaggcttgacacttaatctgccttgtgttcctgaagaaaaaactgcagaattgacatctccagtattagatgttgttcagtgcatgcctgaatctgaaaatactcaagaaatgaaaaatggagaaacagatgcgacactgacttctgaggacataattgcagaacagaagtatgaagataaatctaattccagtcttacagattcatctgctattcccatgacagtggatccaggctcatgttcatccaatgagactgtgaaaggagaacatcacacatctagtgaaccttctgttgaagctattctagtaagagacaaacctgaaccttccatctcttgcaacgttaccaaccaagaagacaaaaactcttccatggttcctgttgatacgacagttcatttagccactatagttgggaatcatgatattcagaattcagtggaagtcaaaggtatggaacataatacagctaaggatcaaacttttgttagtgctgtagctaataatgttgctactactgaagatcccagtgattctgtagctgactgtgaagtgccaatagtgaggtctattcagcagaaggatgaggttatcgcagacaaaaatgcttgcgcaactatagatcaaactgctgttgacgatgtagctaataattttgttgctaccactgaaaatgacactgattctacagctgaacttggagtgtcaatggagagatgtatccagcaaaaggttgaggttatcaaagacaaaagtgattcaccattgagaacttctataagcaaagttatgttggagaaatcggatcaaatgaagtctactgaaagtgatagtgttaaaatgaaggacatggcgattgaggtgaaagtcacagttgagaacttcagtgaagcaggtaaaccagcttcagcgcttgtcatgtcaaatgacattaatggtgaagttatggctaagcctaatctaacttgtggggatgatcaacttcatggaggggatgggacatacaaaaatagcatggaagatgacctagcttccagagaacctgttaatgcatgactttgcatttcctgctacaaaatgtttaagtgagcagagcaatgggagggacgatctagttttctgcaagtagctgcctcagctcgttctccatggctacaacgaagtgtttagagttgcattttgcagcaatgaaatgctgatgtttcagaattttggtagtctgtcgatcatgggggctttttgttggtttagtaggcataagtagttcacaccgtaggacctcttatacaaaccccaaaaagtgggccaaatttttggtgtaaatacatgtgggaaattgctgttggcattttggtgcacctgaaatgttgtctgaagattgtcgatgaaaacagacttgcaggtagtgcctgtacagatataaaaatccatcctcatc

SEQ ID NO: 10087 - DNA, 1151 bp, Oryza sativa
  ref <308>: DATABASE ACCESSION NUMBER: AK107435
  ref <309>: DATABASE ENTRY DATE: 2002-08-28
agagatgatatgtcaagactgcaggtctgcagactgcagccacaggaacggtctatatatatacgtcctggcctcttaatttcttcccaaggaggagtcgatcgagcagaagagaagccaaaagctccaatcttcgagagacgtgtgaagaacattcgatcgccatggccgggggaggcgaagagctgaagctgctgggcatgtgggcgagcccgttcgctctgcgagcgaagcttgcgctcagcttcaagggcctgagctacgactacgtcgaggaggacttcaagaacaagagcgatgtcctcctcagctccaacccggtacacaagaaggtccccgtgctcatccacaaaggcaagcccatccgcgagtcgcaggtcatcgtgcagtacatcgacgaggtgttccccgacgccggcgtcaccctcctccccgccgatccccacgatcgcgccgtcgctcgcttctgggctgcctacattgacgaaaagctgttcagtgcgtggattctggtgttcagaagcaagacggaggaggagaaggcggaggcggtgaagcagacgtttgcggtggtggagaaactggagggagcactgagcgagtgctccaaggggaagcccttcttcggcggcgacaccgtcggctacgtcgacgtcgtgctcggaggcttcgtcgcgtgggtgcacgcgatcgaagaggtgttcggcctgaaccagttcgacgccgccaagacgccgctcctggcggcgtggttggagcgcttcgacgagctcgacgccgtcaaggaggtcatgccggacattggcaggctggtcgagctcgccaagatgaggcaggcacaggcagcgggggcggccgcagccgccgcgggtgaggccagttgaagtttgctgaatcctggaggggagtttgaagtttgaaacacaaccatatagattgtcgtgtgcttccacattttcgcagttcctatggctgtacctcgtcttgtttctgcaactatgttcatcagttcgtattgccgcaccgtgtatcttcgccatgtaccgtcgcagttgccaagtgggaagtggctattctaccaagatgatgtatgatgtgctacgtctatattaattcatacgttgatttgtttcaataatatttgttcaaat

SEQ ID NO: 10088 - DNA, 1260 bp, Oryza sativa
  ref <308>: DATABASE ACCESSION NUMBER: AK107436
  ref <309>: DATABASE ENTRY DATE: 2002-08-28
agaaaaaaaaaaaaaaaagctcgcgccgccccccctcgccacgactcatcctcctcgtcgcgaatcccctccgccggtccgcctcctcaatccacgcggcaccacaccatcggcgccgccctgcaccgcctgccgtcgtgccccaccatcggcgccgccctgcaccgcctgcggcacctacctccgcctgtctcctcgcctcccgcccccctcgctctccccaaaacgccaccgcctccatccatggaaacagaggatacaggagcggaaaccctagcccctcgtcgtcgtcgtcgtcctcctcctcctcgccgtgcctccctgacctgccgccgcttccaccaccctcaagcaccaccgccgtcgaatgagatcccctcctccctccatcgcgccgattcccgtccccaccacgtcgtcatctcaggcaccgaccaccgttgttcttccgccagcagatcgccgcctccccgcgtcatatcaagggcatcgtgtcaagggtgacgcctctccgtcatctcgtccattcccattctgcttcgtcatcgtgaggtggtcacacgatgacccatcaaatccgtttcccgtccccacatcgtcgtcttaagtgccgggcgccgccgttcctccatgaccgctggcccgtagcgacaccagaaaaccccacttgagtcgtcgattcgtcgtcggcatcttctggcagcgatggtcgacctcgtggtccgttcttgatcctcagctaaatcacaggggagtgatgcctactcgtgaagaactgataagtctaaggatatatgagttaacattaggtacaacattcttacaaaattggatgttgatcttcttattataattggagtgcaaccttaactgtgtgctactccaacccatccaccgcgccggccgcctcctccccccactgcatctgctgtcgccgctgccttctcccgttgttccaagccatggcatcaacggccttcctcaacgccacaccgcatctatgtcagtgctcgtttcttgtggtctccaccatcactgcccactcctatgcatcctatctggctgttgctactgtctgtcaagatgagttgaatcatttcgctgcacttggtggtgataatgctatagtggagacagatttccttaaaagtgtttctgctatgtgatttaaagacatgcactcaaatacagatagaatcaatgctaacaaaagactctctggtcctcaaaaagcagttaaagatcctttggaactataag

SEQ ID NO: 10089 - DNA, 1358 bp, Oryza sativa
  ref <308>: DATABASE ACCESSION NUMBER: AK107437
  ref <309>: DATABASE ENTRY DATE: 2002-08-28
aacttggttccaagatggcgggctcctccccgtcggctgcggcaagcggcggcggctgcgaagcggtgccgagcacgtcgaccatcgtggccgagatggcgacgggctcgcacgtgctcaccgtcgacggctactccggcaccaaggggctcgccgtcggcgtgcacgtcaagtccggcacgttcgtcgccggcggccacagctggcacatcaagtacttccccaacggcgccaccgacgagacctccgagtgggtctccgtcttcgtctgcctcaccggcaagtactccgacccgcgaagacgaagggcgccgccgcgaccgtcaaggcgcggtgcaagctcaccctgctcctcgacggccgcgacgggagggcggcattgccgccgccgccgccgttcaccaagagctgcgagctccggaccttctcctccggcaagggcggctccgatcagtggggccacaagaagttcgtgcggcggaaggagctcgaggacccgtcgaagcgtctcctccgccatgaccgcttcagcgtccggtgtgacgtcaccgtcgccgtggggatccgcaccgacgacaccaccgcgaagctcccgccaccgtccgacctgcaccgccacctcggccgcctcctcaagacgaatgcgggcgccgacgtcacgttcgacgtcgccggccacaagttcgccgcgcaccggtgcgtcctcgccgcgcggtcgccggtgttcatggcggagctcctcggcccgatgaaggaggaggacaccgagagccacgtcgtggccatccgcgacatggacgcgagggcgttcaaggccatgctccacttcatctacaccgactcgctgcccaatgtcgacgacggcggcgaggcggcggccatggcgcagcatctgctcgcggcggcggacaggtacgacatcgagaggctaaagctgatctgcgaggacaagctaagcggcggcgtcgacgcgaccacggcggcgacgacgctggcgctggcggagcagcacggctgctgccggctgaaggaggcgtgcctcaggttcatggcgtctccggccaacctcaaggcggccatggcgagcgatggcttcgagcatctggctaagctgcccttctctcctcaaagaattagttgctaatctcgctgtttaattatgcagtagaaacttcatttctccctgattatgatcaatgtggcgtagctgttatgatcgaaatttgatggtttttttccgatttgatcataatttaaaaagtttggatgtaattaggaaaaccatcactgacagaatcggattatgccaaatagtgctctaatgtctaatcataatcaaatcggaaatcggttggtat

SEQ ID NO: 10090 - DNA, 2054 bp, Oryza sativa
  ref <308>: DATABASE ACCESSION NUMBER: AK107438
  ref <309>: DATABASE ENTRY DATE: 2002-08-28
acagctcactacctatccatctaaaatctgattacacatttgcccattaaattctactatgcacaacaagaagccacgaattctactatgcacaacaagaagccacgactgtgctcttaattcaaatctgaatttgttaggacatattattgacgtataaccacataaataaatccaaagtatatataatatttttgtttccccatttcaaggtctatatgatcttacttatttggttttggtccgcatactggtagtatgcctgagagtggttatattgatgactgataagagaatgacaagtcaatatcttgctttgatacctttttttttgcatttttgatttagctaaaaataactatgtactgataatggttatttttattgttacaaattccaattacatgaggatatgttttataaattttgggtaaataggttgtgcttcagaaggtgtagtttctaaaatttttagtgcaattatgtactcgggcgatatattttgtcaaaaaacgtgcattgcacgtgagtattagtagtgtgttactgtgttacagtccattgcatagaccattgggcacacacacgctgataagcacaagatccaaaagcaagtaaccgcccatggtatactatgcatgtacgaggccgacaaaagggaaagcaagccggtgatgcgcgtgaacactgcggcatagcgacaaggccacctgtccgccatggcattcatgattcatggccgtccctccccctgcgagattcccccactcacttgctcacacaccaaagaagctactggggcaggtgtgtccattgaattgaattgaattgaaactattgatgaatgaattcaccagccagctagaaccttccttgaaaccagccataaatcacacccattcatctctctcaactctctgcagcccattcactgcaccagtgtagtagcagagctgcagttgctttgaacactcatctcctcaccgtgtttgttagagctcaaaaggatcaagagaagatgagggttcctcctcttcgtgccaccacggctctcctggccaccctcctggtcgccgcctcgttccaggatctcaccgtcgctgcagacggcggcggcggcgtggttccggtcccggatagcgtgtgcgacgccaagtgccagaagcggtgctcgctgaaggtggccgggcggtgcatggggctgtgcaagatgtgctgccacgactgcggcggctgcgtgccgtcggggccgtacgccagcaaggacgagtgcccctgctaccgcgacatggtctcccccaagagccgacggcccaagtgcccgtgagcaacgagagatggctggcactgtgacgatgtgtagccgatccgtggtagtagtgtgattgatagcgttgggatcgatctcggttctttgagaagtgttagtgcttagtggaataaaacaagaatgtctgtctaagatatgtcttgtgctttgtccagagtatgctctgatatcgctctgatatctaggccgagtttagttccaaattttttcttcaaactttcaacttttttatcacatcaaaactttcctacaacacaaatttctaatttttccattatatcgttccaatttcaaccaaatttccaattttagcgtgaactaaacacacaagttacttttgattattttttttaagcaacagaattgagaatgagggtgtgtttagttcacgctaaaattgaaagttttattgagattggaacgatgtaacggaaaagttagaagtttatgtatatagaaaattaaagttctgatgtgatggaaaacttggaggtttaaagaaaaagttgggaactaaaccagacctggatcatctggctcgagcaggggcggagctagtatatattaggggggtgcccagaaacctggtcaagaaaattttttagctatacctcatctattttcatcatgtatgtaccctctaaatacaaacttaggcatccgcatcagcttaaacttgatctaaagtagagtaaattaaacaagtgacaccaccatctatttc

SEQ ID NO: 10091 - DNA, 2779 bp, Oryza sativa
  ref <308>: DATABASE ACCESSION NUMBER: AK107439
  ref <309>: DATABASE ENTRY DATE: 2002-08-28
caatctcattgcttcaatcaattgtaatattgttttaatcataggagaactaattatatgtattacagatgaagatgataatatgacttacttatttggagtctctattgttgttggggtacctcgatcttcagaattatccagtgaagacatttctttaactcagatcttgcttgcatatactttggcctcttgaaactctcgatcaagagatggcatcagaccctttggagagaaaggtgaaaactgatttctataggtttctatcctctaaaatgaatgggtgaaattggcgccaagttatctgcttgccgcgcgccatttctctcgcgtcagaaggttgcaacgcctatattgccacaccagccgattggttagtgggctgaaatggacttgcaggcctggtatttggatccttctaaatcctaatcgtccaaagaaaaggaacgatcaggatttgccaacggcatggccgtgccgttatagttacgacggcagacgtgccgttatagttacgacggcagacgatgcgcttccgggggacccatacccgcgaagcattaagcggtccccaaaattttcaacgcgccctttcacactttcgtgtcgttcccgcgcgagggtgggaaaccctttggcgggcttggctctcgcgccactctccaccaccgcgccctttttcttgtcgcccacctctcgccccatcccccacaaacaattcctccccaatttccctcccaaatctctcccgcctccgatcccacagtctctctctctctctctctctctctctcgatgccgacgcttcgcagcgccacagcgagcgcgtcaacggcgggcacggcctcgccgacggcaatcgccaccccacgaagcgccaagcggcgcctcacgagccctcgccgagccgcagggtcacccgacgcgtctcagttcacatccccccacaaatcccccaatgtcggaatcgtaagtcccccacctcccctcgatctctagtgcaggactatgcagatgctggcgtgctgctgctgctgctgcatattacctggtattctgttgcaatgaggagcaattgctcgatcttgcgggttggcaccccgaagctgctctcggcgtcgcccaggtcatctgggaagcggctttacggcgacttcgtcgcggccgagaagcccaagtggaatcctcgagatcccgctcagatgcaggtggtcaaggaggcgcttcacgtggctacggtgccctcttgcggattggtctgccgagatgatgagcagagtcgcgtgcttgagttctgcaagggttgcgtggagcaggagcgttcagggagcctgtatgtgtgcgggtgccctggtacagggaagaccttgtcgattaacaaggttaaggagagcgtggcgcgttgggcagacgagaccggaatggagacacctgatgccttatcgatcaattgtacaagcctagcaaagacgcatgaaatttttagtaagatacttgcgaagtttcagactcggaagaaggcaacctgcaaactgtcaccacttcagcaacttcaaaccatgttttcccacaaggaatcagccccaagaaggatgttgttggtcgttgtggatgagatggactacttaataacaagagaccgggctgtgctaaatgatcttttcatgcttacgacttaccaattctcaagatgcatactgataggtattgcaaatgctatagacctagcggatcggtttcttccaaagcttgagtccttaaattgcaaaccacttgttgtgactttccgtgcttattccaaggatcaaatatctgacataattaagcataggctgaaggttctcgagtatgatgttcttgaaccactggcccttgaattttgtgctaggaaagtcgctgcagcctctggagacatgagaaaagctcttggtgtttgcaggagcgctgtagaggtttttgaggcaaggttacaagagtcttctgatcaagaatttggacttgtgacatttgaccacatggacattgctttgtcaaaggctttcaagtcacctgtagtagatagcattctctgtcttccccaacatcagcagatggtattgtgtgcattggcaaatacttttcatcattgcaagaaaaaggcaacgactctaggagagctcaataaatcatacatagaaatttgtagatcaacccaagtcccagcagttggaatgcttgaattttcaaacatgtgcatggttttgagtgatcagggattcatgaagcttgggcaatccaaagaagataagctcaggagagtgatgcttcaaattgacagttcagatatcacttttgcatttaagggtaaccggttctttcagaaatgtttggagcaacaaaaattttagttagtcactcaattcagcaacgacgtctatacacagtttgcattgtatcttataccaagtgccagcaaatcaaaagcaataatgcccaaaagttcaggattttgcattctattggatcaaaccaacgtaaattttgaccccgtcctcaatgtttatcaatatttatgatttatggcgaaaccctttgctgagaaaactgtacatgcgggatgagttatgattgtttttcttacagttcttctgaaagattcctaactgtatttgtaattctaaaaggtagttgattgtagttctgatttttccccctagtcttattttccttcaacacagtctacattgattatgatttaatccattgacataaaagataatttatgacggttgagatctgt

SEQ ID NO: 10092 - DNA, 1087 bp, Oryza sativa
  ref <308>: DATABASE ACCESSION NUMBER: AK107440
  ref <309>: DATABASE ENTRY DATE: 2002-08-28
aaattgtacatactacgcggtaagtatccatgtgtggggttgctacaggcgccaagccggtagagggtgccggcggcgaggtggcgttctctgccggggcggcggcctcgggggaccgtgacggggctcgtccggcccggcgaacacctcgtcccagatctcggcgaaggcccggaggatggcgtcgtggtggtgcggcgcgttcagctcgaggaagcggtggagcagctcccggagctcgtcgccggtcacgatgcggttctccacgatcatgttcagcatcgaccgccggaagtcgccgcgtgggtcctcggactgtttcaccaccgccaagctcccgtcgagctttccggcggtgaagccgtcgttgttgtcgcagctcttcgttttccggtgcttcggcgcctgcggtggtggcggacagtgcttgctgtcttctttgctgccgcctttgtccacgcccttcacgttccgcagctgctgcggcggcaagggcaatggcggaggtgccggtggcgcgaagtgggcttcatcatcttctctgtttcgttggtcaacgctcttcaccttccggtgcagctgggtcgtcgggcaatgggaagacggcggtggcgaagagaacttggcatcgtcttctttgttgctgcgcttcccgccggcgtccacagctcggtgcaggacgactggccgtaaaggtaacggcggtggcggaggaggcggcggcggtggcgagaagtgattaccgcggcgagggctcttccacccccacgtcatgacgctctgctcgagctcgttcagccgccgccgccgagccgcatcttggccgcggcgctggggctcatcctcgcacgcgctccacttgtgacttgtgtcgtgtcgcgcgcgcggctcacaactcacaagtgtcttggacggaggcgaggcgacccgttggcatgtggctcgtgagttatataaagggacccgacgaaagctagctagtggcgggcggggcgtcgcttggtctcacctgtgtagcgcgtgtaactgtagcatatgtaccgtgtacccatccgttcgtgacgtgacatgcaacaccgttcctttc

SEQ ID NO: 10093 - DNA, 2175 bp, Oryza sativa
  ref <308>: DATABASE ACCESSION NUMBER: AK107441
  ref <309>: DATABASE ENTRY DATE: 2002-08-28
cgtatacaggccaacacgtgtccttcggcataccggcttgagcgacgacactcctgcttcaaggcctcgtcgatgcgttgaccaataccctcaagctgagcgcaggctccgttcagccatgagaaatatccggctgcggactcttcgggatccccacgaggtactcagagctctctgcagaccctcgacatggacgtgcaacaactcttcagatacgagtcgaaccacacctcgcggcctcggagtgcctctacggcctggtcctttctcacctccaacatggctctctcgagttccgcgacctcacacttcgtcttccaatactggatgcaacgattttggtcagcaagcctactctcgagatctgctcagcatggaaacaactaagtcaagctgctcttctcttccgagaacacagaaaatcaagtcactccggatagaagtataaaggagatgaaaacaaagatcaccaacttagggaagtcgtcgccatacccgtattcacgggcaaactatgacctacatcgtcctgggacacatatggttggagcgcaatcgccgggacgaccaccggtaactcgggctgcccacggtgctggacatcctcaacatcgacatccctacaaacgacaaccaaaaatattcaggaccaaagtgctaacggagaccaaggtgacggctgcacaagcaaaggcagttgaggccaacaaaggttttacaaggcataaccgattacaaaggaactgaggtcctactcttcaaaaagcgggagaacagactctcccagctcgccgatttcctccatcacgcccttacgcgcgtcgttggcggccccccaatccaagatctgccgaagatcgagttcggggtgtgccaaccttacacacgcaaggacgtgacaggccccggtatagatcccattggacacctcctccgcgatcctggccgcatgcttggagggtatcgcctccatcgccgttgccagttccgcgagtgaagacgtcagcgagaactcgtcggagttcgccgggatggttgtcgtaacaccacattcctcggcgagctagtgtaggccggtgtaggtgacccgcaacgagccacggatctccgacaagttgttcttgagttctgacatctggccctcgagtccccgccgttgtcgctcgttgctggccaccagctccctcattttctggaggtcctcgcgaacctccgccaggtcgtgctccagcttgtcggcacgctcgttcgctgacgacgctcctgctaccctcgcctccgcaatctcgcgacttatgccgcgaacaccagcctcgaggatgcgccccatctcggcttgaaactccccccaggtgaggacgtcggcagacgggccgcgagtaggcccgaggtcactggctggcctgctcggcgtcgcctcacggctcctcggcacgaccacgacatcggtcgaggccaccgcaggagatgcgctggagttccctccggacctgtcttgcgccgccttcgcctgtgtcgacctgcagaagatcatcatgtctggccctcgaaacaagtcgccagaaatcaaacaaggtaaaaatctcgattttcgtctacttacttctcgcccagcgtcaccagcttccgccatcgcgaaggtggcggagacgcagccacggcctaagtaaaccaagtacgaattgagggtgacatctttcgactatgcagttaacgaatcaagaaactcactgatggggaggacgctatccggcaactgccgagcacggaggtgaactttctccctatccttgggacacggctgccactagtcgtagcagcaacggccacatcggacgcctcctgagcgacgccctccttcaacgaggccgccgcctggtggtccacgagcagtccaatggcgtcagtcagagggagagcctgcatcgcataaagtcattatccgatccaggagcaaaaatgaaggggttgccgactacactcacgttgattgcggcttcgcgctcggtcgcctccttctcaaaaagaggaacggggacgtcgtttgccgttgtcgggccgctgatcatcaattggccaacgcggcgctccacggtggcgctatccaagcctgctgatcgagaacagaattcgataagttagggagaacatgcgcatgagggagtcaatttaact

SEQ ID NO: 10094 - DNA, 3063 bp, Oryza sativa
  ref <308>: DATABASE ACCESSION NUMBER: AK107442
  ref <309>: DATABASE ENTRY DATE: 2002-08-28
catttaaataattatgaaaaaatattaaaaacattcaacaagataaattactatgttatatatcactacgcaaacatacaagttaaattttgatttctacaagttacaataaaataaacaaattaatgtatattatagggcttgttcactttgctaccatttttaaccttttttttggcaaagttaccaaaaaagtggctacatttagtttgttgccaaattttagtaagtacatatgaaatcttgccaaaattttggcaaccttactatggggacactcgataaagtcatggtgtcccacgaatacgtaactgcccaggatgttcagttacgcatgaaatgatataaaaacataaacttcgattatacaatacttaagtcacttacttcacaacacaacataaatacaaaccattacatatatggcctataaagccttatttctacaaacagataaactgctagactccaccacagaactgcctgagcgtaggatgacctggaaatcatagctgtcccactctaacgggtcaacaggatcttcacaagcatcctcctcctcatgatctgaacccatttatgcgtacaaaaggtactcagcaagacatgcttataatagcaaatgcaataattgcaatataaaacatgcagtattgagagctggaaggtttaaaccctaaccttaacagttatttcatagaacctaacttaataaacatatgatataaacaacactattgaacatttaatttaaacaataataataagcataaaaatataaatgttacttataaataacatgaatagaacattagataataaataagttcaccatattaattaatagccatttagtttaacttgtgcccataatctggagtcacccatagacacatctccattaaccgggagcacggcgtattcgaatactcaacgactctgcagcgtctgcccagctttacccacacgatacccatagttggtcgggttgaaaagtaacaaggtgtaatattgctccatatatctctcccttctgcctagtaagttaaaggatgcttgggatgttgctcggagtgatccggtccgaggtgtgtgccaacctacctccgcatccacttaccattgttcgttactcgatgggcagcccagaacttcatgggcccatagggcagttctgaactctcgaggcccatcgagcccacatatataaatcatataaacatgaaccatgtcactttgcttgacacacttgaaagctaatggccagtacaccgaaaggcctgcagaagtttaatcaattagagcaatatacggccggattcgataactcgatcatgtggatgggcgaaactatgtcattcttattgacacaagggggttgattattatatcaattttaaataagaaataaccataaatatattcatatatccatcacgaccataaacaggtccataaaaccaaacacatgaactctatcatgtataccacccgctcacaagcggtgtcaacagttcttagcatatagccataaatagttccataagcatgttttcatatgcagtaataatatccatattaaatcaatagcatgttaaataattaacagtttgttcaagtgtttctcaaattttatcctaagttagttagactctatggctcattaagatgtttataacaacaacagaaaatataatgcaataatagcaatataattaacttaaaagaattcgtgtagtctatcatactccaaaggacaagtacgctactaaaataactctctatctactaggattaaattgttcaagggagggtgcatgtcttgcaactttcgggctcgatgtagtcgtacaaatcgtctcctcctggcgcggagatttctctcactccgattaccggaccaacgtcagcgttttctatttatgcaacaatcattaccacaataaatacaagaaaaacagagataaccaaaacaaatagtatcacaaagtgcaacagcgagtgaaaaggatttatagaaataattttagggatttttggaatttcggggaacgacgaaccctatggctaaaattagggtcgcgacaacgggtgctcggattgcaacgaaactgactggatggattcggaataattctaggagtttggaataggtctcggatttcgattttgaggtcaaacggatggtcaacttgataggaaaagaaaaagggtattttctgatttatttttcaataggaaaagtggatttcctgttcttctcgttctgcacaggaattggccggaatcccacattgctggtggcagaggaggccggttttggacaagggggcaccggttttgtgatctaggggtcgaggcgattccgtctgtgtggtcggcggcgaggctggcggcggcgggcagtaacaggaggcggaggcggccatggtggcggcgactccggtgaactccggtgctggcggcggcctagtaaggttcagtgaggcgagaggagtcccagggtggcgacggccaaagctagggcgccctggagcggcggcgcgccatgcggctggtggcggccgaacagagcggtgacgccgggaggcggtgccggcgacgttccggcgatgagttggatgggtaaagagaggggaaagggagtactcggcatggagaatccgattttaccttcaatttcagaggattggcgatgtatgcgacgaattttggagctcaatcaatggcgccagtattagtgtttcggggaattttcctccggtgacgacgacttgatttaatgggagtaggggcggatttgaggaggtgaaagaggtcgaaactgcgcttcttttgcctccggtcttgagccttctagttgagagacgaatgagatacggaggcgggaagctggaggtgtcgtttgggtattcgttcgtcgatcggcctcgtgcatgcacgtgcgagcgtgtggcatgcgcgggctggcacgagctgggtgcgggcgcacacgagtgcgactcgggattggcgcgaggcaacacggggaggcacaggcgttggctcggcctagccgaatag

SEQ ID NO: 10095 - DNA, 1934 bp, Oryza sativa
  ref <308>: DATABASE ACCESSION NUMBER: AK107443
  ref <309>: DATABASE ENTRY DATE: 2002-08-28
atgtgaatccccattacccgatccgcctcctcattacaagttttgctttgcctcaccaccaacggcgccctgccgcccttttacatccctgaggcttcggcaccatcgccgacgccttgccacccgcccatatccatcacccgccgctgggccgtcgccttccacggtcatcgctctaagcctagcccctatctccctccctcaccccaacccgagaccctaaaccctaactcatcgtcagaattggaggagttgcagaggtcgccgatgcacaaaacgtgaagcaatcataaggtcagaaatttacaagattttctgtaaaatgctatttagcaattccttttttaatagataaacgacgagacaatggagaaagctggcgatagagaaaactcttcacatgagccgaacctactgtaagatccacttgtaagtaatagttcagttgatttattttagtcaagtgatgtatattaacacaatccaccccctacaatcattctcccatgtgtcaacaaacaactaaaaaaaacccaaaccctgcatgcaagatcacgggaaaaagcgtaacatcattacaatttacagcttggatgtagtaatttcagatgcagctagcaagtagggcacaggttcatccagttcactcaccaccgaatgggcatcatggcaaaggcgatcaaatagtgtcacaggtcaacaggagcacagcccaggcctcagtcacgggaatcatgagccactgagcaagcatgcaaatgtgcactgaaaatctgaaacttctgaagcctgaagctgcatgccactcgatgccaaagaggccaagtgactggaggattcatcggtgagcttgcaaacatatattctagaacaacatttcatatcaatctcctcatctcggcgttgggaatccatcagggtggtagcttagcttgtcctttttggcgcccatgtgagctcttcatttggctgcacctcccatgggggctagctgtgctgtctctcacgagagaagctaactttagtatactttaggtagcatggatagggtggatgtgaaggaagaaagagagtagaagaagaaaagatgaacaaaaatttgctcatttgcatggcaaagatcacacgaagcacacaggaggcttgcccttgctgagaagaaaaaggccctttctttttcttctttctgaagatctgaagaattttcagtcatgtgaggcaaataactagtagctagccaattggtttcagttcagtgttcatgcatcatgcatgcccaggtcactgtgatttctgaagctgtagcgaactgaagatcaaaacattccatcagagagcagaaatgagtccagctcgtcatgattttgcactgtcacagtcgattcttcttgttggattctatgagcccatacaagctggggttctcccctcttccacatgactgcaactgtagacatgcagaatattagtgataaaatcaataattgtttcttccaattgcaattgtagtggtcacgtatgcttgaaatgatatactagtactgttctgccctttagaaggataagaggccatatctccatatagaaaaataaatcaagttcagaatgggaccactggaaattggccaggaaacagaagaccatcaaattctagccgacactgttttatcttcagaatcttggattaatacttctacaaatacgtagtactaccattacatggtttggacaaatggacaaggcagtgtaaggtggagtggaaaagagagtgatttacttgcaacacgtgattgctgaatttactcttcaattctcatcatagctagtggcttacaaagtgcacacctaaagttttttggtcccaagaaaagtagttgcatgtgacaaagtaccaatgtcgctagtaaattaatgtttaggaagaagaaaagaag

SEQ ID NO: 10096 - DNA, 2141 bp, Oryza sativa
  ref <308>: DATABASE ACCESSION NUMBER: AK107444
  ref <309>: DATABASE ENTRY DATE: 2002-08-28
actgaagacggaagtgacaaaatttgagagctctgccctggctcatgcgtcacggtagccatggtgatcatcaggcccatctccagcttccttgtactcactgtcttccactgcatcaagctggtggcgccatctgctagcgaaaaccagttcgccttcgaaggcttcgccggagcaaacctcagcctcgatggcgccgccgccgtgacgccgagtggcctgctcaagctcaccaacgacaagcacatcaaaggccacgccttctctgccaccttcgtgttcgccatcgtctccgagcatgcggagctaagcgaccacggcctcgcgttcctggtcgcgcccagcaagaacctctcgccacaggggcgcagcacttgggtctcatgaacatcagcgacaatggcaaggcgagcaaccacgtctttgccgtcgagctcgacaccgtcctcagcccggagctccacgacatagacagcaaccatgtcggcattgacgtgaacagcctgcaattcatacagtcccacaccgccggctactatgatgacagcaccggcgcgttcatgaacttgacactgataagccgcaaggccatgcaggtgtgggtggactacaatgggcaggccatggttctgaatgtgacgttagctccattgggtgtgtccaagcccaagaaacctctgctcccaaccggcctcgacctatcgagggtagtggaggatattgcctacatcggattctcgtcggcgacaggcctctccattgcctaccattatgttcttggctggagtttcagcttgtatggagctgcccctgctctcaacccatctaagctgcctgtgttgccaaaactagagcagaggcaccatcgatctgaaattttggtggttgtgctgccgatagccacggctgctcttgtcattggattgcttcttgtggggttcatgattgtcaagagatggtttaggcatgccgagctgagagaagattggaaggttgagtttggaccacaaaggttttcttacaaagatctgttcgatgccacacaagggtttgggagcaagcgtttgcttggaattggaggattcgggagagtgtacagaggagttctctctgtatccaactctaactcagagattgcggtgaagagagtgtcacatgactccaggcaaggggtgaaggaattcattgcagaggttgtcagcatggggcgccttcggcacaagaatctagttcagctacttggctattgccgacgcaagggtgaacttctcttggtctatgaatacatgtcaaatggtagcctcgacaagcacttacatgacaagaacaatcctgttctagactggaacctaaggtttcacatcatcaaagggattgcatctggcttattgtacctccatgaggaatgggaacaagtcgttgtacatcgagacatcaaggcaaataacgtgcttctcaacaatgagatgaatggatgcttgggcgacttcggccttgcaaggttgtacgaccatggcaccaacccaaggactacacatattgtaggcacaatgggttacctatccccttagcttctccgcacagggaaggcatcaccagctactgatgtttttgcctttgggatgtttcttttggaggtggcctgtggccgaaggcctctggaacatgacctccaggacaaccaggtcgtgctactggattgggtgcttgagaactggaacagaggacaaattcttgacgtggtggatcccaggctcagcagtgagtatgttgccgaggaggcgaacttggtgctgaagctggggctcctctgcttgcagccgttgcctagtgcacggccgagcatgcggcaagtcctgcagtaccctaatggcactgtgctggcaccagagatgttgccgacagacttggactatgatacactaatgtttctgcagaatgaaagggttgagtcatacgccatgctggaagcatcctcattggcaacaacagttggccctgggtctgatctttcaggaggaagatgatgaggacttgtggtttaccattgcttgttagttttctgtatgtttatctaacaagtttgtacttataagtcttaatgcctttaatataataacaagctgaccactctatgggct

SEQ ID NO: 10097 - DNA, 1874 bp, Oryza sativa
  ref <308>: DATABASE ACCESSION NUMBER: AK107445
  ref <309>: DATABASE ENTRY DATE: 2002-08-28
aatgtcggcgatcttctgacagtagctgttactcaatatggtgacttacatctacacgttgccacttctcttgttactgttggttcagaattcaggaaacttcgtatccttggtgttcgtgcaaccgcacctgttggtgatcaaaatttgagtgcttccactcgtaccaatatggcaattgagagaggggaggcgctctcagtgcaagtgaatatgaagcacctagctaaaagtctacaatgtcatttggctaagcccgactgtaccttctatggtatttctcctggtggtgcttgcttgactgtgatattccagtatttcattccaggaactagactgacggacaagtccattagcttctactgcaggcttccagtccttgaccctggcagttaaacatattacagcgtggatggatgtgtacttggtgccgacgtcatagtagatggtgccaatgcagacggtcacgaggagatagatgaggagcctcagccagtaatacccgaagtcccttgacatgttgatgaaggagcgcttggtcagtgtgcctgcctgcatcaagaagctagcctggcttcctcctgaatccagcacagttcctttctgcaacgaataacatgggtgtgttagtgttcatcctgttattgcctgtcctggatgcagtcttaactatacgtgggggcgcaagaaaaaaaaaacagagaggaaaaagagtgatatcaatacgcgctgctgtattagggtcgccaagaacacgtaccagtcgtgagatgtcattaactctctcccttgcagcgtagtagtactgggacctgctgtaggatgcaaccaactttctgatggcttcagatgtggtcatcctgtccagaggatcgtccgacctctcgatcttcaatgagaatgcccaaaaattagatcattttaagtgcatcgtgacacgaacaagtttgagcagatcagctatgaacattggtgtgtcttgatctcttcttacccttgccttcatggaacctttcagggtggccttcaccttgtcgaagtcggagttgacgcatctcaggaaatgatccgatggatttctcagtggcgggcacgggaagccggtctgggcgaagaactgcaagcacgagcacaagatggtcacgttagaaaccatggcgaatgatagtggtgacagatatatatatatactggttgctttctgaatctggtgactggtgagatgacttacctcgcatgcctgcgatgcttggccgaagtagacggttttgccgctggagaggaggaagagcatgtcgaagagctcgaacacctcgctgctgggctggtggatggaggcgatcaccgtcctcccgtccctggccagcccccggagcgtctgcgtcacgaagaacgccgacgagctgcgcgcatgatcaagccggcatcacatcgccgcggtcagtccagcgcacaccatcagtcagctcagctgtgactggatgcagggaggacgcgtacctgtcgaggccgctggtgggctcgtcgaggaagaggaggcgggggcgcatgaggagctcgagggcgatgctgacgcggcgcttctcgccgccgctgacgccgcggaggtgccagttgccgatgacggtgtcggcgcagtcctggaggcccatctccacgatggtgccctccaccagggcgcgcttgtcctcccggggcatcttgtccggcagccgcagcatcgccgagtacccgatcgtctcccgcaccgtcagcgtcccgatcaagttgtcgtcctgcgtcacgtacgcctaaaaaaaaaccctccgtaaacctcgtgtttcaccgctaaatgcacttgctttgctatagataaatgaaaatacacttatcat

SEQ ID NO: 10098 - DNA, 1214 bp, Oryza sativa
  ref <308>: DATABASE ACCESSION NUMBER: AK107446
  ref <309>: DATABASE ENTRY DATE: 2002-08-28
aatacataattgaccactctagatgagacttagagaaacctgcaactgacgaagctaatgcaatttgaaatagagaaatcgcatcttggcaattgatctgccaaagagaaggcaataggcaagcatcacagctcaagtaatttattttaagggtgagtcaagtcaatttatatttcagaaagactttcgaaacaagtttaactagaaatattagctgctgaagtcatacaacaaaatcaagatgctgactaactacttactggcagcatttaaaaatcattgtacacttgagagaaaacatcttatgtcactgaaattttacttgtcccaaatatgctactcatatcgcaaactcatgcccatttatgccatcagagatgcagcggccaagttatctattatctagtaaacacttatgccatcaggtgacaattctaacactgccaatgcttcttccccaatgaactcgccttcacttgttcaatggcagtggcgggcaggttgtgctgctggtgcggggtccgtgagctgctggacactgcccggtgatgtcctgtccccggcaggtgaggggcctggctagctggtaccgcagaagatggtgagaggctgagacctcagatcagagtggcgaactggagtgctgacctgatgccatcgcctggcggggactcgttgaggtgaaacattttgtatatgttttaaaatactttattgaattggcatgctttagttagccacacaaaagttacatttacacctaggaaaaacgtatcgcaggttactaaggaactgagcgagtgagcagaagaaagcagacgtcaaactacatccaaaatctgtgataaagccttcttttaaacaaatgtccaaattactgataattttgccggtaaagattctggattccggttcttgtaaaaatacacgccagtaccagcaaaatggtagctgtagacttaaactccttttattcattcattgattaacatttccccactttatttgcagcaatggcagtttccagtttttcacccacacgaagaaagcaaacttcagtccagccaagtcgatcattagatttcgccatcccaaagctcttcgattgatctgtagacgccttccgggtgagtccagaattctccacggatcagcttcatctgcaaatcaaaatcgccattcatgagaaccatcaccaattcaccatcttgccc

SEQ ID NO: 10099 - DNA, 718 bp, Oryza sativa
  ref <308>: DATABASE ACCESSION NUMBER: AK107447
  ref <309>: DATABASE ENTRY DATE: 2002-08-28
acaaagcgtgagacgacagctgcatctcggccggcgctgcatgtcatcctccggtagcgatcgatcggattagttcacgctgcactcgatggaggggctgatggtgtaggggatgctgacgccgcacttggaggggatgctggcggcattgccggcgttgaggccgctgatgctgccggccacgttcttgaggcagttgcaggcggtgcggcggtcggcggtggtggtggcggcggagttgaggctcctgacgccgctgcagcaggccgccgacgggccggagccgccgcgggcgtagctgaggcagggcgacacggcggagttgacctggccgcagctgatggcggccatggtggtgtgtgggcccgccaggagcagagctgccacgagggcgaccaacaccagctgtgcacgggccatctcgatcttggtcgtgtgtgctgacgatcgatcgactttgctgctgctgctggtgtgtggtgctcgtttgctgctgcaggtgagatcgatcgatgagaattcccgggaatgtagggggctttaaatagctatgatttcatctgtgccgatgcatcgaccaagtcaaatgtagttactacgtggaatatatagtccacctataattagagaacatatcctatacacacaagctttacttatgtacacactatacatatcaattagcaaatgtcataaaaaattttagaaaaaattggac

SEQ ID NO: 10100 - DNA, 880 bp, Oryza sativa
  ref <308>: DATABASE ACCESSION NUMBER: AK107448
  ref <309>: DATABASE ENTRY DATE: 2002-08-28
aacatcgcacgcacgcacgcgctagagaaactaaagagagagaggtcgatcagaaatcaatggaggcgcacgtggagagggcgctccgggagggcctgacggaggaggagagggcggcgctggagccggcggtgatggcgcaccacacgttcccgccctccaccaccaccgccaccacggcggcggcaacgtgcacatcgctggtgacgcagcgcgtggcggcgccggtgcgcgcggtgtggcccatcgtgcgcagcttcggcaacccgcagcggtacaagcacttcgtccgcacctgcgccctcgccgccggcgacggcgccagcgtcggcagcgtccgcgaggtcaccgtcgtgtccggcctcccggcttccaccagcaccgagcgcctcgagatgctcgacgacgaccgccacatcatcagctcccgcgtcgtcggcggccagcaccgcctccgcaactaccgctccgtcacctccgtcaccgagttccagccgcccgccgccggccccggccccgccccgccgtactgcgtcgtcgtcgagtcctacgtcgtcgacgtccccgacgggaacacggcggaggacaccaggatgttcaccgacaccgtcgtcaagctcaacctccagatgctcgccgccgtcgccgaggactcctcctctgcttcgcggcggcgcgactaggagaggcctcgtcaataaatcgtcgtcgtcgtccatggcggcggcggtgtcgtgttatttgtcacttcttcttctttttctttttacttttttttttagttttgcttttcccatgtttttttttcttttgctttccttttggttttcttgtaaaaacaactgttgtggcataaggaagcctgttttggtttgtacgg

SEQ ID NO: 10101 - DNA, 1795 bp, Oryza sativa
  ref <308>: DATABASE ACCESSION NUMBER: AK107449
  ref <309>: DATABASE ENTRY DATE: 2002-08-28
aagcaagctaagttaaggaaccatctattattcttcttcggttagaatgttgtgttactcctgtattggccatgtctatccataatgttcatactttagaggtagtttatttcaatcctctgtcacactattattttttttctataatttgaaggatggcgtatagtacactgtcacccctaacatttggggctgtctgcgttaaacattgtgaacttcagtaaatagtaaatactccatatgccacaaaagaaattagtagtcaaagttgatttggagacagtagaacgccacttactgatgattgcaggaatatatatacaattacaacactggaaatttggaatcaaggattcaaggatgattgtcacactccactaacatatacaggtgttcagagacagattatagtacaatccctaacagaacatacgatatcctgattgcaggatgattttttttttttgaaaccgagattgcaggatgatgacacagatgatacagagtggttgttcacattggcgatgatttcaggctgatcacatctagttacccaggaaaccatccacttgcgcattcaccgatcgcgacagaaacttcatgcagatcggcggcttcaccttggcgagggcaaggatggactgcggcaatgtccagatgccgtcgccgcagatcaagccggaggcgaccgccggcgcgaacgcttccgccttggccttgttcaccatctcccacacgaagaggatgacggtgccgatgaacatgtcgatggcgaagtaggagccgatgtagaacgggatcgccatcgccatgggcagcgggatgaacctcgccaccttgcttggcgccaggtcccttgccaggttgatggcgatcgccgcggcgaagaagatgtagcacagcgtgaggcagtgcttgggcagcgaggagaagccgtcgacgccgaggatggccatgttccggtacacgatggcgtacggcgccgggtactcggtgccgctcacgccgatgtcggcgaaggccttgtagaagagccagaagacgcacggcgcgatgacgcaccccatcgccgtgccgatcacctggctgacgaacatggacctcggcgacgccagcgtcaggtaccccgtcttgaagtcctgcatcaggtcggacgccgtcgacacgatgctcatcatcaccccgcaggcggcgagcccgaccagcacgccgccgttcgacgcgccggcccacgcgccgaagatgaagatggcgagcttgccgtacgtggacgcgagcgaccagtccgtcagcccggcgccgtaggcgttgcagaaggccagcacgggcgcgaagacgtaggcgatcaggatgtagtaccacttgagctgcgggaagatctgcgggagcgtgccgatcgatacggcggcgacggcgacgtaccccccgaacgcgaccgtcttggggatctggtccttgaggaagagctcggtgcggcgctcgtcgtcgaaggagatggcttcagtggccaccatcgggctgccattgttggagaccggaagcgtgctgttcttcttcatcatcacgacgaagcctgcggttgtgcggatgagcaccttcacgaagttgtacaggccgtctccaagaatcaaggcaatggatatgaacacctgcagtagtcaggaacaccacattagctgcttggtaactatcaactatagctgtatagcagcaaaagggaggattttttttttgaatgtttacttaccctgtagccttgcagtccatgaagactagtttctgagagagaggcagc

SEQ ID NO: 10102 - DNA, 1505 bp, Oryza sativa
  ref <308>: DATABASE ACCESSION NUMBER: AK107450
  ref <309>: DATABASE ENTRY DATE: 2002-08-28
atactctacaatctacctggaagaacaaactgctcgcccccgcgtcgcccacgcgcgggcgacacggggggaaaccctagcgccgcctccgccactctctcctcctctccctcccctcgccgctgccggaacgcgccgccggagaaccgcgcggccagccgggatggcggcggcgaggccaacccccgacggcgccccgtctccgcgcgtggatggcgggccggcgcgtggtgcaaggctgacgacgcggcgtggagacggtggatccggcgccgctgcggccggatctggcctccccgcggttggatccggcggatccacgccggatctggccggaggcggcggcggctagcggctggtggctggtggctggcggcgacgacgagagccggaggctggtggctggcggccgctggcgaaggaggccggtgcatgcagaggatgcagtggcgacggcgaggccacggtggcggaggcggtggaggatggcgcggggagacgcggctggaggccgacgcatgcggaggccgcggacggcgatgcgactggaggctgcggaggccggcgcacatggaggcgcggctggaggccggcgtgcgtggaggccgtggtggcggccgcagcggaggctcggccgatgacggcggagggcgacgtggcacagccggcgacaggggacggctacaaggcgcgacggatcggcggtggtgaagcccgtcggcggtggtgacggtgaggcgatggctgcggtgaggaggacggaggcgacggcgatgcgaccaagcacccgttgacacggcggtttgatcgaggcggcgatgacggtcatgctgtgaggggggtgttgaagcctgcggcgagcttccatccaggcgtctgccttcttgcggtggcggcttgccgccgaaagatggccacgctggacgggcgagtgcggggagaggggatccattcttctctctcaccttctccctctccaacccaaccacgtggatggacgtgaagcgcggtgaaggttgagactcttctttgatggccggacggtggcgaggcgtcggcgcggtggctacgtgtcaaagggaattagatggtggttctgctaaactggcatgcactttttgacgcgggagagtagaacaacaggcgaaagcctagctttcgggccggcaacggcgacgcctacgggcgccgttttccccttggggcattgtcgtgttttctatttttcccagtgggttcttcaggtgaaaacctcgtcctggttacctaggacggacggtggcggcgcttttgtcgtcgttttccttcttggaggcatcgtttagaagtcctattcctttggggtgttgtgtgcttgttttgttttaaacagtaggatcagacgtagacgcgtggtgtggttgtatattttctttttcctgactacagtctcccaggactataggcttgtattttattccttctttatcaatagaaacgtcgcactatcttgtgcgggttgtttc

SEQ ID NO: 10103 - DNA, 2014 bp, Oryza sativa
  ref <308>: DATABASE ACCESSION NUMBER: AK107451
  ref <309>: DATABASE ENTRY DATE: 2002-08-28
acaaacaattcctccccaatttccctcccaaatctctcccgcctccgatcccacagtctctctctctctctctctctctctctctctcgatgccgacgcttcgcagcgccacagcgagcgcgtcaacggcgggcacggcctcgccgacggcaatcgccaccccacgaagcgctaagcggcgcctcacgagccctcgccgagccgcagggtcacccgacgcgtctcagttcacatccccccacaaatcccccaatgtcggaatcgttggcaccccgaagctgctctcggcgtcgcccaggtcatctaggaagcggctttacggcgacttcgtcgcggccgagaagcccaagtggaatcctcgaggcaagtctccagaatcccatttcagtagggctcagagttctgattgggatctgacgaaagaattcatctgttctgcagatcccgctcagatgcaggtggtcaaggaggcgcttcacgtggctacggtgccctcttgcggattggtctgccgagatgatgagcagagtcgcgtgcttgagttctgcaagggttgcgtggagcaggagcgttcagggagcctgtatgtgtgcgggtgccctggtacagggaagaccttgtcgattaacaaggttaaggagagcgtggcgcgttgggcagacgagaccggaatggagacacctgatgccttatcgatcaattgtacaagcctagcaaagacgcatgaaatttttagtaagatacttgcgaagtttcagactcggaagaaggcaacctgcaaactgtcaccacttcagcaacttcaaaccatgttttcccacaaggaatcagccccaagaaggatgttgttggtcgttgtggatgagatggactacttaataacaagagaccgggctgtgctacatgatcttttcatgcttacgacttaccaattctcaagatgcatactgataggtattgcaaatgctatagacctagcggatcggtttcttccaaagcttgagtccttaaattgcaaaccacttgttgtgactttccgtgcttattccaaggatcaaatatctgacataattaagcataggctgaaggttctcgagtatgatgtttttgaaccactggcccttgaattttgtgctaggaaagtcgccgcagcctctggagacatgagaaaagctcttggtgtttgcaggagcgctgtagaggtttttgaagcaaggttacaagagtcttctgatcaagaatttggacttgtgacatttgaccacatggacattgctttgtcaaaggctttcaagtcacctgtagtagatagcattctctgtcttccccaacatcagcagatggtattgtgtgcattggcaaatacttttcatcattgcaagaaaaaggcaacgactctaggagagctcaataaatcatacatagaaatttgtagatcaaccctagtcccagcagttggaatgcttgaattttcaaacatgtgcatggttttgagtgatcagggattcatgaagcttgggcaatccaaagaagataagctcaggagagtgatgcttcaaattgacagttcagatatcacttttgcatttaagggtaaccggttctttcagaaatgtttggagcaacaaaaattttagttagtcactcaattcagcaacgacgtctatacacagtttgcattgtatcttataccaagtgccagcaaatcaaaagcaataatgcccaaaagttcaggattttgcattctattggatcaaaccaacgtaaattttgaccccgtcctcaatgtttatcaatatttatgatttatggcgaaaccctttgctgagaaaactgtacatgcgggatgagttatgattgtttttcttacagttcttctgaaagattcctaactgtatttgtaattctaaaaggtagttgattgtagttctgatttttccccctagtcttattttccttcaacacagtctacattgattatgatttaatccattgacataaaagataatttatg

SEQ ID NO: 10104 - DNA, 1640 bp, Oryza sativa
  ref <308>: DATABASE ACCESSION NUMBER: AK107452
  ref <309>: DATABASE ENTRY DATE: 2002-08-28
attttcgaaactcttgtagttgtagcctcaggcctttggtgagcttgggaagaggaagaaagagaggctccaagagtagtaggactgggaacatatgagaaagcatgagctctatccatctatccatcccctcccattcgctagaatgttgcaggtggagatttcgctcttatgttttctcgatgcctcccattcctatcgttcttggaacttccttcctcttccttttttttgctgatataattttcttagcacagtaaacaaacatacaacacacacaaaattttgatcgatgatagatgcctttgagaaaattggaagtgagccggggaagagggggaaatgtgtgtccaagagcggttggcatgagaccgtggaggaaagccccaacacagcctctcttctgaattcaggggttaagcacttaagcatgtgtttcggtgttttcccgatgcctgtcatgcctatcgttcttcggtgctccttcctcctcctccaagctaatacaatttaatttagtttgtgtcttcataatgcttgcgtgctctgttctaagtatgtgatacatgtaactaatttaagtcattctatatggcacaaagttttctccacatcctaaactaaccccattgatagtgtcacagaatagtacacgtacacaacaaagtaggagacaacacaagagagggaaaaaaaaactctatcgagaatgtgatcaatttggcttgagctaatgatctgctcaaactaagtactccagtaacaacctaaaccatacttagaccttgttgccattgttatggacgccatcaccaccaccatctttcagaggatcgtcgatgttcctgacgggtcccttgaaccacctcctggcgtcgagcacccaccagagcccgatgaggccgaggcaggcgccgagcgcgacgggggcgtagttgaagttgccggcgctgatcgggtacgccgtcgggaggaggaacacggtgcaggtgtagcagatccacaggaacgcgacgaggcacaccggccgcgacgcgcgccggaggtagaagggccccggcgagaagtcctcctcccgcatcaccatgcgggcgaagatgggcacggcgtagccgccgacccagccgatggttgcgatcgacgtgatggccgtgaagacgacgttgatccacaggatggggaggcccagcagcgcgcacgcggcggcgcagagccagacggcgttggcggggacgcggtggcgcgggtggacgcggcgccacacggaggagagcgggacgccgcggtcgcgggacagcgcgtacacgacgcgcgcggcgctggtggtgatggagaggccgccgaagaagaaggagccccagatgacgaagaggagggcgatggcgcccgcggaggagccgtaccggccgtggaacgcgtcgaacaggatctgcgccggcacgaacgtgccggccgtctcgttgctcgggtcgaacaggtagctgaagtcctgcgcacacacaggaacagagttcatgtcaggccattcctagggcaagtgcgagatgtgcgatcgcacaggcaacaaaaaaaaaaatcgatattgctaaatttatgtcgacatattttaggataatttacagtcggatgttttaaccgtg

SEQ ID NO: 10105 - DNA, 717 bp, Oryza sativa
  ref <308>: DATABASE ACCESSION NUMBER: AK107453
  ref <309>: DATABASE ENTRY DATE: 2002-08-28
cactcgcctcgcaagccttcccgaagcctcctccatctccgccgccgccgccgccgccgccgcgtcatgggcgtctacaccttcgtgtgccggagctccggcgaggagtggacggccaagcagctcaagggcgagctcgaggcctccgccgccaccccctacgagctgcagcgccgcctcgtcgccgccgcgtccgccgccgactcggccgccggggtccagtcctccttcgccatggtctcccccagctccgccgtcttccaggtgatcatcggtgctgttggtggtggtgctgccattggaggtgctgctgctggcggtgccgctgctggtggagctgccgccgaggcccccaaagccgaggagaagaaggaagaggagaaggaagaaagtgaagacgaccttggattctccctctttgattagattttgctttcatatatccagcaaatttgtcatggtcctcttgcagtagttttggtgtttgatgctcatgctcttgcagtagttttggtgtttgatgctcatgctcttgcagtagttttggtgtttgatgctcatgaaccagaaggccttgtgaacctgctaagtatgataagataatttgtggtcatgaatgttggccatatctgtgtgacttgcagtttatgttgagattttggttatatgtgacatttagcatcaacgtaagtaatcagagtcaaaaaaaaaaaaaat

SEQ ID NO: 10106 - DNA, 3267 bp, Oryza sativa
  ref <308>: DATABASE ACCESSION NUMBER: AK107454
  ref <309>: DATABASE ENTRY DATE: 2002-08-28
ctgcctcaacctcaagccaatcgcgctcacgctgggagcagaccggtcgccggtggcggtatcagggagtaacgtgttccgacgaggggcggctagccggctatactgtttcctctcgaaatctcgatccatccgtatgaagcagggagcataacgagccctgccggcggggggcgaacgtcatcgagggacgcttagccgctcggagggcggtggattttgttctctggtaggtatcgtcagttcgtcactatctctgaagcggtgatactgtgtacgaatagattgtgttcgatcagcatgtcaacgtggtcgggtgctgcatcaatgcctctccgttcagcagcgggagtgttcagtgctgccgacaacagattgaaggagattgataccttggtaggggagatccagatggattttcggagcttacatacgcctaactgtgtgttcaatggggaagaaatagaggatgacgacgatgtcgttgatccagaatacctcgagattatgacactcgccgggcagatcagatgtggagttcgggaacttcagactgctctagaccgtaagcgtatctacgatagcagctacggtgatgaggacagatcaatggaggaaactcaggggcaagcatgttggttcccttctgcctcgcagctggagcttgtcattcactcactagatgctcagttgaggcactgcctcctctgccttgcaatgttcccggctgatgagctcatcaagaagaagatgctcatccactactggattggcgaggggatcgtccagtccgttactgctgggaaggactgctttacggatctcctctccagaggcctgatacagcctgcttgccagcgacaacactgcagcaaggtgcactactgcaagattccccccattgttagcaactttcttgttaagacggcacatcgcatggggttctatcagtttgatggtgaaggcaaacctatggaggattttgacagtgagaggtcccgccgtgcatgtctctgggaaaggcagatcggtggaagaggcgatgatgtcaatgaactctatgggccgtctagctgcaaggatctgctcacactttacaacttcaaccggcagtatgtcaacatggataagacttggttgtctaaacaagcagagatgagcactctccagctcgggcagtggaagccgtcatggagacaccgcattgaaattgtgagccccgagaccctggaggcggcaaccatgtgcgagagcctaaagtacctcagcctccgaggcatctctctcattgagtatatcccagactctatcggcaatctccagaatctcgtggtgatggacctcagtgcgtgccacaacttggagaagttgtcagattctatcggctcacttcgcaagctgcagtttttggatgtttcggagtgctatctcctggatgaaatgcctgaagggataggaagcctggaggaactccaggttctgaagggttttcttgtgggtggcgccaccagcaaaagtaacccatgtcgtctagcagatctagctagcttgcccaagctgaggaagctgagcattagcactgggcggcgagcattagtggtacaggaagatgagctgaacaaattgcaagggtgcacagcccttgagtccttgactataacatggggagcagcagcagctgcacaagggccgaagcgtcaactgatatctggtgttgaaggaagcatcaaaggaacctccatgggatcagagctgttgcttcctccaagacttgagaagctggacctgcggcgcacccccatggagaacttgatgcatttgcttcatccaggaaatgctgagaacttgaagagactgtatattcgaggagggaagctgaagagctttggtgatgtggaaggttggaatgtcgagacgcttcgtgtgaggttcctgaaagtcttggagtgtgattgggagcgactcagagcttcatttggcaagctacgttttctggagatgcgtgaatgtcccaatctaacttcatgggaatgcgacggcgaaggtgtttggagggaggacgatgacaatggtaccacgcatgtaggttgcttcgacaaatagctagctagattataggcagataatggaggacgaagcaattcggtgctgttcgacatgtgccggcgctcggctggcagagcagctgcagtagcttgaatggcggaagcggtggcggctggtcggggtgtggggtgttgatgctgtgctacgccgccggcaagtgcaggggcaacttccacgccaagcagctgagccagcgcgcgagctgctcaccgtggtgtggctgctcgtggcgcacttcggcatgggtaaccagtacagagttgaggccggccacgcccgcgccaagctcatcaccgagaactagcctcctattgccgccggcacataacagctgagcatttcagaattcagatcagttcagactaagtttttaaaaaatctcttttgttactgaagttaaaaagctttaggttttgacttgactattgaagatttataactgtttaacactcttgcggagataaatccgcgtcaatatgtaaagatagctttcttagtgcctttcataatagtgatcaagctactttctgtaatacagttttcagtatgtgcaagctgttttctgtggtgcaatttcctctgttactgttagtccaagtccatatcagcaaaatgaataacaaagaagcagatgttagcatcatctcccattgactttgacttgtctgaagttttcgtcttctttaataaatctcatactaataagtcattgttcatacagagtactacacaagtaccaaatttcttgtgacgactgaagtctgtctcccagcttcttcaggaactgaagtgtacgaccggcagaaatgttggacttgtacattggcatttcgaagctatttgcaatgaaagttcatggcagtccattgtaatcaggagaactgatcgtggtgttagtcgcgttgaagtcgatgtagaaacagcaaccactaacttctgttttgttctttggcattttgcttcgtacatggcattgaattgctgagatataactacagaagagagagagcttagtactaatcatcaatggcttgcttccttctgaaacaaaaattattggagtctgatgtaagcctttcaaacaggttctttgttttttggtctgtttgctgaggggaccaagtttattgtttgcaatcaattaaaagacctcctccttat

SEQ ID NO: 10107 - DNA, 1845 bp, Oryza sativa
  ref <308>: DATABASE ACCESSION NUMBER: AK107455
  ref <309>: DATABASE ENTRY DATE: 2002-08-28
ccggtgcccagtggcccagccccaacaccctctcgccggcgacggccacggccgccgccgcgccgcgccgctcacgtccactccatcgcgtccaacgccgccgaccgcaggtagctccccctcgtccccacccccggcgcgggcgtcggcttcggcgtcggcaacggctggaggctggtccgcttttggccctgacccaagagccacagcttcttcagatacctaagagactcaatgccttgagggacattgtccaactttggcaatgacacaacatataaaccttcaatgtgttggagggcaccgcctataatctccaagtggtttacatcaggcatacgcttcaagacaagtgtcttcagctgagggaagcaatctgcagaaagaaccaaggtgcttgcactattcaccctgttagggctaagaaagacaaggtttggcacatagggtgcaaggaggagtagaggatcttcctgaagacggcacagcttatggccagatacttgatatttttcccatggtcacgaaatattgggtactcaagtgtcctagctgcccagcaccctctgacaatcagcctatgaagctcctctgattctggtttgagagcttccaagcaaagtgtctcgttttcatgacttgcagatagaagcaagctggaaagaagtggcatctttgatagtgtagcaaaaagatttgcacaatcatcagttcttatgttgtcaatccacacgctccgtagttgcataagtttcatcaactgctcagccaattctttgctggcttccacagtctcaagggtctggagttcttccaagttggatagctctttgggtgcttgcattccaatgaaatagcgaaacgctgactgcttctcgtcttcatatctgtcagctagaaggtgcctcagcttcttaagcttaacaatgctttgtggtagcttttgtattttggtttgcttgatgttgagagtcaggaggcttgagagcttcccaatagattctggaagtgatttgactctagtgcgctgcaggccgatgtagcgtagattaaatagctctcctatggatgctggcacttcagttatttcagaatcttgcaactcgagaacagtaagatagttggattcagacaaaattgaggataacatgtgacgagagggtgttttcattccaagtgccactagggtccggagacgcatgaatttaacttgcaacacaggtttgcccttccatccatatgatgacaagcgacgaacttccttatccatcctctccatagtgtcataattatttgcagagccgaacttctcctctttagcaatagaaagagccaggtcccgcacgaggtcatgcatcttaaagccacctcctctggtgtgttttcttcattttgtactgcaaacccttctgcgacccacaaccgtacaacggtctcacgtgataattcatgatcttcggggaacaggctacaatacaagaagcagtttctaagatctcccgacttgattctctggtggcaatgaagacaataggccacctatagatacgattgccagtggcagaccttggcacctaactactatatcattagtcagtttctcaaggttctgtggacacttgcagtttctgtagaaagcccttctacagaagagttcaagcgcgtcagtgtgctccaatgggttgagtttgagttggcgtgctgactgagcaagagttgctacatcaccctgtcgtgttgtgatgattatgcgacttgcttggaagtttgggaatgcatctgctatttgagtgtatgcttctcggttccagacatcatccaatacaattagaaaattttcatcct

SEQ ID NO: 10108 - DNA, 1704 bp, Oryza sativa
  ref <308>: DATABASE ACCESSION NUMBER: AK107456
  ref <309>: DATABASE ENTRY DATE: 2002-08-28
ctcttcttcctcctcctggggcctagccgcctaggggggttgtggcctgcgactgcgacttcttcctctgccttctgctctctgcctctgagtatatggaatatggtgtgtgcgtgaagagaaattaagtgagggaggggaaagcgagcgaacagggcaacaatggggcaaatggacggcggcgacggcggcggcggcggccacccctaccactaccaggctctcctggccgccgtccaccagcagaccgtcccctttcccaatcccttccccgccccctcctccggagccgagcccccccacccgcacaaccacaaccacaaccacaatcacaaccacaatattcacaattctcacaatcacaaccacaatcacaatgctgctcctcacccttgtcacactcccactcccactcccactcccagaggtttcgccgactggagcgcctccaccagcgccttcacctcccttgccgcgcactcttctactgcccccagcaatgccgttcactacagcttctccccctgctatgccttctggacacattacatgctcaacaagaacgcctaccccacctccttccctgcgccacacgacgaccacctgcgccttgccaacaacaatcatcctagagacgcaccaggtcctgcatccagctacggggtcgagtcttttacttcaccgtccatggcaccgaatatttgcacccacatgcctcccatagaaggacccatatctgccaaggaagataagaaaccagagattttgcctagagtggttaagagcagtgatgaattggaaaccagaaacagcaatgttgaatttcactctgagacagttggtactttccctgagtcgaagcaaggccatgacagtcgtgctactaaactactcaactcgggagaataccaagtcattctgcgcaaggagctgacaaagagtgatgttggaaatgttggaagaattgtgctacccaagaaggatgcagaggctagtcttccacctttgttgcaaagggatcctttgatactgcacatggacgacatggtgctcccagtgacatggaagtttaagtacaggtactggccaaataacaaaagcagaatgtacattctggattctgcaggtgaatttctgaagacacatggtcttcaggctggggatgtcatcattatctacaaaaacttggctcctggcaaatttattatccgaggagagaaggccattcatcagcagacaacaaatccctagatgcatttggggttaattgcaacagtgttagttgatgcatttgaagggaaggacgtggacttaccataagttggcaatccaggagaagttgaaagtgtcatcgatttttatatcactggtggccaccatcacatggacaaagattaaagcgcatgcagcttggacctgtttaactctgaatgaatgaggacgaaaaaaagacaagattggtagagtattggaagtgttggcaatgggcttctacagcttatcttgggttgagaaaagcacttgtcagtttatttaattcagttatgttggggagcttgacttgtagttttcagaacaatatatttgcagcttctgtaaatatttttggatctataagataaaagagagtggtgtgtgattttgcttttgatgtcatccatctatttctcatactaatgccaggaatgtctgttcattgtcagc

SEQ ID NO: 10109 - DNA, 1679 bp, Oryza sativa
  ref <308>: DATABASE ACCESSION NUMBER: AK107457
  ref <309>: DATABASE ENTRY DATE: 2002-08-28
gtgcacgaaccctccgatcaccgactccatcacgatcgtcctcgcgtgctccttccacggccgccccaggtacgccagcctcggcgccgcccccgacgacgacgacgtgttgctgctcccgccgccggcgccggcgaagtcctcgtcggcgaccacctggctgtggtgcagcacgaaccccgtggtctgctgccggtcgcgccgcccgtgcgcggtcaccacggcgggcttccccgggagcggcggcttgacgaggatgatgcagcgctggaacatggcggccgcgtcgccgaagatgaagtcgacggtgccggagatgacgcagctccggtagaactggcggtaggcctgcgcgaacagcgtgtcctggttgccctcgatccggcagttgaagaagatgctcttgtccgccttcacccgcagcgccagcgcctgctgcttctcctcccccgccgtgttccgtatccccagcctcatcgccgtgaaccggtcgccgtccaccgctgcatccatccgtccatgtcaatgtccatgtccatgtcgatcaatgcatgaatggatgtgagtcgtcaatggcggtggcgtactgtaccgaaggtggctgtcttccacatcctgacgccgtcggcgatgttcttgctgccggtgacgatggatttcttggagccgtcgccgtacatggtgatgttggccatccggctggtgacgttcaccgtctcgtcgtacacgccttccttcacgtagatgatgtacttcccggcgtacgcctccggcagggcgtccagcgccgccgagatgttggtgaagtcgccgctgccgtccttggccaccgtcacgttcggggtcagcccggcgacgaactcctcgccgctggtgagcatcctccggtcctcgtcggacaaccacggcgggactggtggtaacgactgatcctcgaggtggcggtccacgtggtgctggatgtcgtggtcgacgtcgagctcctcgccttcggcggcgtggctctcgctggcgtggaggtcgagcatggcggcgaaggcggcgccctgctggatgatggcgatggcgttgctggagatctcgcgggccttctccatggcctccctcacctggtccttgatggggccctgcgggaacatgtcgacgcaggagccctggaacgtgatcaccgcgctgagccacgcctggaggtcctgcgcagaagaggtccacgctgcgcatcgtcgacttcatgccgcgcttgctcaggccgtcgtcgtcgccggcgcggtccaccaccacgtaggccaccgtgccgagcacgatggcgagcagcatgaccacggcggcgatgatcagcttggtgcgccccgacccatcgtcgtcgtcgtccgacgacattgccgcccgcgcgagctagctagcgcgggtcacgacgtcgacggccggtgcggcggcgcgaggcgactcctccgatcgatggatggatggatggatgcgacaacgatgacggcgcatcagttttatatatttctcatgcggaaaaacgaacgaatccaacgatgaacaagctaaactggctatgattagcaacaaagcgtggctaatacaagtttgtttggtttgtgttttgttgggtacgtggttgtggtgtgtccttgttctgaggaagaggaggaggtcattggattttgctggag

SEQ ID NO: 10110 - DNA, 1748 bp, Oryza sativa
  ref <308>: DATABASE ACCESSION NUMBER: AK107458
  ref <309>: DATABASE ENTRY DATE: 2002-08-28
aaaaaacgaacgcttcacagcgacgcgcaacagaagcgatccgaaatcagcgcaacagaagcccccaatccatcttcgcgcatccccacatcgccgcgcccgctccactcttccacccccggcgccgctgacccctccccagctcccgcctcccggtctccctcgacccatccccgccgcttgaagccctcccgtcgcgcctcacggtctccatcacgccggctcgccctcgacagatccccggaagccctcccgtcgccagttcgtcgcacacacctaccttgccgatctgctcctcgccgccactgtcggcgcccgcatccacgacgccgccgtcatcccttggtagtttgatgtcttctccttctcctcaagatggatccaaatgtgccaaatgcgtttattagcaaagcgaacaaactggggatggcgccacgacctgcttgtgctggagacagaggacccctcgtcctcctcctcctcctcctcctcgccgcgcctccctgacccgccgccgcttccaccctcaagcgccaccgcacgtcgcacgagaccccacttcctcccgctccccccgctgccgcgcctcgctgacctgtcgcctttaaaccttgcgccggttccaccttctccgaggtcgctgcctccctagagggccggccagaggtcgccgtggagtccttgaaagaggaggaggaggaggaggagagacggtgccatatgcgttgcatcacacgcgggcgccgtcgctacctcgagcaccgtatgtgcgattgcagccgcctccgctcgccatgagaacaatagcgtgtcttggtgctaccatgccgagtgatctaggagtactcccttttttctgtggaatttctccaggttttagttgagtgcttgggactaaacagtactgtagcaagcattatcggcctattttgttcgcagagtgaagaccatggatgcagcatgcatgcagagttgcagactgaagacaggccatcattcttcagtctaccacgagatagcggcgcaaatgcttgattcacttatatgagatattatgtgcgaatggccaccccaagataatatacttcaggatatgcaaaatcagttggagaatgcaaattcggttgttctctttcatccctcatatatgcatatgtttcttaaataatttacaaaattactgttcagtagtggagtaaataaatatgaatgacggtacctgtcattatgcacatgttctctaaacacatttcatgaatgacaaggtaatttttggtaatattgtttggcagcgagtatttgggtacaatgtactaaagttaatcaatatgtgtggcatatgcattgtttttcattgttaaggttcgaacaactgaaggcaagtaagatgaaagaccttgtttgaaaagggaaagctgaactggaagagcatagaagatgcgctcatctaattagccaggaaggttatgcagctgagtttagcattgaagttattgaagtgcagggacgtatgcgttttgcaggctgagcacatgaagaatcccagttaatgtctctttaacttccatccataaggagactcgtgcactttcctgtcaccctagcacaagttattacgctgtgcagacttttggctatacattaagcaagatgcagcaagtattttggattgatgatctgtaagatttgagttcagctcatgctcgttgatagcacatgacacatcggttgaataactgtgttcattt

SEQ ID NO: 10111 - DNA, 2332 bp, Oryza sativa
  ref <308>: DATABASE ACCESSION NUMBER: AK107459
  ref <309>: DATABASE ENTRY DATE: 2002-08-28
ccatccgcgaaaagcaactccacccgacaacctgccccatgcactttccgttattctcatttcacccctcgcaattttacactccgccccccatgccctctcaaaactaattacaatccagtccttcaccggtcagcgatgcccactccggtggccgccgcgaggcagtgcctctcgccggccgccgtccccgccctcgacgccgccgtcgcctccgctcgccgccgcgcccacgcccagactacctccctccacctcatctcctccctcctcgccccgcccgcacctcccctcctccgcgacgccctcgcccgcgcccgcagcgccgcctactccccacgcgtccagctcaaggccctcgacctctgcttcgccgtctccctcgacaggctcccctccgtctccgcctcctcctcctctggcgccgccgacgagccccccgtctccgactccctcatggccgccatcaagcgctcccaggccaaccagcgccgcaacccggacaccttccacttctaccaccaggccgccaccgcccagacccccgccgccgtcaaggtcgagctctcccacctcgtcctcgccatcctcgatgaccccgtcgtcagccgcgtcttcgccgaggccggattccgcagcggggacatcaagctcgccatcctccgcccggctccgcccatgccgctcctcggccgcctacccacgcgcacccgcccgcctcctctcttcctctgcagcttcgccgccgcggacgacgccgacgtcccttcgcctgcggggaacctcgcgggcgcgggggaggagaactgccgccgcatcgccgagatcctctcccgcggccgcaaccccatgctcgtcggcgtcggggccgcctccgccgcggacgacttcgcggccgcctccccgtatcgtatcatccatgtcgaccccaacaccatcgaccgctcagacctcggcgtggcggcggcaatggccagcgccacctccggcctcatcataagcatcggagacctcaagcagctggtccccgatgaggacgcggaggcgcaggagaatgggcggcgggtggtggcggaggtgacgcgagtgctggaggcgcacagcaaggtcggccgcgtctgggtgatggggtggtcggcaacgtacgagacctacctcgccttcctctccaaattccccttggtcgacaaggattgggacctccagctgctgccaatcaccgcggtgcatgctgcccctgccgccgccggccctgctgctgctggtggactcatgcctccggcaaccactgttgctgccttctccaagccagctgcaaggtcaagcctcttctcttctcttctcttcacttttgtatccacgaattctttatgcataagatttttattaccatccatttgctgactgccgtgagttaaatgtcccccctttctttattgtcagaatgtttcttggatagtagtgtatctgattaggtgtgctagtacgatttgcttatgttctttactaatttcattttcttaagtgttgatttgtgtgctttgcccattgtagtatggatatttttttcaacttgtgcaattgatttagtgtactactgtaattagaagcagcataggtagctaaaaatacataaatctagaaaggtttgttttcttccactgcattttttaaaaaatgtttttacacggtcaatgatgtacaaccgtttttgtttaatgcgatggtttagttactatgttctaagttccatgttactcctgttatgttctatgttcagtcctgttaggtgcgacaagagttgctggatattttctcttctcggaagtgggttccaatttgttgtcatcagaaccttccagaccaacttccttttagatgctctgctgttagtcactacctgtgttatttactgatttctcagctcttttttattttttgcctttaggatatttaatgggattttcttcttataagccttttctctgtagtcctattcttgtaatattttggattttattactacatatgtgtggccatgaaggagaggttctatagccagtgcagaatccatataatgcacatttcaaactgcttgataaagagagactaaagtgtaaaagtaaaataatatggcttgtgcactaagagatgcaatttcatggtaaaagagtggtgcttctgctgcagcacatctgttctttactgttgtaatgctcaaattgctgatagtttgggtcatatatgtgggcagagattatttgtcattaatatgtagtatcacctataatgaattaccttgatgcatagggctatgtgtggcctatatacc

SEQ ID NO: 10112 - DNA, 1857 bp, Oryza sativa
  ref <308>: DATABASE ACCESSION NUMBER: AK107460
  ref <309>: DATABASE ENTRY DATE: 2002-08-28
tataagggaatgatgggggatgtcccccgtgttaggcgaaggatggtgttgggccctacatgaggttgcgcggccgccttactttttgcctaaggcatgagtggaggccccaccaggttcgcgcgggcccctccttgaaaaagggacgggtagaggtggtgcatgtggtatccccttgaactataaaaggagaaccttgccgcccgagcaaggggacgactttcggaagcttgacccttaggaaagagttagccaaccctctccctagggtttgagaactcttgtaacctgataagcataaatcctcacaggagtagggtattacgcttctaaacggcttgaacctggataatcctgagtctccctcttgatcatcatccaccacgctagcgcgatccatagaggagacacgctcttgatcatcgcgtcctactcccccggtcgaactcacaaaggggatctcacgtccctccgctagagagaattactcctctacagtattcaggtccagacactatagggtgtttcaaccaacatgctcctatatatgtcaacagatggtcgttgcaacctaaagaaatgatggaaggactttgcagcaaacattggcatacacctacacacaatttgcagtcccccgagaacagtacttgtgagctgttatattctataaaggcccttcaaaaatacgtgaaaggagaggggtgtttttgaaaaaacgccgcgcactacccccaagccccgaaccctagccgctgcctccgctcacaccatctctctctcgtcttccctctccctctcgcaccgctgccggcgctggcgcctccgcctcctccgtgcgtcgtcgccgagcgcagccgtatccggctccaccaccgccgtcgccatacacctccgcgccgtcgcggcgaaggtcgcctcgcgccgaccgccgcctcgcgccgaccgccggcgtccggatccggcctccatgtggtcgggggacgcagatctgaccgcccccgtgcgccgggcaacgtctccgcctccgctactgccgtcgccatcgccgagcgccgccacttccgccttctccgtcgccgagcgccgccgcttccgccttcgtctcgctccaccgctgcagcgccgtcgtccgctgctgtcgcaatcgctcagcggtgctgctgcggccttcgccaccatcaccgactaccacttcttcctcgtcctctagctgtcctggtaaatcgaagctcctcccggatctacaaggctctggagcggaggtagctgcaggcgaagcagggtgtcgcagcgacgcgactgttaagctgcgtggcagtgtgctcatgcagctgttgtcctaacgagcgcgcgtggtggcacaaaagcaacaacggcagccgaagtagtgcagttcctcggtggcggcgctatagcaatccggagcagcagaggggagctgccctgtagcgattcatctggtcctcggcggccgccacgtcacgttccccattttggcattgtcgagctactcttcacagcggctggctagcaagaagcaaccacaaggggtgttccgccaggtgctacttttgttgttgccggggttggatgaggaggatggctaggaagcgggcaggcggctcattctgcccgagcttgggaatttgacgagcttatttgatttgaacctggcaaacaacaaccttgaaggacaaatccctgataatataagctcatgcataaatctcattagcttgtaagtttcatttgttctcctgaagttctatatcctctccgatggcagggctcttaactttagctttgtaacagcaatgcttatggcaataaattaaatgggactgttccacgttc

SEQ ID NO: 10113 - DNA, 1365 bp, Oryza sativa
  ref <308>: DATABASE ACCESSION NUMBER: AK107461
  ref <309>: DATABASE ENTRY DATE: 2002-08-28
catccatccattccagcatttcttgaagcttgctgtggatcagagaggatggctcacgagatgatgggtggcttcttcggccatccgccgccgccgcctgcgacggcggcggtgggtgaggaggaggacgaggtggtggaggagacggaggagggtggccatggcggaggagttcaggggaagctttgcgcgaggggacactggcggccggcggaggacgccaagctcaaggacctcgtcgcgcagtacggcccccagaactggaacctcatcgccgagaagctcgacggcagatcagggaagagctgcaggctgaggtggttcaaccagctggacccgaggattaaccggagggcgttcacggaggaggaggaggagcggctcatggcggcgcaccgggcgtacggcaacaagtgggcgctcatcgcccgcctcttccccggccgcaccgacaacgccgtcaagaaccactggcacgtcctcatggcgcgccgccaccgcgagcagtccggcgccttccgccgccgcaagccttcctcctcctccgcctcccccgcccccgcccccgcgccgccgccgccgccgcagcccgtcgtcgcgctccaccaccaccaccaccggtactcgcagcagtacagcgggtacagcggcgccgccgagtccgacgagtcggcctccacctgcaccaccgacctctccctcagctccggcagcgccgcggccgccgccgccgccgccgcggcggcgaacatcccctgctgcttctaccagcgcggcggcgcccaagccaccaccgacagccacaccatccccttcttcgacttcctcggcgtcggcgcgacatgattaccggcgacgtcctccggtggtggtggtgtacaggaaggaaggaaggaaggaagcagccaagatcaagcgatcaaaaccaagctaaggttagagttagccaagaacaagactaggacgaggaggaggaggaggaacaagacgtgctcgaagctcatcaatggcgttctcaaccaaacaagttttttctgctgctgctgctgctgcaagctagcttagattattcagatgaagaacaataagaagaagatgtagtactagtaaactagtaatggtgtgtgcgtttggaaatcaacaagcttccatgccatgccatgcctcctctgttcatcgatttcttttttttatctctctcctctgtatgaacaagtagaagaagaagaagaacaaattaatccattgctctcgcagatggatcagcaacatcaagcattgccgcattgtctctctctttgtgttcattgtccatgacgccaaggagaaaagaagaaaaattttcattgctctgttcttgaaatc

SEQ ID NO: 10114 - DNA, 2239 bp, Oryza sativa
  ref <308>: DATABASE ACCESSION NUMBER: AK107462
  ref <309>: DATABASE ENTRY DATE: 2002-08-28
gtgcggccgcttctatcggccctgccccccttcgccttcctcgcctcgcctcgcctccccacttcgcttcactgcttccctactacacactcgccgccattccccccgccccaaatattctctcgcattcgcgttcccaccgcctcgccctagatctcaccacctcgcgtcgcgcctccaatggggtgcttcctgtccaagccggcgggggcgggtcccctcccgcccaacgacgccgccgcgctccccgccgacaaccccgcagatcccgaggcggcggccgcgaatggcggcgctgactccgcggcggccgacggcggcggcgacgacaaggacgccgccaagcgcgcggtcccggtgttcagggagttcggcctcgccgagctgcgcgccgccaccaagggcttcagcgccgacctcatcgtctccgagagcggcgagaaggcccccaacgtcgtctaccgcggccgcctcgacggcggccgcctcatcgccgtcaagcgcttctcccgcctctcctggcccgacccgcagcagttcctcgcggaggcggccggggtggggaaggtgcgccacaagcgcctcgtcaacctcatcggatgctgcgccgagggcgacgagaggctgctcgtcgccgagtacatgcccaacgacaccctttccaagcatctcttccactgggataagcagcccttgccacgggaaatgcggttaagggttgcgtattacattgcgcaggcactcgatcactgcaatgccgagaaccgaaaaatctatcatgacttgaatgcttatagagtactttttgatgaggaaggtgatcctcggctgtcaagttttggactaatgaagaacagccgcgatgggaagagttatagcactaatctggcttacaccccgcctgagtttctacgaactggcagagtcatcgccgagagtgtgatatatagctatggaacagttcttttggatcttttgagtgggaagcacatacctcctagccatgcacttgatttgataagagggaagaatatactgttgctcatggattcctccttagaagggcagtatgctaatgatgatgcttcaaaactagttgaccttgcgtcgaaatgcttgcaatttgaagcgagggacagacccaatataaagtatctcttgtcttctgttgggcctcttcagaagcaaaaggaggtagcatcacatgtgttgatgggtattacaaaagccacggcggtgttgccaactattctttctccccttgggaaggcctgttccggtatggaccttacagcagtacatgatatattgctcaaaacaggttacaaagatgaagaaggtgcagaaaatgagctgtcctttcaagaatggactcagcaagtgcaagagatgctgaataccaagaagtttggtgacattgcatttagagacaaggatttcaagactgcaattgactactactccaagcttgttggaatgatgtcagtgccttcagccacagtttttgcccggagaagtttctcctatttgatgaatgggcagtcagagcttgctctccgggacgcaatgcaggcccaggtctgcatgcccgagtggccaactgccttctacctacaagcccttgctctctcaaagctcggcatggaaactgacgcacaagatatgctaaacgatggagccacttttgaggccaagaagcaaaatagctggcgaggttaggggaacaagtcatggtttcacccccaaatctgttgttgcctttttaacagaaaaaggtaagatgatgatgagtgttcattgggacgactgttgcactactaggagtgggattgaaaatgcactgttttattgtgcaatctccgcccaaatgtcgataaatgagtggcgttgttgtgacctggaaggcaaaaggcagagaggcattgcttatactacgcttttgagtctgagttgcactttgtttctcgggtgatgtgagcaaacacctgctgatcattgcgttgcagtgctcctctagagacgagagaattgatgagatgagaagattgtaattaaggggatgcttttctgacaatttcacctttttttttcgttttccattggaatctttgggccccaggtgaggtgatagtgtgaagaaaggcgggttccttgtgattagcctaggatggagaataaactagagccatctaaattccattcatttctaccatgttcttgatgtgttacttgctgcttt

SEQ ID NO: 10115 - DNA, 834 bp, Oryza sativa
  ref <308>: DATABASE ACCESSION NUMBER: AK107463
  ref <309>: DATABASE ENTRY DATE: 2002-08-28
ctgtgtgtgtgtggaagaatggcgcgtcaggggagcacgacgcggcggccgcggccaacgacgtcgaagtgcatcgcggcggcgctgtggcgattgtcgtcttgctggtgatcatcgtcatcctgtggctgacggtccgcccggcgaagccgctgctcgtctacgtcgaccacgccgcggtgaccgggttcaacttcacgtccggcggcagcctcaacggcaccttcgacatcaccctgcgcgcatacaaccagaacaagcgcgccgccgtgtggtacaagtcggtcgaggtcggggtgtggtacggcggcacgtacctcgccggcgccgtggcgcccgggttcgacctgccgccgctgaacgtgaagaggatcgacgtggccgcgcccgccgtgagggcggcgctgccgcggggcgtggaggcgaccgtgaagaaggacaggtccgacgggaagctgccggtggacgtgcacatcaagggcaaggtgcggttccggtacggcttggtgaggacacggcgctacaagttgcgcgcgagctgctcgccggtggtcgtcgacttctcgtcgccgagctcgttcgatcgggtgaactgccacgtccatatctgagtgcgcgccggcggcgcgttcacgactgaatgcatggcaaattgtacacatcttgcgtgttttctctctgctttgaggatttgtttgtgtttggattgattcggttgttaaatactggtttgtgacatttcttcacttgtattattcatttttttaatattttttcttcggtgtgtacatgcgtatttctccagcatctaatttgtgggaggaaaggttcatg

SEQ ID NO: 10116 - DNA, 1673 bp, Oryza sativa
  ref <308>: DATABASE ACCESSION NUMBER: AK107464
  ref <309>: DATABASE ENTRY DATE: 2002-08-28
tctctttctcgctctcttctctccatggcgctgtggcgcacaagggctgcggcgctgcgccccaattgtagggggcgtcgccgccgcctctgcctggctgcccggcggggtgccgccgccgcctcctctctccttccttccttcttcttttccccttatcctccctctttttctctctcatcccaactctaaccctacccgttgccctgcctctccaattgccatggctgccgtggagatggccggtgccaagcaccgcgcaactccggcggccccgacctatctccatgagtgtgctctccggtctgtactccccccccccccctctctcctgatttctagtgttttatattggtaagatgttattcccttttgtgctactgatatatgattgtggtgtaccattaggttaatcctaatggtcaacttaatgactctatgctatggattgtaattactagttctagggttctagatcaattgatttgctagattggatgatgccagtatgcccatgatgaatgaatgctcacatgaataaacctatgaattgcattactaaaatagaaatcacactagcatgattaaatccttaattatgcttatgcaatgaccatcagagatattgaaatttgctacatactaataaactaacatgatcagatccttatgttgccatgctgaatagtaatccagaggattaatatgatttcattcatacatgatgcatcatgacagtatcacttaagggatttaatgtcctaaaaattataaatcttgatcttgatgtcaaagtatactgattacagaaatcacaggtaaataatggtgttttatggtattggtcttagcaatgttatgctgatcaactactaaggttcagattctgatattatgctcttctagattacctgatatggtgacccttgagttataagtaaatataccctgttataagtaaatatgcctactctgtttattattccatatattcagaataattcttgtactgaactgctacatgtttaacagaatactaatataactacagatgtccctaaagtattattggacctattatcatacaccaacacatatacagtgttacagagagatacctattgcgatttttttcctctcctcaatttgtaggtcagtgtcaaccgaaagcaaaaatatcagcaagtaaaaagtgcacaagccatgcacaaaaatttccttacgcattcgtggtaaacagaactagtgctcttctgcagcaaagttgggttctgctggtttttgtaacaaccttgcaggcacactttcctgcagccaggccttgcgggtggcatttctcctcaagatccgcatcatgttgccagtgaaacgcgaagcatatattgctgccctgaagctgagagttgtagcaccgtcattaacgattgcgaactgcaacctcttctccttctcgcgtagagagtcttcgatcttctttctgcagtacctatgccaggctgcttgtatgaaacaggctgcgagtagaacttaagggctcgtccgttttggaggaaaaacagaggatttcgatttctaatgattaattactatgagtgtcattcagtttgtaggattgaagtataggaaaaccaaaggaaaatttcctctcctacaaattatacagaggaaacatg

SEQ ID NO: 10117 - DNA, 1554 bp, Oryza sativa
  ref <308>: DATABASE ACCESSION NUMBER: AK107465
  ref <309>: DATABASE ENTRY DATE: 2002-08-28
agctagctgaggtcagtagctaagctcctctgctcatgccccatgctattactatagcagcaggctgcccatcccccacgcatccgatccccgctcgcggtcggagctagcaacgatcgagctgaccttctctcttctctatctactgatagatcgatggcgaagcggcggcggcggtggcgccggcagcggtgctgctcgtcggacccgccgctagcagtggctgctgctgcgctcctcctcctcctactcgtcgtcgtcactgcggcgccggtggtggacgccgccgctgctggccgccacgtggtccagaggcatctggacaggatcaacaagccgggcgtgcggtccatccacagcgcggacggcgacatcatcgactgcgtgcctcgccacaagcagcgcgcgctcgaccatccgctcctcgccaaccacaccgtccagacgcagccgtcccagatgccggcgtcggcgtctctccttgaccggcgccagcaattaagccggcgggcgtggcagacgtggcaccactcgggccactgccccaggggcacggtggccgtccgcaggaccgccgccgcggacgtgcagcgcgctcgctccctcgccctcttcggccgcaagaagcagatgaggagcccgctgccggcgcccgacgtcgtcaccggcaacggccatgagcacgcgatcgcgtacacggcggcggaggtgtacggggcgcgggcaaccatcagcgtgtgggcaccggagatcgacgaggccaatggcttcagcctctcccagctctggatcctctccggctccttcaacggctccgacctcaacagcatcgaggccggatggcaggtcagccctgagctgtatggggacaacaggccgaggctcttcacctactggacaagcgacgcttacgaggcgacggggtgctacaacgctctgtgcccggggttcgtgcagacgagctcgcggatcgccatcggagcctccatctcgccggtgtcgtcggtgggagggccacagtacgacatgacgctcctggtgtggaaggaccccaagctcggcaactggtggctcagctacggcgacggcgccggcggcctcgtcggctactggcccgccgagctcttcacccacctctccgaccacgccaccatggtcgagtggggcggcgaggtcgtcaacacccacccgcccggctccgcccacaccgccacgcagatgggctccggccacttcgccgccgagggcttcggccgggccgcctacttccgcaacctcgagacggtggacgccgacaacagcctcgccgcggtacccctcgacgccatccagacaatggcggaggacgccggctgctacgacatccgcaaggcctacgacgacgacgacggccgaggcggatggggcgcacacttctactacggcggcccaggccacaatacggcctcttgcccctaagcgcttattaattaattacctcatccaatattcatcatcacgtctccatctgtaatgtcgtcatgcaattcgatccatatcctcctcggctcctcc

SEQ ID NO: 10118 - DNA, 1841 bp, Oryza sativa
  ref <308>: DATABASE ACCESSION NUMBER: AK107466
  ref <309>: DATABASE ENTRY DATE: 2002-08-28
ctagccaaatcctctccatcctctctgcggccgccaccatcccctcccgacctcctactccggcgcaggcgcacagcatcgcagcttcgggatgaccacgactcggctcgacgaagccacgattgccccccatctgtccatctcttcgatttgataattcctcatctgcttcgaagttgattcgagtgacgaccaacgacggtgcaggtgcgcggggcggtgagaggcggcagcaccaagcaggaaggcggaagggccgccagccaccggacgcagctggagggcggcgcatccgcgccagagcgaggggtgcgcggcgccggcgctgcaggcagtgggccagcaagcgaaagcggtcatgcagcgccggctctgcaggtggcggcggcggccagggaacgggaggccatcgaaggcgagaaggatcgcggtataaactgcagcgtctgctactgcagcagtcggcacacatatcattttttgggacagcggcactgctccatcttgcagagagcagtgatgctaatttacatatacccaagagaagcgacaaaactgctgttgttgcaacagttggattccttgaataaagaggtagatgaattgtaagcatcaagggagcagcagtcgaagaaaattgaaagtttgaagaactcatcagaagagaccaattcccttcttcgtcgtttgattggccatttggcctgaatactccatattttgctctgccttagtaaggtttgactatctcttcatgttgccttgcttattcatgatgtgatatatgaaattatgtctttctttatcctaacttacgaacgagtgtgacaatacttgttgttatgtaaattgtttcatctagacttttgggatgctagcaaaatattttatgtagtccaagccgtgttaccgtgtataagtgatgcattgcatctttttttttctcactgcataagattgtagtaccatgctatttatcaccaaataattgaagtattgtctatcaggcgatatttgtacagcatgttgttggctgaatgtttttggaaatcatggcacttatataaaatcttacatgctattggctactataataatcatgattagttagataaggtggatagctaagttacttgcttatgtatcatagctaagttgtttccagatattgcatctgccctaatatcatagggtaatttgttggtacaaaaactatgaccacctagttatcatagttgacttgaaaaatcaaaatctgaaaaatcataacttgataaaaatgtgccagttcctttttactgttatttgataaattagaatattgctcatgatctactttgtgcataagttcctttgatttgttttactagtgtgaggtgtacctaaattctgttctatgcataatagctattttttttagattgagtttggaagtctcatgtttgagccaccgaaagtagacatgcatttttcaggagttggtaatacgtatgtacctagctagactcactacattctatctagcctactgctttttaactatataaacccttgttgtggttctgagacatggtgggtatgcacctagcagtctagcacccatatttcattcacattggatggcattatgggcaggaaaactttacagcgatgtttcagaagcaaaactaagtatgaagatgtgctgcctgctgcaattgatcttttcaaggagcgccactgcagtagcaagactgatttttactgatgcatcaaagttgtttattttgctatggtccgtgtcatgtacatgagcttgttgtggtcacttagtagtcggtgaatctgattctatgtatgtt

SEQ ID NO: 10119 - DNA, 921 bp, Oryza sativa
  ref <308>: DATABASE ACCESSION NUMBER: AK107467
  ref <309>: DATABASE ENTRY DATE: 2002-08-28
atactggtagtgggagtagtgcaaatccacagctcagcattttgcctcccatggcgtcctccaccgccattgcccttgctctcctcggcattgtgcttcttcttcccggcaatgccttcgtcgtggtcgcctacccacgcggcggcggcggcggggactacaggatgcagttcttggggcagcagaacgcggcgagggcggcgatggggttgccggcgctggtgtgggacgagcgggtggccgggtacgcgcggtggtacgcggagtcgcggcgcggcgactgcgcgctggtgcactcgtcggggccgtacggggagaacctgttctgggggagcggcacgggttggtcgccggcgcaggccgtgggcgcgtggctcgccgagcagccgcggtacaactactggagcaacagctgctacggcggcatgtgcgggcactacacccagatcatgtggcgcgccacgcgccgcgtcggctgcgccatggtcgcctgctacaacggcaggggcaccttcatcacctgcaactacgacccgcccggcaactacgtcggcatgcgcccctactgactacccgcccacccaccctccgccgccgctgccgtcgccggtgatggtgacggtgaccgattctttccttggtccgctctgccggccggccgggagcaccgcggcacacggcagggcgacgcagcgcagcaaccaaccaatcttgctgtctcattcattgccatatgatgatgatgatgatgttacaagagtactacaactgtacaaaataattctttctttctactgcacgctgcaacatcttttttttttgcttttttaccttttttcctaccaaaatatatattatgatgttattggtaggatcggggaagctacaatgaaatatgatcagctaattgattggtctgtt

SEQ ID NO: 10120 - DNA, 1783 bp, Oryza sativa
  ref <308>: DATABASE ACCESSION NUMBER: AK107468
  ref <309>: DATABASE ENTRY DATE: 2002-08-28
actagctacactagctaacccttgctatgcttgcacaaacacctaaagacacacctttcaactttcacctttttaccacttcaaatattttattctcacacatacacacacaaacaatctctctccatcgatctcactctcactagcaaagctctatatttatcctgccttgatggttttgttgttgccactagctagcaaagcttatttatgcttgggggtaatgacccatacctaagaacaaaagttgcccttttgtctccaaagggaactagtcaagcagaagaggagatcgatcagcaactagcatagtttgatcccaagagagatcgatcgattaattagcaacaagccaacgacaagcttagcaatttgataacaatggcgactagtgaagccgcagccatctccaaccctttcgctcctctcaccaaccatcagcaagaacaccctcctcctcctcctcctcccgccaagaagaagcgcaatctccccggcacaccagatccggaggcggaggtgatcgcgctgtcgccgaggacgctgatggcgacgaacaggttcgtgtgcgagatatgcgggaaggggttccagcgagaccagaacctgcagctgcaccggcgagggcacaacctgccgtggaagctgcggcagcggagcgggaaggagccgaggaagcgggtgtacgtgtgcccggagaagagctgcgtccaccacaacccgtcgcgcgcgctcggcgacctcaccgggatcaagaagcacttctgccgcaagcacggcgagaagaagtggaagtgcgacaagtgctccaagcgctatgccgtccagtccgactggaaggcccactccaagacctgcggcacccgcgagtatcgctgcgactgcggcaccctcttctccaggagggacagcttcatcacgcaccgcgcgttctgcgacgcgctggcggaggagacggcgaggctgaacgcggcgtccggggccgccgcggcggcggcggcggccacggccacgtcgctgtgcgggcagagctacctgttcgccgggtcgggtgggccggggatggcgggcatgcggccaaacacgatgatgccgccgcagttcgacgcggcgcagctgagctggctgtacgggaacggcaagctctcgtcgtcgaatgccagcgagctgacgagcgccacggcggcggcgaaggaggcggagagcgtgccgtccgtgttcagcaaccagcagcacgcgaagcccgcggcgcccaccgacatgtccgcgacggctctgctgcagaaggccgcgcagatcggcgccgtgacatccaccgccgcgatgcccctagtgtccccgttcgagccgaccaagcccggcggcgccaccgcctcaccggccgacgagtgcggcaagttcgacggtgcagccctattcgccgccgcgagccatcacaatgccaacctcggcggcgcaatgagcgagctcacgggggccgccggcaacgtgccttacgacgtcttgtcggcggtgcgccaccatgccggcctgaaggacgccggcggcgtcgggagagaggaaactagggatttcttgggcgttggcgtgcaagcactgtgctcgtcgtcgatacatgggtggatttaaaccttaatttgcatgctaattctgtagccatgaagagattagttagtgctaattttgaagctatgtaagcaagtaagctacagtggagtgaagcatgcatgcaagctcacaaaagggctcaagaagagcacccaatttaatttactaaaatttc

SEQ ID NO: 10121 - DNA, 1507 bp, Oryza sativa
  ref <308>: DATABASE ACCESSION NUMBER: AK107469
  ref <309>: DATABASE ENTRY DATE: 2002-08-28
gagagaaaaccaccatggacgacggcgctgccgccgccgccgccgcagggagggagacgacgaagaacaagaagaagacggtgtgcgtcaccggcgccggcggcttcgtcgcctcgtggctcgtccatcgcctcctctcctccggcgactacgtcgtgcatggcaccgtccgtgacccaagtgatgccaagaacggtcacctgagggagatggactacggcgccggcgagcggcggctgcggctgttcaaggccgacgtgctggaccgcgccagcgtggccgccgccgtcgccggctgcgccggcgtcttccacgtcgccagccccgtccccgcctccaagccccacaaccccgaaatcacattagaaactaaacccggaagaaacgtcgtagaagatctaaacacgataataacaccgaggcacgatatttggtaacggagtccagcagccgagaccagacctgaccggcgacgtacggcgtcccgtcgccgtttgatttttaatttctccggcgctggcgctggcaggcggaggtgctggctccggcggtggcgggaacgcggaacgtggtcgaggcgagccacgaggcgggcgtccgccgcgtcgtggtggtgtcctccgccgccgccgtcatcctcaacccggccttcccccgcgacgccgtcctcgacgaggacgcgtggtcggacgagcactactgccgatccatagagaactggtactgcctctccaagacgctcgccgagcgcgaggcgtggcgtttcgcggctgacaacgccgccgccatggacgtcgtcaccgtctgtccgccattaattcttgggcctctgctccaatcgaccgtgaacaccagcagctccatcctcatcaacctgatcaaaggcggcggcggtgatgatgaggagaaggccgccaccacggacaagaggaggaacgtggttgacgtgcgtgatgtcgccgccgcactcatcctgacgtacgaaaatccggcggcttccggccgctacatctgcagcgcatacgacatcaaggtgtctgaaatggttgacatcgtcaggcgcttcttcccggatatcaactacccaaagtttgtgggaggggaggatgagaggattttgagctccaagaagctgcagaagctggggtggaagttcaggacggtggaggaatgcctgagggatagcgttcaatcctacaaggctgctgggatcctgaaatgagctagatattgggatttgaaagaaaaattttaaactagcgtagtgaattgttgaaggttggaataatttcatctgtgtgcaatgcaataaaacttgttaatttacgaattgcatcggtaggcagttaaatgtgtgtgcactcttttcttagaggaaagaaaaggagagattttaagactggagagtgcattgtatgttgattgtgaaaccaggttgcctgaggagtgagagtttggttccctacctcttggcagtaataagtaataacaacaatttgataggacc

SEQ ID NO: 10122 - DNA, 1176 bp, Oryza sativa
  ref <308>: DATABASE ACCESSION NUMBER: AK107470
  ref <309>: DATABASE ENTRY DATE: 2002-08-28
tctatccttcagatttcgccgcagatacacatactccccggagatcattgctcgatgcaaaatccggcaaggtctccaatggcggcgaacatgttcgtcggtttcttgtctccaggagccagagcttgagacaactcaaatggccaatggccgggaagcacctcatcggctgcatggtcagtgggagcaggtctccggacagcgagaggtggaagatccatggagatggtgatcttccactcagcttcagctactacgtgtcagccagcaacgacgattattccagcatcaattccccgttccaaggcgaccacacaaattcgaatctctcaatagtgttcgagtcgtcatcgcacaactgggtgatgaacgcgcccgcggtgacgacactcggcgccgcggcgctggccctgcattacgcgaatctcatcatcttcatcgagaagctcgccgtcgcgcctcgccatatctgcccagacgagagagatgccctgtacaacatgctcaccgatcggattcgggcatctctcagagctcgcctcaggccgatcgccaagaacatggcagcctcttcatcatcttcttcttcagcttgtgatcctgccatggctgcagagtggtctggcacggtgcagcgcatcctcggatggttagctccgctggctcacaacatgctgcgatggcaatcggagaggaatttcgagcagagaaatgttgcgtcgagcggtacaggtgtgctgctcctgcagacgctgcattttgctgaccagaagaagagcgaggctgccatagttgagctgcttgttgggttgaactacctgtggaaagctggaagagagcttgatgcaaaagctaaaaaattggtgtcaggtggtggaaaacgcgatgaattcacagattattatagtagtaataggatggaatgtcgataagatgcaactgaattggatgagcctgggatatgtaagcagaggtagcatcagattccctttgctgatttgctccttcaatccctacaattggcattatgacacgcatctattctgtaattgatgctcctgcattttagtgtataagtgtagggcagctgatcattttaatgtaaatttaccatgtaattcattagtgaagacgtatcaggtttaataaggtcaccggaacagaactgaaacagtg

SEQ ID NO: 10123 - DNA, 1785 bp, Oryza sativa
  ref <308>: DATABASE ACCESSION NUMBER: AK107471
  ref <309>: DATABASE ENTRY DATE: 2002-08-28
tttgccgtggatcaccccctaacgatatgcacacatattggcttgtgcccaagcaaatcacgcatttcccaaaccaaaccacctccacaacccaaatcccccatgacatcaacctattgatcctaccattcaatgtgatcgatctacacactcttgctaatataactccaatattcccccttaattccgtcctcatccatcctaaccaccaccttcttataaattaattaacacaaatcatactgatcgttccgcacaggaagataatcatcaagattgatccaagaaggagcgagagcttagcttatctgatcagatcaaagatggcggcgatctctccggcgagcgatggcgtggggcggcggcggaggagggtgttgatgttcccgattccgtttcaggggcatgtcacgccgatgctgcagctggccgacgtgctccgctcccgcgccggcctcgccgtcaccgtcttccacgcccccgtcaacgcgcccgccgccgccgagcagtcggcggcggaggaggactaccgcttcgtgaccgtgggggccggagtggcgggggaggcggcggcgctgatgcccacgggcggcagcggcagcgacttcgccggcgcgctgatgcgcctcgacgcgctcctccgggcgccgttcgacgacgccctccgccaggcgctcctcgccgacgacgaggaggaggcggcggcgacgtgcctagtggtggactcgaacctgcgcggggtgcaggaggtggcggagcggcgcggcgtgcggacgctggcgctgcgcaccggcggcgcgtgctgcctcgtggcgtacatggccttcccggagctctgcggcaagggcgtcctcccgccgctgtcgcgagatcagctgcaactggacatgccattggatgagcttccaccacttcgtctgcgagatatgatgttctcagcaaccaccacatatggtacaatggctacctgcttagaacgtctattggactcggcacggtgttcttcaggtgtcattctcaataccttcgatgaccttgagaattctgacctccgaaagatcgccaatggcctaagtgttccggtttacgcgatcggtccacttcacaagatctccataggccaagagagcagcttgctaactcaagatcaaagctgtttggaatggttagacaagcaggaggcagagtctgttctttatgtgagctttgggagcttggcatctatggactctcaagagcttttggagacagcgtggggattggtcgatagcgaaattccgtttctttgggtgatcaggcctaactcggtccagggatcagagcaaacatgccttccagatggctttgaggaggcgacacgtggcaggggtatggtggtttcctgggccccacaacaagatgtgctgaagcaccgagcggttggtggtttttggacgcacaatgggtggaactcaaccctagaaagtatatgtgatggtgttccgatgatctgtaggcctcagtttgcggaccaaatgattaatgctaggtatgtccaagaggtatggaagatagggttcgagctagagggaaaactggagaggagaatgattgagagggctgtaagaaggttactgcgcagtgaagaaggcaaggagatgaggcacagggcaaaggatctgaagaacaaagcgacgacctgtattgagaaaggaggctcttcaaatactgcaattgatatgttggtgaatctcataatgtcattttgaacattatcttatatcaataaactgtttcataaaatcc

SEQ ID NO: 10124 - DNA, 1433 bp, Oryza sativa
  ref <308>: DATABASE ACCESSION NUMBER: AK107472
  ref <309>: DATABASE ENTRY DATE: 2002-08-28
aagagcactcaggagttctctgaattctgatggaaaccaacactcctccaaagtctgggacaagctttctcaagacttgcttcaatggtgtcaatgccctctcaggtgttgggatactatccatgccttacgcattgtcccagggaggatggctgagcctagcaatcttcataaccatagcagcgatctgcttctacacggggatcctcctgcagcgatgcatcgactccagctccctcgtcaagacctacccggacatcggcgagctggcgttcggccggaagggcaggatcgccgtcgccgccttcatgtatctcgagctctacctcgtcgccatcgacttcctcatcctggagggggacaacctggagaagctgttcccgaacgcgagcttcttctcctccttccacaggatcgccggcgggacgaggcaagggttcgtgctgctgttcgcgctgctcgtgctgcccacgacgtggttccggagcctcgacctcctggcgtacgtctccctgggcggcgtcctggcgtccgccatcctcgtcgcgtccgtgctctgggtcggcgccgccgacggcgtcgggttccgcgagggcggcgtggcggtgaggtggggtggcgtcccgaccgccatgagcctgtacgcgttctgcttcagtggccatgcggttttccccatgatttataccggcatgaggaacaggagaatgtttccacatgtgctgctcatctgcttcatcatctgcaccctcgcctacggcgtgatgggcgtcatcggctacctcatgtacggcggctcgctccggtcgcaggtgacgctcaacctgccggcgaggaagctgagctccagcatcgccatctacacgacgctcatcaaccccttcaccaagttcgccctcctcatcaccccgatcgccgaggccatcgagggcgtcctcggcctcggcaccgccaccaccggcggcaagccggcgcagtacagggccgcggccgtgagcgtgtcggtgaggacggcgctggtggtgagcaccacggcggtggcgctcgccgtgcccttcttcgcctacgtggtggcgctcaccggctcgttcctcagcgccaccgcgacgatgctgctgccgtgcgcgtgctacctccggatcagctccagggcctccgggaagctgggggtgctcgagatcgtggcttgcgtggggatcatcgtgcttgggttaggagtgatcgtgataggcacttacagctcgctgaaacagattgtgcagagcttctgatcatttatgggcaaaggtagtaggagatgagcaattgggatcagctactgaaaattgacatatactagtcaattcgataccactgattaggacaggtggtgtcaaccatgatgttatgcataaatcacttgagaaagaaatccatatgccgtgtattcaggt

SEQ ID NO: 10125 - DNA, 2766 bp, Oryza sativa
  ref <308>: DATABASE ACCESSION NUMBER: AK107473
  ref <309>: DATABASE ENTRY DATE: 2002-08-28
atccttgctccacgtcccaatctcctcctcctcctcctccccacttcttcttctttgttttttctcttttttttcccgaattcccagaccaaatctcctcgctttttgcttcgttctccgctccggtgacccggaggaggcggaggttggagaaagtttgcgcctttgcggtgagtggtggtgtcggtgatgggatcaagaacggtggggtggtggctactggcggcggccgtcgtgctcgccgcggcggcggcggattccggggaggcggagcgcgcggcagagcagcacagcgagcgcatctcagggagtgccggcgatgtgctcgaagacaatcctgtggggaggttgaaggtcttcatctatgacctcccaagaaagtacaacaagaagatggtcaacaaggatccccggtgcctcaatcacatgtttgctgcagaaatattcatgcatcgcttcttgctctcgagtgctgttcggacactcaaccccaaggaggctgattggttttacacgccagtttatactacttgtgacctaactccggctggactgcccttgccatttaagtcgccgagggtgatgaggagtgcgatccagtacatttcgcacaagtggcccttctggaatagaacagatggagcagaccacttctttgttgtcccgcatgattttggtgcatgttttcactatcaggaagaaaaagctattgagcgtggaattctaccgttgctgcaacgtgctacgttggtccaaacatttggacaggagaaccatgtttgcttaaaagagggttctatcactataccaccctacgctcctccacagaaaatgcaggctcacttgatcccccctgacactccacgttcaatcttcgtctacttccggggactattctatgacactggaaatgaccccgagggtggttactatgcaagaggggcgcgagcttccctatgggaaaacttcaagaacaatccattattcgacatttccacggatcaccctcccacctactatgaagacatgcagcgtgctgtcttctgtctgtgcccattgggctgggcaccatggagccctaggttggttgaggctgtggtctttggctgcattccagtcatcattgctgacgacattgtgctaccatttgccgatgcaatcccttgggaggaaattggcgtgtttgttgaggagaaggatgttccaaagttagacaccatcctcacatcgatgccaatcgacgatattttaagaaagcaaagattgcttgcaaatccatcaatgaagcaggccatgttgtttccacagccagcccaaccaagagatgcgttccaccagatcttgaatggccttgctcgcaagcttccacacccagagggagtatacttgcaacccagtgacaagcgcctcaactggactgctggacctgttggagatctgaaagcttggtagtgagcagcttccctctccttggacgatccttgtatgaaaacctcgtagggtcagtcatcagttcatacttcctgaaatgtgatgtaatcaacgtgcagtgccgggtgtaatgtacaccttggccttatctaacttaatgaatctttgtaagttagtaaattttgaaagaaatgaaaattgtatcgttggaatcagaatggcaagttagatcagtggttattttggttgccaagtttttgcagcataccctcatacatatattggcgaagaactggtggcaagaatgctgaactgcacatcagcctctccggtggttccatgacgatcatcgcattactcgttatcatcatcagccaggtcgaactgcttgagcagcgcgccgcagatgggcagtgggatgtccttgaggtagccgagtgggttggctaagcgcaggttgtcacagatgccgacattcctggtgagcaaaacacgggcacgatccctttcggcctcgatttcagagcagtttgcaagggggctgtggacgaggacaacctcgcagatgtcctcctcatggctgtccttgagctcaatcttgtatgtcccggtctcatcagtcacaccgtcaatcgcacgctcgaccttgtcggtgccaaagtgcttgcactccagcctgaccttggcacctgcaatcaagagatcaggtgagccaatgctggacttctaaccagactcctgacccaaaaaagaatttccttacccttgatatactcggtgacattggtctcgaacccggcgcggcacgtgtcacagtagacacggccttggacgacgtagtccggtgcgtcggtggcagtggcagtgctggcaaggacatagaagaggatgccgaagatcaccggaatggtgcggagagaggccatggatgatgtggctgcaaatgtgtttttccccttcctctattattatttggggaaaatgtgagaggagggtactgaaatggcctggtttggaacggattcgagctgtggtataagtaacctggggaacctggaggatttccatggctgtccttgcaagtaggaatcgttggagatgccgttgggatcgagtggctgaagagaaggcagattgttgatttgatcctacttttgatgatgaccaagctaaaaatgggtgaatgttttgacgagcgaggctattatgccgttgtgggtgttttagccagccagaaatctgtcgaattttgacgttacggaagcagcagacaacttgggaacctgaatagatttcatgttgggcgccttgaatgcagtaacttcataggatgtt

SEQ ID NO: 10126 - DNA, 1676 bp, Oryza sativa
  ref <308>: DATABASE ACCESSION NUMBER: AK107474
  ref <309>: DATABASE ENTRY DATE: 2002-08-28
aattaaacaaacaaaacaaacaaaaccaaaccaaaaaaaattcagctccggaaatagagcaggtcacccgttgcactgcaacaaacactgatgaaaaatcatatactagactgtactcattatctgtctcaaaattctgaacacggtggataattagatgattagtactactcactacatacatacagtgccgcggttaggaggagagcgatgtgatgaatcaccacctctccaagaaagagtacacaaattctgctgcaatgaagaagaacacttctcatcagttgcatagcttagcttctctctctctacgttaattacctttgtctcttctttctatgtcactggctactttttctgggcccaccgagcagtgtcagagaagggcgccgccgggacactggaaaattggcggcctaaaccctcgaacccccaaaagccttcaatgaagtgactgcggcgccgtgcggcggcggcggcggcggcgagctcaccccaccatgtcgcagtactgcatccgcggcaaccggagcagccgcggcggcaacgtcggcggcggcggcggctctggttccgtctccatggcgtacaggtagtcgttggtgccctcgctgcgcggtggcggtgactgatcggcgaggaagctgcggatggtggcgaggcctgggccgcgcacgtcccgctcccaggaggcggactcggcggcggagcccgcccgcgtgagcctggcgcggactgtgtcggaggcgtcgaggcggtggatgggccagccccaggcgtcggacatgcggcggatcttggacacctgcgcggcggcgaggacgcgggtgttggctttgatgtcgtcgatcgcctcggagaaggtcttgcgcccggcgaagtagtcgccgagctcggggacgccgatggccttgcccagcccggagtgcgcggcgcgctccgcggcggttgtcgtggcgaagtactcccggagctcctcgaccatgccagcgtccaccatgtcgtccacgcggcggtcgaggtactcgtcgaggagcgcctcatcgacgtggacccagagcaggcagcacgggaaccggagcgccgggcggtagtggcggaaggcggcggcgggggagaagggatcgccagcggaggcgtcgaagtggtcggcgaggagggcgtggatgagggagttcgacccaccggcgatgaccggcacgagccgcctcgccgcgatcgacgcggccgtggcggcggcgagggaccggaaggacgacggcgggagctcgccggcctcggggcggatggctccgaggaggtggtgcggcacgccacggcggtcggcgaggctcaccttgttggtggtcacgtcgaggccgtcatagagctgaatcttgtcggcgttgacaacctcgccgccgatcaccttggcggcgtcgatggacagcttggtcttcccggtgcccgtggcgccgacgatcaccaccatcctcgtatcctcgccgccgggccggcggtggagccgcaatggccggctcgccgccgccgcggcccgcacgagcgtggcaatcctggtggcaacgctggtcatgtaggggaaactagaaagggagactagacctctcctccaatcctgattaggccgccttatgaccttgttttgtccgttcctaatcacaaaacgctcatgtgct

SEQ ID NO: 10127 - DNA, 1163 bp, Oryza sativa
  ref <308>: DATABASE ACCESSION NUMBER: AK107475
  ref <309>: DATABASE ENTRY DATE: 2002-08-28
atcttgtcaaccatgcataaccccacaaatctcaacacggctagtagaagagaaggatagggaataatattacttatgcgaagccattggggaagtacatggcgggcggcgggctccctcggccgttgttgcttttcctcccctcgccggcggccacggccgccgccatttcctggccctggtacattagcgtcgagttcatcgtcaggctcaccaagctgtcgtcggcgtcgctccgcgggaagttgccgccgtcgctcccgccggcctcgcctccggtgacaggcgcaccgtcgtcgcgcgtggtcaccatcaccgccgactgcacgagctcgaggcagagcctgagcttgttgggctcgatgtgcgtcagccccggcacggcgcccttgaagaggaactcggaggtgaggctgcggagcacgtcgagcggcgtgacgccgtcgagcgtcctggagttcgggtcggcgtggtggtcgaggagcacggacaccatgtccggggagaccatctccgccgcaaggtgcagggcggttttgcctgtcgggccggcgcgggagttgacgtcggcggcgccgagctcgagcagcgccttgacgacgtcgcggttgcagtgctgcacggcgtagtgcacggcgagcgcgtcgtcgaggtccaggccctcgcccatgaccatcagcttgacgagctcgatgtcggcggcgtcgagggcgcgccgcatgcgccggatcttgttgtcgcggtccgccgcggaggacgccgggttcatggggaggtagtggtgcgtcaggaacggcgagcgcggcgcggccgccgcggcgagcggcgacttggcgcggatctcctcgatcttggccaccacatcgatggggaggtgcttggcgaggagatcggcggagaggccggagcgcgcgacgaggtgggagcaagtcgcccacagctcctgcatctcgaacttgcgcgacgccatcagcaccttcatcacgtcgtccaccgacgcctccttcaccatgctctccagttgcttctgcatcaacacattgcattgtgcaactcgccgttagttcaattaagatgcttaattaatcaccccaaatgcacggcagctaattagcagcatgaaatgttgttcttagcatgtagtactttcttcagttctgttc

SEQ ID NO: 10128 - DNA, 696 bp, Oryza sativa
  ref <308>: DATABASE ACCESSION NUMBER: AK107476
  ref <309>: DATABASE ENTRY DATE: 2002-08-28
aagaaattccagtccaacgcggcttcgcttccggtgccgtgtcctccctagaaatcatcgtccctaaattggacaaaattacactgaactacgcagatccatcgttgcgaccacgcagaagatctccgtgctcgggtggcgcggcgggatggcgtcctcatcggcggcggcggcgacgtaccggtgcgcggagtggggggcggacctgaacctgacggcggcgcagctatacccggagggggtctacttcgaggccggcaacaaggggacgctctccttctcgtgggtggacgagtcgcggctgcggttcgcgccggaggacaagatccgccccttcttcgagacgctcaactactgggggatccagcggaagcgcacccgcatcagctgcgacgcctgcggccgcctcctcggctacgtctacgacgacgggccgccggccatggacggcaccggccagttcgggatgggccccagccaggtcatccctcgccggccgaggtaccgggtcaagaccaaggccgtcaccgtggtcaatcctccggctaccgcaccgtacagatgagatgaaaccttgtacatcaacatcgtagtagcgttcggtgttacaagtaggacatgtaaaacgtattccattgtgatcttggttcgccgttgttgcaaataaataaattgtagtagtactatgggatgatg

SEQ ID NO: 10129 - DNA, 2410 bp, Oryza sativa
  ref <308>: DATABASE ACCESSION NUMBER: AK107477
  ref <309>: DATABASE ENTRY DATE: 2002-08-28
cttctcctcctcctcctcctccgcctctcgccggagcgcgccgccgccgcgtcgcgttctcgaaatcttcgagagcttgtacggtagcatcgattccatcatggtgccaccaggcaatggcaacggcgccgccgccgccgccggcaacgacgtcatcctcgagctcagcactcccggcgacgactggagccacgagctgcagggcgacgacgtcgaagcgaacggcggcggcaacggcgacgcgcctccgcgccggacgttcagcttcggccaggcctacaagacgcggcaccgtcagcctcaggtgttcacggtgtggcagacgctgatgctggggtaccagtcgctgggcatcgtgtacggcgacctcgggacgtcgccgctgtacgtgttcccgtccgtcgtcctacccgacgccgacgccaccgacttcctcggcatcctcagcctcatcatctggaccctcacccccatgagcctcgtcaagtacgccctcatcgtcctcaaagccgacgaccatggcgaaggtggtacatttgcactgtattcgctgctgcgtcagcacgtgaatttcaaggggaacataccggtgccgctcacacggttggagtccgatgtccatctcaagttccacagcaagaggagaagccggccgtcacggctgcagctgttcttggagaacagcccaaaggcgcaactggcgatcaccatcatcgtgctgatcggaacctgcatgctcatcggcgatggtgccctcactccagccatcccagttctttcggcggtccagggaatccagtcaagatcgtcgcatatcaagcagaagcacgtcgtggtgctgagcgcggtgatcctggtgctccttttcctcgtccagcgattcggcaccagcagggtcagcttcaccttctccccaatcatgctgctgtggtttgcttcgattgcagggatcggtgtttacaacattgtgatgcactacccacctgttctgaaagccgtctcgcctcactacatatattactacttcgcgaagaacaaacgggttgggtgggagcaactcggcgcggttattctctgcataacaggtgctgaagctatgtttgctgatatgggacacttcaacaagtcatcaattcaggtggcattctcaacggcggtgttcccatccctgatcctggcgtactcaggccaggcggcatacctgatcaagaacccgggtgacctgagcacggcgttctacagcagcgtcccggcgccgctgttctggccgatgttcgtcgtctccaccttggccgccattgttgccagccagtcgctcatctctgcaagctactccatcatcaggcagtccatcgccctgggctgcttcccaagaaccacggtgaagcacacctccgacaagtacgagggacaggtttactgcccggagatcaactacgttttgatggtcgtgtgtgttctcatcaccgttggattccagggtgggcccgagatcggccgcgctttcggtgttgcagtgatctgggtgatgctgctgacgacgacgctgatgacggtggtgatggtggtgatctgggaggtgaacggcgcgctcgccggcggcttcttcgtcttctacctcgcgatcgagggcacgtacatgacgtcgctgatgaccaaggtgccgcagggcgggtgggtgccgttcgccatcaccgtcgccttcctctccgtcacgctctcctggacgtacggccgcaagaagaagcgcgagtacgaggcgcgccacgccgtcggcgacggcgagttcgccggcatcgtgtcccggagcgcccgcgtccccgggatgtgcctcttctgcaccgacctcatggacggcgtcccgcccatcgtccgccactacgccgccaacacgggctccctccgcgagctcctcctgttcgtcacgttccggacgctgccggtgaggacggtgctcgccggcgagcggttcctcgtggcgagggagggggcgcgcgccggcgtgtaccggtgcatcgcccagtacgggtacatggacgagcagggcatggttggggacgacttcgtccgcgctgccgacgccgcgctggtcgaggtggcggcggcggcggcggaggccgactccggcgaggaggaggcggagatgatcgggcgggctccggcgagcggcgtcagctacgtgatcgggaggacggtgctgaggatgcggagggcgcgcaactggccgaagcgattcgtcatcaacgagctctacaggttcttgcagaagaactttaggtccaacgtctccacgctcaagctcgaccatgccaagaccttgcaggtcgggatgatttatgagatctgagacaaataaataaataatgcagctgatgatggatattaatccaactagctattctagtgtttt

SEQ ID NO: 10130 - DNA, 1523 bp, Oryza sativa
  ref <308>: DATABASE ACCESSION NUMBER: AK107478
  ref <309>: DATABASE ENTRY DATE: 2002-08-28
aagcccagcccacatttctttcctggtttctccccatccgcatcgctcacagccgctgccgccgccggacgcggtcgcttcccctcccccgcccgcatgcgtgcgtgccagctgcgcagcgggcccgctagccggcgcactcgcttctccttctcccctgcgcatgtgctcgcttctcctccccgcgtcgcactgccttcctcatcccgcacgcaccagccacgccgcggagccgcgcgtctgtagcgtcggctgcaggtatcgcgagatggagatatgcgccgggagccctagcgccatgctggcctcaaccgcccctacaatggccttcgctgcctcccctcccctctcctccctcgccgctgccgccgccgtgatctcctcctcctccccatcaaaacccctctcacgagcaaagacccctccaccagctctcctccaggctattctccccactgccccccccaaacaccattccctctcctgctctgggtcacaagccccacgtgccaccacaggcgaaggatcggccgtgggggaccgcgggagcggctccggaggaaacaacggcaagggtggcggcggcgacggcgatggcggcgacaacgactatgaggaggccgagttcgggcccctgctcgggttcgatgaggtgctgcgcctcaccgcggcatgcggtgtctcgctcccggccgacatgatgggggcggccaaggatgctagcatccgggaagtcatgttgctccaccacttcgatctgcaggcagcaccatggcctctagccgcgatgatccgggcattcttgatgctccgcaactgaatgttagcggacccatcattcctcttcaaatttggaaccaaggttgtgattgactcgtgctgcgctacgtttgcggaggtgtttgagctgtacgatccatggacagatatgcacgctacgggattcatggatacagccatcacccccagtttccattctcttatcctgcacagttcattggatgacatatttgtgattccaaaagagtaatagagggtttgtgtttaggtgttccagcaattgatgcgaatgtcaaaatttatctgctttgcgtccacttaactcttacttcagttctttcttttacatgtaaatattggttgcataaaatctatttttggttgtttacgagtttaccgacattctgaaatcgtaaactgtagggatttttcattttgttcttaccattgtgacttatcttatcaatcttttgtctcagccttttaggtctgaattaaacgcagagagttggaacagtcaagacatcaagtagtagcagattatcactacgtttcaaggtgttccagaaatcctgacacaagatcaaatttataattctgattaagcactgtagcacatcatcaccattagttgtttggcacatcgtcttatctattactgaaggttgcatatattctgatcctgtattacctgattattcttttctgcgaatttctaaataatatttattgtgttcgtggtt

SEQ ID NO: 10131 - DNA, 1189 bp, Oryza sativa
  ref <308>: DATABASE ACCESSION NUMBER: AK107479
  ref <309>: DATABASE ENTRY DATE: 2002-08-28
cttccttccttcctccctcccctctgctgctgtgcttgataatggagaaggcaaagagaagagggcaatgaagtgcagcaggcacccgtacgagggcggggttggcgtgtgcgcgccgtgcctccgcgaccgcctgctcgcgctcgccgccgcgcagaacgaggcctcctcattgccgccgccgccggagccggtgccggttttcccgaggtcggtgtcgccgtacgtgtgccgccggaagtccgacgcctccggggcgaggaggcgcacgccgagcctcctctttttccggacgccgcaggtggggccggcctacggcggcggcggcggcggcggaggcggcgcaggtggattcgaggaaggggacatagaattcgagatccggcgccgcagcagcaagttctccgtgctcgccgcgctcttcggagcccatcggcaacacgggtcggaggaaaagcgcagtagcaaggagcggaagcaccgttcttggctcgcggcgatcatggcaccctggggcccccggaagaaggatccggccgtcgcgtcgccgccgcggcactcttgccacgtgatcagcaaccgcgggctctcgccggcgatgaggtacgccgacgaaggcggcgaggaggggagctcgccggcggagtcgccatggcgaccttcgccgatgcggaaaaccccctgccggcgcagaccgggaggcgcgactggggccggcggcgtctcgggcttcgccgtctgcatcagcccgctcgttcgtcccagcccggcgcggcaccaccgcgggggaggccacccgccggacgccgccgccttctccggcgagctggggccgtcaccgctccaccgcctctcctccggctcctcgctcccccactgccggtcatggaagctcgccgacggcggccgcttccggtgatcctatcctttattaatttttttcccgcgctccgacattatttatcccttttgggaggcttttcttttttcctttttacctttacgtgtaaactggaaaagaagaattcatcctggccaaccacgagctggcaagctgtcccactgacatgtaggcaccgacgtttgtcaaaggttactgtttgtcagttgaacatgttgcaagccactgtaaaaaaaaaagcttcttgcattatctatgtacaggattactcctagcttttaaattaac

SEQ ID NO: 10132 - DNA, 3451 bp, Oryza sativa
  ref <308>: DATABASE ACCESSION NUMBER: AK107480
  ref <309>: DATABASE ENTRY DATE: 2002-08-28
ccttgttaactcctccgctgctgcctcccactctccccctcacctcgccgcctcctccccttctccccgccgccgacgaggtccagaccgtggagcctgccgcggcggcggcggcggcggcggcggcggtcgccatggatgcgccgcggagggagcggaggcaccaacaccaccaccggaaggcggcggctcaggttcaggctgcacctgctattgccgctgtgggggtgggagcgggagggaatggggcggcggcgcgggcggcgtacggggacgtgttcgggggcccgccgaggttcgccgcgccgttcgggggcgcgccggcggactacgccgaggtgttcgggggcgtggcggccacctgctccatcccgttcctcgacctgccccccgtgcccgccgtgggcgccgactacggcttcttcggccgcgccggggccggggactacggggagatcttcggccgcttcgacttcggggacttcgcgctgccgtacgaggagctgttcgccgaggcggaggcggaggcggtgggggagattggggcggaggagatcgcctcgtcgactgggagctcctccaggtcatcgatgataaaagagtctagccaaccagatgcgcagtcatttatgcttcctcaacatttcaaggagcatgagtcttctgtaatttccttccctccagacaatcagcagtttgtcatgtcatataacaagactacccagagatctgacgatctagttgagatgactactgatccttcaatggattatgtggttgattcttgcgaatttcctcacgtgccaacaactaatcatgttgcaacaatggatagtggtatagaagctaatggagaaaaaaggaagaagtccaccacaacctctgcaagtgtcagtctaaggagctctgagagtgatttcacagttgatcagaagcagcacattccagcatatccacctatttctgaaaaagtttctgcaaatgagaatcacaagaactccaatagtatttcaacatccagtaatggaacaccttctcctgattatgcctttctaagggtttctgatgtcaacgtgcaaacacaaacagtaaaaccaccacctcctctgaagcagacatctaaattgcttaagaggagagagattttagcaaaaggagatgtccatcttgaaaatcacagctgccctccagcctcttctgctcatgccccttcaaacaccagcacatctcaggctgaaagaagagacgatactgctttgtttaataatgaggccaatcccagttctgctgcagctgctatgaaggaagcaatggaatatgcagaagctaggttaagagctgcgaaagaactgatggagagaaaaggggacagttttaaacttcgtaagaaaccaagccatcatagaagcacaagatctacagaaataaaggttcctacagagtcagacacattcgatgagaacctctccgtgaagaagtcaacaaaggaggaaatgaactctgaggattcgttgctggacaagcaccagaaggctagtgcagttagaacagatcattgtgatgacagtggaaaaagggcattgtcgctggagaaacctcagcatatgcaaagctgcactgcacccaatcaaacttccagtaaactaggtaagttaggcaactggacatcaggtgatgaattttatgagctgactggagaagatcagaaacagaaaacagatgcagctgtaggggaggaagataagtgtgaggtaacaaatcctgtcaccaagctcagcaaggaacaaaaatgcgaagttactgcagcggactctgatttggaaaggtatgaaaagctgtgggaggttaatgatggcagggatgcaggagtgaaacatgtcaatccgagagaagataatacatctccaatggggaaagatagggtgtctatgattctggaagcttctacagaaaatatagaccatgaaaaaatttataactctcattttgagggtcctaaagttgtggaaacttctaatgaaagccatgatggtgaggatggggctgttgagattccttgtaagagtggaatcactatttcagaaccaaacttgatgaaggacatgcacggttcattcatggaggcttcttcacctggagagtatgtggccgattttggtaaaggcactacagaggaaagtccagtagcaggaatatcgctggagcctaaaaccactaaagaggaacttgaggcagcatgtgatgctgagatgcaatgcaccacaggggatagtgaaaaattacaagaatcttcagaagtcaccagcattgataactcactggcaagacaaattaaatcattgattctagaagatctcgagggatcttctgaaactcaagctttcccaggggaccccggtactgctgggtcagaagctgaaacttatgggaggaaccttggtacaactgggttggaaactgaaagttatgggagggaaaagttcagttttgttgaagaatcattcatgcataatgcaaacaggaatgtaactgaatcacccgtagaaactccaatccctgaacaagtagagaatgttgagattgaagatagagttggttcatgtgcacattctgaagaatcaaccgtggataaagattccgagtgtcctgaagagggaagtgatattacttcacaaaacaacaatctgccagatcatgaagattcaactatgctaaatgtatttgaggtggccagcaaattgattaaaagagacctagatcaagaaaagcaagatacactacagcctggtgaagtagaaactagaactgtcttggatagtaatgacaaagatacaaaagaaaacccttcagaaaatagtaacacgataggtagtgaagaagtcttgagtcacggtaaccaggaggaccagaaggtgcctgaaatggataaaaccaaaggacgaagtgatgcaaatgcacaagttaaattaagtggtgtaaacttttatgaagatggagatgttacaagtgctgctaataatgttacaactagattgactacaaattcaaaaggccaggcgtcttcctcttcagaaatgctaactggcagacagcacttgcctcaagatgctggacctgctatttctcagacatctaacggaactttccctagtcttgaaaagaccgaagaagtttgcaaagaagctgggagagaattaccaacagataaatctgctgcatttgaagatgagaatagcagggcatgcaaatcaaaggcagagctaaagcagcaacaatttcattctgagaagagtagcagtttacctaaatctgcagaaggtcatatcccatcttctgctgatatatcaagaaaagaaacacctggggttcagagactcaaagagcagggaagtctaagaacagaaagggaaagagagaaggacaaagaggcttctcggagactggaagaaac

SEQ ID NO: 10133 - DNA, 1716 bp, Oryza sativa
  ref <308>: DATABASE ACCESSION NUMBER: AK107481
  ref <309>: DATABASE ENTRY DATE: 2002-08-28
agctcactggctggggatagacgagacggcgaccacgacgatgacgatgacgacgacgacggcgacggcagcaacggcatccccaccaccacccccatctccggttcctcccctccccgcgtctcaacccaccggaaatccattcaaaagcacccgcgctctcgcaccaatccaccgcacgccatggcgtcgcgagcggcggccgcgatggtgctcgccggtgcccttcctgtgtttcccggccgtcccctggtcgcagccggcgccaggtgctgcgacggcggcattcgcgggagggtctcctgctcctcccaccgtcgctcggaccatccctcctgcgcggctgaggtgagcacgcgctggttgctggtctctcctcatccaaatggcttccaaagctgtagcgttcgcttcagtttaatcgtgtggttgtctggtttggtgcaggagggaggagtggtggagctgctcaagggcgcggtcgcggcgctcgccgtcatcgcccagatttccgtgtcgctcccggcggacgcgatcctctactcgccggacacgaacgtgccgaggacgggggagctggcgctgaggagggccatccccgcgaacccaaacatgaagaccatacaggaatcgctggaggacatttcgtatttgctgaggataccgcagaggaagccgtatggctccatggaaggagacgtaaaaaaggccatgaagatagcaatggacaacaaggatgcgatcttggcaagtatacctgtagaactcaaggaaaagggctcgaagttatatacctccttgcttgaagagaagggtggtttgcaaactctcttgaaatatataaaggaaaatgatcctgacagactttcggttgcacttgcttcttctcttgatactgttgctgaattggagctgttacaggctccaggtttatccttcctcttaccacaacaatatttggaatatccaaggctagcaggaagaggagttgttgaattctcagtggagaaaggtgatggttcaacattctttccaactgctggtggtgaaccaaaaagtgttgctacaattcaggtagtgattgatggatattctgccccactgactgctggaaactttgcgaaattggtgttggatggggcatatgatgggataaaactgaaatgtgcaagtcaggcaattattgcagacaacgagaatggaaagaaaggttacactgttccattagaggtcatgcctgctgggcagtttgaaccgttatacagaactccgctaagtattcaggatggagaattgccagtccttccgatgtctgtatatggtgccgttgctatggcccatagtgtggattctgatgaatactcgtcaccaagccaattcttcttctatctgtatgacaagagaaattctggtttaggaggaatatcttttgatgaagggcgattctcagtattcgggtataccacagatggaagagaagttctgtcgcagattaaaactggagatataattcgttctgccaagcttgtacaaggtagagagcgccttgtactgcctccagaagcgccggcagagagctgatacaacggcaagcttcgcaaactggaaacattctttcattggtcaggagacttagcatattttataccataaatcatgtaaacctgactgagcagttcatcaaatttatatatagaatcactgcaaatgttcatc

SEQ ID NO: 10134 - DNA, 1101 bp, Oryza sativa
  ref <308>: DATABASE ACCESSION NUMBER: AK107482
  ref <309>: DATABASE ENTRY DATE: 2002-08-28
catgttctaattataatcacataattaaactggtcgccgagatagaacagcaaagacgatctgccagtctgccaccatgggttcaagaagctgcgtcgccgaagctaatggctcgacgtcgaccatcgtcgcggcggcgaagcccaccggccatcacatcctcaagatcgacggctactcccggactaaggccatggtcgccgccggcgacagcatcgactcctgccgcttccacgtcggcgaccacgcgtggcgcatcaggtactaccccaatggcaccgaccgcagcaaccagaatcccgacgccatatccgtcatgctcgagctgcaggacgccaccgccgccgccggccgcaacggcgccgccgtcaaggcgcagttcgtgttcagcctgctcgacgaggaggcgcacctaccgcagcagcgtgcacagcttcccttcctccgacggattcaagaattggggattcctccgattcatcacccacggcgacctcgacaagtcggagcacctcgtcgacgacggcttcgccgtccggtgcgacgtcaccgtcatgggcggcatcgagctccgcgtcgagccggcgtccctcctcgccgtgccggagccggacttgcaccgccacctgggccgcctcctctccaccggggacggcgcggacgtcacgttcagggtggccggtggcgaggcgttcgccgcgcacaggtgcgtgctcgccgcccggtcgccggtgttcagggccgagctatatagccgtggcggattcctaagaccggccgccgccggaaggcccgaaacacgcgtcgtcgacgtcgacgacatggacgccggagcgttcagggcgctgctgcacttcgtgtacaccgacacgctgccggagatggcgtaggcggacgtgccgggcatggcgcggcagctgatcgcggcggctgacaggtacaaagtggagaggctgaagctggtctgcgaggacaaattaagcaggcgtgttgacgcaagcgtgacgccgactgattcagcagctacatgtgatatgccacagcgttatccgtggtttaaggggatctttttgaagttagtagctggttgtttgttctttt

SEQ ID NO: 10135 - DNA, 1163 bp, Oryza sativa
  ref <308>: DATABASE ACCESSION NUMBER: AK107483
  ref <309>: DATABASE ENTRY DATE: 2002-08-28
aaaatgcaactccggtgcacccgccgatcttacctggaacagagacaggcagggccgtcacgccgaagaacagagtgaacgaacaccattgccgtcttgctgctggttgttgcaggttgcagcagccagaaaggcgagaagaagctaggtaggaggtttttgtgtgtgtgtgtgtgtgatggggaggcagccgtgctgcgacaaggtggggctgaagaaggggccgtggacggcggaggaggaccagaagctcgtcgccttcctcctcacccacggccactgctgctggcgcgtcgtccccaagctcgcagggttgctgaggtgcgggaagagctgcaggctgaggtggaccaactacctgaggcccgacctcaagaggggcctcctctccgacgacgaggagcggctcgtcatcgacctgcacgcgcagctcggcaacaggtggtccaagatcgcggcgcggctccccgggaggacggacaacgagatcaagaaccactggaacacacacatcaagaagaagctccgcaagatgggcatcgaccccgtcacccaccagccgctggagccgcctcgtcctccgccgcgcgagcaggatgccacgccgcggccgccgccgccgccgcctcaggagatcgaggagagcgaggaggaggagcaggagccttcgccgttgatcgagccgcacgagatcaccgcgccaccgccggcggccgcggccgaggccgccacgagcaactgctctgtttcccctgcttcggtgctctccccgtcctgctcctcgtcggcgtcggctgcctcggcggtggacgtggcggagtggccggagcccatgtacatgttcggcatggatggcatcatggacgtcggctggaacggcctcatctccggcgccggcgtggacgtcgacgtcgacgtcgacccgttcgaccattactaccacgacgccagcttcgacgatcaagacgtctggatcatctgacgcgatccacatagatcaactctcatcttcttcttctctcgcggattcctaactagcgtagtagcttagcttcccatgtgttttttttcccaatcttttcttggttagaatgcatacatggtcatggttgatgcaccgaatgtttgacaaaaaattgagaaaaaaaaaatcaggtgagacg

SEQ ID NO: 10136 - DNA, 2181 bp, Oryza sativa
  ref <308>: DATABASE ACCESSION NUMBER: AK107484
  ref <309>: DATABASE ENTRY DATE: 2002-08-28
acgacctgcgccatccagcggcggcgccgctccaccgcgccagctcgccgacgaggcccaccttctcgccgccatccccactccggcgcggccctcaccctccgcgccgcgccgccgccggccacccagcccaccctggaccgcgtcctctccgacctcgggtcccacccgcgcctcctcacccccgacctcctcgactccctcctcgccgccctcccgctccacccctccccgcgccgcaacctcgcccgcctccgccgcctcctctccgtctccctcctccgccgctaccccgcgctcgcccgccgcctcctccacctccacgcctctctgggcctcgtctcctacgcccaccacctgttcgaccacctgctgcccgcgcgcgcccgggaggacgccttcccgtggaactgcctcatcggcgggtacgcgcgcctcggccgccacgaggacgcgctcgcgctctacctccagatggaggaggagaccgtcccgcgggaccgcttcaccttcacgagcgcgctccaggcctgcgccggcgtcggctcggtcgagctcggccatgccatccaccgtgacgtcgtgcgcgccggtctcgcgtccgacgtgcctgtgtgcgacgccctcgtggatttgtacgccacattcggcgacgtacggagggctctccaggtgttcgatgcaatgccggacagggacggcgtctcatggaacatcatgcttgctgggtgcctgcgacatgggctctcccagcaggctctggagctctggagaagaatgctgagagaagaacatgagcccgactccattacattatcaacaatgctgtcgatactgccgttggtttgtgacaatggtaaatggggactggagattcatgcctgggcaattcgtcatggtctcgagacagagctgtcagtagcaaatgctctgatcaggatgtactctgataagaacgaacagagccatgccctgttggtgtttgagtcaatgacgatgagggatctgcagtcctggaatgctataatctctgctcacctccaggactacagaattctcatgatcttccgtcgaatggtggattccgggatgcgaccagatgagaccacctttgcgttggtgttctcagcttgtgacaatttagggctggtggagggtggcatgagattgttctctgagatggagaatgagtacagaattccccctactatggaacaatatacctgcatggtgaacatgctaggcaaggctgggatgatccatgaggcttacgagttcatgtcgaagcggaagcctctcgacaatgaacagactgttttgagggctctactgcaggcttgcttgatgcatcgcaacgccagggttggagagatcattgcgaagaggttgatcgaactggagcctgacaatgagcacaattttgtaaagttgatggagatctatcaaaatgtgggaaggttggtagaggctgaaaaggtgaagaagacgatgagggatagaggactgtcatgtcaaagctgatgaattcaaatgatcatagtagcttttgaaccatatttcagagctcttttgtttagtggtggtgaacatagaactaaccccagttcattgtcaaacggttgtactttgtacaggccagtatcaggtgcaaaaacaattctttaattaatgctgtacaatggagtattgtgtatacaacaattgtaaggtacaatattgtatatacaacaattttaagatacaactactcttctttgatccatggctccaacttttggacagaaaaagttatgcggctcccccgggagtgactaaacaattgaaattgctacatcaaaatatcattggcatgcaaaagaacaaaattttaaaacctggagcagaagttcaccaaagactaaatatattgatatcaatgttgaatggattacaggattcaagaaattcatccacttcatacttaaaagaatccaggaacaatccaagtgtaaggccagctttccagtaattgaatatggtaatcatcttccttatcctaccaagaaacgcaaacgaagccctatacatcagagccccgataccctccacaatggcaacagcaagtccagcagacaatatgtcccagtcacctgtttgcccgatgacagtagcaaatgccgtagcacaataaaatccgatgag

SEQ ID NO: 10137 - DNA, 800 bp, Oryza sativa
  ref <308>: DATABASE ACCESSION NUMBER: AK107485
  ref <309>: DATABASE ENTRY DATE: 2002-08-28
aaaccaacccaacccaaaggaaatccatccatggcgatctccaagctccagctcgccctcctcgccgccgcaatggcggcggcggcgatctcccccaccgcctccggcgcctacaccggctgcgcgacgccgaggaaggtgacgatccagaacctctccggccgcgacctgcccctctccgagacgccgctggcgaacagcggcgcgctgttcggcgccggctacgtgctccgccatggcacgcacgccgagttcacgacgtgcctgtggacggggcgcgtggcggcgccgggggcgggggtggtggagttccacgtcggccccgacggcggcgcgtggtaccaggtggacaaccgccaggccgggtcgccggtgaaggtcaccgtgacgccgcacggccggccgctccagagccactgccccgccgccgggtgccgcggcggcggccagtgcttcgccgacgccgtccccggcggcaactgccacgccgtcgacgagctcaagatcatctactacagcccgtgattttggttttggtttggttaaatttcgtttggattagtgggtgattaggccgtctattagttttaagttaatcatttggatcgtcgttgagtccgtctactagctatatgtagctactgctagctttagctagtgagtgtgtcagtgtgtgacagtgtcacgtcatcgcatgcatgcatgcattgatgtcgacatgtcctcgtaatgtgcgtcgtgttttgtcttgtcgtgttgttgattaatcctcgataatttgatgtgcatgcattgtttgc

SEQ ID NO: 10138 - DNA, 3074 bp, Oryza sativa
  ref <308>: DATABASE ACCESSION NUMBER: AK107486
  ref <309>: DATABASE ENTRY DATE: 2002-08-28
cacgaaagaatcttaaatactgtcaagaacgacattccatcacagtctaaaccgaatccagaacagtactaatcctaggctaggcaaactgccggagggcgcagagagacacgcccaagctgctcggatgcgtacttcctgtatgccgtcttcagcttgctctcaggagcggcagcatgagcgttgacaaggaccttcgcacactccctgcaatcaatcaattcatcccaacaatcagaactaatgttagtttacagatcattgaaaagttcagaaacttcaggttcaggaaaaacggaagttcagaaagttcaggtttcagggaaaatggaaattcagaaagttgaaaaaatacctgagctgtgattcggtgaaaccggtgtggtgcttgagcgtgctcgtccagaggggactcctcttcagcgtacattgagccgcgtacaccgccgacgcggccaccagcgacgggcacagcgacgccatgccgtactccttcagcgccatctcagagaagaagaacaccatgttctccagctgaaaaaagacacaatgtctctgatcagaatacagttacaatttccatggcacaccagaaatgaaatcaagttctttgttccttcttcttgttttttttacctccttgtcgcctccggcggccttgatgaaccggagcaagaagacgtaaggtgtgggaacggtgatgttccactgcagcctgttcaagatgttcttctccatggcgaggatatgctgccgcgagtaggcgttgtcacagacgtggatgaggtcctgaacctgaaaaaatccgttcaccgcagcgaagcagagttttgttcagttacatcacaagtgtgaagcagagattgggattcttgttcgtcttgttgaatcaatcgaatctgcgttacctccggcgcccacatctcctcgtacttggaggcgatgagcatggccgcgacgccgacgagctgcagctccctgcgcagcacgggctgcagcgagaggtaccggtcgatgacgtacatggtgaggtagagggtctccggcatcagctcgaatttgtagtgcacatcgatgatccagtctgccaggatggccctcatcttggggttcacctcgacctggctgctcatgtagtctgtcggccggcgctccagctgtgcaagaacaacactgtcagtttctgaacaaatctgaagaggaaagcttcactgaaacgaagatggaagaatctgaggtttacctgggctgtcctgtagaagttgtagatgtcctcgatgtactccaccacggcgagctggttgtcgccgtcgagcttgtcgatgtcctcgacgacttcttttggcttctcagtaatgccacacgcgtgctgccattaacaacatcgaattcagattcagctacagtgcaattatgcagaaataagcaggcaagcacaggtgttcgatcgatcactcaccttggaacgagcagtaagcacagatgtaagcgtgttcacgaccttcttcctggagtacttgagggctgaaccgccgctgctgctgccggcgccctccgactccgacggcttcttgttctcgttgacgccggcgccggtgctggccttggcggcgttctccggacggggtacgaccttctttgccggcttcggagctggctccttcctggccggattctgcacgacaatctgcgaccaaaatcaaaaatcagggatcaaatcaaccgctctgaattcgcaagaagaacacgagaaacagaaggggggtgtgtctcactccgtaccttgttcgccgcaacggcgttctcctgagctttctttagaagctgggcgccgaagctcctggtgattgggcgattgatcccctccggcagctggatcttgctgttgcaagaagaacacgaggttttcagagaaggaaacgagaggaagaacgaatcggggaaggttggcgacgatgatgtcgtgctgctccttacccgtcgaccacatgggcgttcaggacgttgccgatatcgccgagggcttgccggtttctcgcaccaggtcggccggcggcggcggtggcggcggccttctgcttccccgctgcgactgcagcacctgcccattcgccggagaagaagattagcaacaggggttgcgtttacacggggataaatcgaaacaagcagatcaagaaaacctaatcaaacacaggaagggcagcatcaaaaatccgttcttggtgcatgaatcgggcaagaaaggatggaaactggaatcagttggccctcgcaacataaatccgttcttgaaaaaggattcgaacagacctggaactctcaccaagcaagactcgactaccaagaactcaaaattttccgcttgaatcgtacagattcggaacatcaaacagaaaaatccgtagcttggaaccccaaagaaccccaagttcaggcaagtccccccaaagaacccaaatcaagaacacagaacaaagccaccgccgctcacctctgttcgccggctgcggagcggcagccgcgcgctggtgcctcgtcgccatgcgtacggcctcctgttgctcctcctcctcctcctccgggctccaagaacgccaagaactccggcgaactccctcccggaccgaagcaggcggccgtcctctcctcctcctcttctctcttcgctcttccaactctctctctaaaatttcttgttcttgcttgatttgcttggatcggagaggagagacgcggagatgcgttggcgtgggaggagcggcgcggtggggggctcgagctttatccggagcggagggcgacgcctccaacggtcgagaggatcgacggccgggatggcgcggcgtggattcaacggctgggatcggacgcgggcggagtgaacggttgaaactagccgttggggactggtattacgggcaagtgttcggcggcggggtcatccatggcaagtactgtagtactgtgtttaagctttgtttgctactgaaagacagtgttagcctggtagtaattacttaattaggagcagtacatatgtgtaccagctctatctctgtgattaccgtgtg

SEQ ID NO: 10139 - DNA, 789 bp, Oryza sativa
  ref <308>: DATABASE ACCESSION NUMBER: AK107487
  ref <309>: DATABASE ENTRY DATE: 2002-08-28
agtgctacccactctcagcgccacacctcgatgtcgtcaaggcgagggggagaatcaggcggcggcgattctcctcgccggcgggaggaggccaagagcacgactcctcggctgtagccaggctcagccggtgggcgcagtgcggcgccctccgctgagatgtcatcgaggggatggggcgaatctggcggcggcgatccgcctcggctgcagggggattccatctcgcgtagcaaggctaaaagccggacaacatcgctgcagccaggctcagtcagcgagcatgttgcggcgtcctccgccgccgccgtggagacaggcttggagttcggcaaggttgacggcgaggcgcacgcacccgctcccctgcacttggcaaggcaccaacagttgttctgtgttcatcaagcaatgatgcgctgaatcgcagggcagttgctggtggtcttgatttggatccaaaaaggtcaggcgtcgagatccaaaaaagcaagggaacgggtgaaattgagttgccaatttttggactgaagaagtagtctcattttgtggacaatttttttactgagagcccatgtttgcagaatgaaggggtcctaccagagcaatggctcctagggcgcctaatgatgtgttgtgatgcaggtttagtgattctgtttagtgcaaagttcagtaaatttttcagacatggatgtgatggcaaagttcaagtggttttgtttagtgcaaagtttagtaaatatttcagcaaatatcatctcccaaaaaatgttcaattaagtaatt

SEQ ID NO: 10140 - DNA, 719 bp, Oryza sativa
  ref <308>: DATABASE ACCESSION NUMBER: AK107488
  ref <309>: DATABASE ENTRY DATE: 2002-08-28
accaagcacacaaatcacagctgctgctgctgctgctctgctcccctcctaccacctgcccttttgcccccacgcacaacacacgtcgtcagcctctgcctttcacgctgccgccgccgccgcgagcctgagctccggtctcctcgctctgcaccgactgtctgcgtcatcagctccggccacggcgtggcgatggacagtctgaacacgaagctgtacctgcagaactgctacatgctcaaggagaacgagcggctgcgcaaggcggccgtgcttctcaaccaggagaaccaggccctgctctccgagctcaagcaccgcctcgccaggtcgccgtcgccggccgccgcggcacccggcgtcgccaacgacagcaagaacgccgccgccgccgccggccgccacgctggcccgcctccggtgcaggacaagtcagcctccaagtccaagtaggctatagccacgagctcacagctgcttggtcacagagaagcggatgcttgcttgagccactgtggatgcatggtgatggtgctgcaggtgtttgggggtgtgtgtgttttaactttagccgtggatgtcaactaggaaggcgtttttaattactttcagttgctgaattctggattctctgctcactggtatgtagtcttaacatgatatccttgtaatggatagccaggttaattggaggtacatatacatagctttgttttttt

SEQ ID NO: 10141 - DNA, 1823 bp, Oryza sativa
  ref <308>: DATABASE ACCESSION NUMBER: AK107489
  ref <309>: DATABASE ENTRY DATE: 2002-08-28
atgcggcgtaagcccgccgcgtcggagggtggttggggaagcgacgccgaccccgactccgggagctccggcaatggcggtggcggaggttcgccgccgtcgtcgccgtcgccgccttcgccgccttcgccgcagccgctgctgccgacgttgccctcaccgcaggccttcgtggacgcgtacaccggctatgaggatcagggagcatgggaccccgattccttgtctctagagttgggacttgcaacgttacgagagttggaatgtatcagatatcaggaagcacaagaagactggagaaagagtgatgataacaagtctgattcctgcaagcaaaaagataaggatcagggagcatgggaccccgattccttgtctctagagttgggacttgcaacgttacgagagttggaatgtatcagatatcaggaagcacaagaagactggagaaagagtgatgataacaagtctgattcctgcaagcaaaaagataaggagcaggaagcatgggatcccgattccttgtctctagagttgggacttgcaccgttacaagagttggaatggatcagatatcaggaagcacaagaagactggagaaggagtgatgataacaagtctgattcctgcaagctaagagataagacaacatcagatgaccggagcaagagtggcgataacaagtacgattcctgcaagacaagagataagaaacctatcgtggatttggctgatgaattcgaaaacaataccataaaaaaaaagatcacgcttcttagcgaaaaatacgatttcttcagaccagttgacagagatggcagttgcttttatcgagctttcattttcagttacatggagcgtattgtagcaatgcaggatgacttggagcgcattattgaagtttcccgtatcggagaacgtattggaaaatacaagcaagcttatgcaagatttggttcttttggaatacctcaagaagaattcttgaaagctctttctgcatttgaacaattgatcaacttaattgaaaagggtgttgctgttgaacaactatatcagatagatgagactgacatcacaaaaaacagtttacgcttccttaggtttctgactgagattgagatctgcacacatgaggaccactacaagggttttcttctaacagcagattattcatctgtttttgagttttgccaggttgaagtgcgacctgagaatgctgaagcgagcaatgaacagatgaaggcacttgtggaagcactcggcatccccgtacttgtggagaatctcgatacaacctcggagactgacacccccatactaaatcagcatttcatctaccccagaccagaatcagaagagggcacgatgttgggacctctgaattcgcatgagattgtctctcctgaaagcagtggttaccatgcagctagaggtgagcttcagaatcagcctagtaccagtggctccagtacaaacagctcaacagaagcattgggactgcaatcaattggcaccagttcaactcctaatgagcgagatggaaagggagacaggaccatcaacgacctatccccagcagaaagaaggcggttagcgatcttgctgtacaggcctgggcactatgacattctttgtcccaagtagacctacctttctctggagtctggaatacgtagtgtgcttgattctcgacggtaacatttgagctgtggcttgtaactttgttctgcctgacctgagccgtagagctattcatgtccttgacttgtatggagatctgttgttgctattcatcccgttgtcacatagcgtgttggtgt

SEQ ID NO: 10142 - DNA, 680 bp, Oryza sativa
  ref <308>: DATABASE ACCESSION NUMBER: AK107490
  ref <309>: DATABASE ENTRY DATE: 2002-08-28
atcgatccctggctgcgaggaagaagaactagcttagcttagctagatcagatcatcagaagcttagcaggaacgccatgtcgtcgtcgtcgtcgtcgtcgtcggctctgttgctcatggcggcgctgctgctctcgtgcggcgccatgggcagcacggcgaggcacctcgaggagaaggcgccgcacttccccgccgtgcccgagctgccgccgcaccccgagctgccggagcttccaaagcccgagctgccgccgccgctccctgagcttcctcgccccgtcgtgccggagctgccgccgcaccccgccgtgccggagctgccaccgttgcccaagcctgagctgccgccgcaccccgtcgtgccggagatgctgccgcaccccgtcgtgccggagctgccgcactacccggccgtgccggggttcccaaagcacgggctgccaccgaagcctgagctgccgccattgcccacggcggagctgccgccggagcacgaggttcacgacccggagccggagaccaagcagccatgatcgtacatacacacacagtattttttttttagacaatggattataaaaaacctggcctctacaccttgtgaggatgtacacagcctaaaagtaacaaacacgagtacacaagactataagactctcccgttacatgggtaaaac

SEQ ID NO: 10143 - DNA, 2127 bp, Oryza sativa
  ref <308>: DATABASE ACCESSION NUMBER: AK107491
  ref <309>: DATABASE ENTRY DATE: 2002-08-28
aggtttggcgcaaacgccatgcggcgtcccgagctaatcatgcggtcccttcctctaattctcttcctaagccttgggagtttccacctcgccgcagccgccgttgatgaccagttcaccttcgacggcttcgccggcgtgaacctcacactcgacggcacggccgtggtcacgccgggcggcctcctcatgctgacgaacggcacgactctgctgaaaggccacgccttctacccttctcccctgcgtttctttcacgaggcgacgagcggcggcggatcctccaccgtgcggtccttctcgacggcgttcgtgttcggcatcgtcagcgagtacgccgacctgagcagccccggcctggcgttcgtcgtcgccaagagccgcgacttctcgtcggcgctgcagagccagtacatgggcctggccaacgcgcgcaacaacggcaacgccagcaaccacttcctcgccgtggagctggacaccatcgtcaacgccgagttcggcgacatgagcgacaaccacgtcgggatcgacgtggacggcctcgcgtccgccgccgccgacgacgcgggctaccacgacgaccgcaccggcgcgttcgtgaacatgagcctgctcagccgcgcggcggcgcgggtgtgggtggacttcgacgcgcgcacctcgctcgtcaacgtcaccatggctcccctcgagctgcccaagccgacgacgccgctgctctccgccgccgtgaacctctcggccgtgatcgaagacgaagcctacgtcggcttctcctcgtccaccggcgtcgtcgcgagccgccactacgtgcttgcctggagcttcaagatggacgggccagcaccatcgctaaacgtatcaaagctgccggcgttgcctgtcacgatcgccagggctccgtccaacgttctgaagatactattgcccatagcctcggccgcactggtgtcggcattggccattgctgttcttgtgattcaccggagacgacgcaggtatgcggagcttaaagaggagtgggaggttgcgtttgggccacaccggttctcatacaaggatctgttccgtgccacgaatggtttctccgatgagcgattgcttggctttggaggatttggaagggtgtacaagggagtactactggtatcccgagtggagattgcagtgaagaaggtatcccacgagtcgaggcagggaatgaaggagttcattgccgaggtggttagcattggtcaacttcgacaccggaaccttgtgcagttgcttggatattgtcggcagaagggtgagctactgttagtctatgattatatgccaaatggtagtcttgataagtatctgtatgctgagaacagcaaaatcttgagttgggctcaaaggtttagaatcatcaaaggcatcgcatcgagcatattgtatctccatgaggattgggaacaagtcgttctgcatcgagacatcaaggcaagcaacgtattgttggacgccgaaatgaactgtcggctaggtgactttggccttgcaaggttatatgatcgtggcaccgacccacacaccacacacgtggttggcacaatagggtacctagcccccgagctagggcacaccggcaggccatcgaaggcgtccgacatcttcgccttcggtgtgttcatgctagaggttacctgcggacggcggcctgtcttgcaagacacgaacggcggtcaactcttgttggtggacatggtgctggagcattggcggcaagggacggtcactgacgctgtggacccacggctgcaaggcgactttgccgtggaagaagcaagcctggtgctgaaactatgcttgctttgttcacatcctctgcccagtgctcgtccgggcatacggcaagtcgtgcagttgctagacggtgccatgccactcccagagctatcacaagctcacctaagctgtaacatgctggccttgatgcaaaatcagatgggcaactcatgctctgttgcgtcgtcggtagctggtaatatctctgacattcctcgagcgagatgaccacaaggttttagtctcttcgctataggatttgaccatagtgatagattactcggtgaaaaggaaatatcgtagattactctg

SEQ ID NO: 10144 - DNA, 1101 bp, Oryza sativa
  ref <308>: DATABASE ACCESSION NUMBER: AK107492
  ref <309>: DATABASE ENTRY DATE: 2002-08-28
aaagcttaacgatacggagcggaagcaacgcttgtgttgtcgcgagtctcgtgacctagcctaagcgccgccgccgcttcgccttccccacgcgggtcgccggcgcccccagcctcaccggtgttgctccccctccacgcgctcgccaccaccgccgctccccgagtcccgtgcgcgccgctgtcgacaccggagcttggccacctcggcaaggccggtgacctccaccacctccagagtttcgtctctagtccattcatggattcgaccctaacaagcggcttgacttcgccatcttcaaggagactgacctcatcgttcatcgacatctcttcaaggaggccccgctcccctagcccctagccgaagatcctgaggtacacagagaaggtgcccaggaggttctcttaccatcaatcactatgttttcgtcgttttcacggtcaatcactactccttgttgtgttacggagcttccttaaagtctaggcattatgcgtggaagaggcaagaacaaaaggatttgaaggtattgtttgagctttctttggatccaaggtcgaaatcaaaagggggtttcaaaaatggataccgtcaagttctagagagcgtacttggtaagaggttgccaaattcttgccttactgctgttctgcacattgagtcatgagtgatgcactttaggaccaagtttggtgcaattgagtcaagatggtgcagtgcgagaaacaacaatatgatgatcatggcagaatgaagcaatgaagaaaaattcatgtgatggctatatgtcatttaatctatcagatgctcattacgagattttgaattcgtaggtcatttgacttcgggattagaggcctgcctttatttttcatgagcatgttcattttcagtactttgaaattttataagcttgcactatgacagtttgtaatattgtgcagttggttaaaagacgataagactgctagctactatcataaacatgaatgtcacaaaatctggtactgttgtataaattgcgttcaacagcttggttgtcacaaaatgacttctaaaacagagaaatagaggatttaatttgtgttaggtgctttc

SEQ ID NO: 10145 - DNA, 1617 bp, Oryza sativa
  ref <308>: DATABASE ACCESSION NUMBER: AK107493
  ref <309>: DATABASE ENTRY DATE: 2002-08-28
actcggagctcagctcgcacggcacggaacggaacacaaccctccctgtgtctctctccctgatgcgccgccccccatgcggcggccccgacccacttagcccgcggcggcggatgctgcggcggcggcggcggcgatgaagcggccgctgcggcgcccgttcgcggtgctcctcttcgtcgtgctgtgcgccgcggcctcgttcccctccgtgttgcgcaggtcggtgggcccggctcccgtgctcgcgaccctgccgccgcttgatcccgcgcgcctcaacgccacgctcctccgccttgccgcggccgatccatcggaggcgccgctgcgccgcgacgtggacgacctcctcgagggccgcctcccggcgtcgtccgcgcgcgcccgcgcgtggcgcctccggggcgacaggctccaccttcacctccgccaccaccagttccccgtctaccggcgcggccaccacccggatcacgaccacgaccccctcctccacccgctcccgcgccaggagctccacctcgacccatccctccgccgcgcgctccgctcctggcaccgcctccgccggcacgaccccggcgtcctccgcaatctcccttccctcctctccctccccggccgcatcccctcctgcgccgtcgtgggcaacagcggcatcctcctcggcgccagccacggcgccctcatcgactcccacgccgccgtcttccgcctcaacaacgcccgcatctccggcttcgccgccaacgtcggcgccaagaccaacctctccttcatcaacagcaacgtcctccatctctgcgcccgccgtcccaactgcttctgccacccctacggcgacggcgtccccatcctgctctacatctgccaggccgcgcacttcctcgacgtcgcctcctgcaacgcctcttcccgctccctccacgccgcatccatctccgtcaccgatccacgcctcgacgtcctctgcgcgcgcatcgtcaagtactactcgctccgccgcttcgtcgccgagacggggcgcgcggccgaggagtggagcagcacgcgcgacgcggccatgttccactactcgtcggggatgcaggccatcatggtcgccgtgggagtgtgcgacagggtgagcgtgttcgggttcgggaaggcggccgacgcgaagcaccattaccacagcaaccagaaggcggagctggacctccacgactacaaggcggagtacgccttctaccgcgacctcgccgaccggccggaggtagtccccttcctcaacgacgccggtatcgccgtcccgcccgtcgtgttctaccattagagcgcgtgcgcgcaaggtgctcgacgttatgccacttttttccggtggaggattgtgttgtattagtggctcagtgtaaaatgttgcttcgtaaggtgggttattttttgtgattagattgatagacgaattgaaatagtagcgaaattttgatatgatggtgggattggaggtgtgtactaagcattaggatccctccattagcatacgaggacgatttcttccgcttttggcactgtaactgtaatttagactgatctttcttcgtaatttcatgaagaatcaattgtacatcttct

SEQ ID NO: 10146 - DNA, 2068 bp, Oryza sativa
  ref <308>: DATABASE ACCESSION NUMBER: AK107494
  ref <309>: DATABASE ENTRY DATE: 2002-08-28
aaaagccacacgctccaactccggcgatggcttccatctccggcgcggcggcggcggcgccctcctcctccggggcgtcgtgcggcctccgcctccggcgagaccacctcccgcgctcctcccacttccgcctcgcccgtcccagctccatcaccgacgtctcccgctcctgctcgtcgtcgtcatcctctcctccccgctcgctcagctccaagcagtcgggccacgccgacgtcctcgcccatggcgcggtggacaaggaccccatcaggctgtggaaccgctacgtggagtggctgtaccagcacaagcagctggggctgttcgtcgacgtgagccggatcgggttcaccgaggagttcctgcggcggatggaggcgcccatggggcgggcgttcgcggcgatgcgggagctcgagaagggcgccatcgccaaccccgacgagggccggatggtcggccactactggctgcgcaacccggccctcgcccccaactccttcctccgcgacaaaatcgagaccacgctcgaacgcatcctcgcgttcgccagcgacgtcatctccgccaagataagacctccatcctcccctgctggccgatttactcaaatactttctataggaattggtggttcatctttggggccacaatttgttgcggaggcacttgctccagataaccctcctctgatgataagatttatcgacaacaccgatccagctggaattgaccatcagattgcacagctaggaccagaacttgcatcaactcttgtgattgtaatatcaaagagtggaggcacacctgaaacacgaaatggtctattagaagtacaaaaggccttccgagatgctggactagaattctcgaaacagggtgttgcaattactcaagagaattctttattagataacactgccagaatagaggggtggttagctagatttcccatgtttgactgggttggtggtagaacatcagaaatgtcagctgttggtttactgccagcagcattacagggtattgacatcaaggaaatgctagttggtgctgcacaaatggatgaggaaactaggaatactgagattaaggaaaatccagcagccttgcttgcattgtgttggtattgggcatcggatggaataggcagtaaggatagcctgcttcttttgagtagatacttgcaacaacttgtcatggaatctcttggaaaagaatttgaccttgatggaaatcgggttaatcagggactaactgtttatggtaacaaaggaagcacagaccagcatgcctacattcagcagctgagagaaggtgtgcacaacttctttgttacttttattgaagttttgcgcgataggcctcctggtcatgagtgggagcttgaaccaagtgttacatgtggggactacttgtttggaatgctacatggaactcgttcagctctttatgcaaatgaccgcgaatctattacagtcactgtccaagaagtaaaccctagagctgttggagcacttgttgcactctatgagcgtgctgtcggtctttatgcttatttaatcaacatcaatgcctatcatcaacctggtgtcgaagcagggaaaaaggctgctggagaggtgttggcacttcagaaaaggatcctacttgttcttaacgaagccagctgcaaggaccctgctgagccattgacactggatcaaattgcagatcgctgccactgtcctgaagagatcgaaatgatatacaaaataatccaacacatggctgcaaacgatagagctcttattgcagaaggcaactgcgggtcaccaagaagcatcaaggtctaccttggagaatgcaacgtggatgatgatatgaattcttaatttcatcatcgttttcttttcacctttttggtgaacttgagtgatctttttgaactataagggaaaatgatgctacttgctgatgtgtattcctacaaactataggtctactctcttgtataatatttttcctagctctactccatttgtgatagcaggatcggattaatgcaactatatttagcttgcatggt

SEQ ID NO: 10147 - DNA, 1999 bp, Oryza sativa
  ref <308>: DATABASE ACCESSION NUMBER: AK107495
  ref <309>: DATABASE ENTRY DATE: 2002-08-28
gtcttcgtgacacacaaccttccccttcaccgttcgcgagatgatggcctcgcggtcgcggctccgcctcgccgccgccggcgagaaccctatcccacactccaagtccggcggggagggaggaacggagaggaagccggaggaggcgctgcggcgggaggtgacggacctgggcggcggcagcgaggtggtgcacgtgccgcggttcgtgccccgggaggcggcgtgggggtggttcgactacctcgacaagcgcatcccatggacgcgccccaccatccgcgtattcggccgctccgccgtccaggtacagagaggtcaccgccgccgcccgcgcctctcattgaacccttcattttaatctttgtggggcttccctaatcggtcgcaatttttgctctgttgttcatttgataaatttctactagtgctaagatttcgctataggttggtgcattatcgttgattcttggaggaaaaaccatagtactatcttgcttggtgagattctgaatatggtgctgaggttgtggtacttcggtgagtctgaagaatggttactgcaggcagtgttgcttacgatttagctgtggcccttcggcctggggcttacaaatttacactaggcatttgcgtttccccggtaaaagctggttgaattcatagaaaattggcataatgatagtgactgcagctgatccggatcctaagaaatcatagtcggcagaaatagcatcgtgcatgtaattgcagtattggtgagttgttctctttaacgtctgagctgaattttaatttgtgggcagaaataaactatataagtacatatacattagtgggatataaacaaactgataggtacaccagtggctctgataaatattactccctccatcccaaaatataacaacttttgggtggatgagacatattctagtactatgaatctggataggggttatgtccagatccatggtactatgatacgttccatccaccctaaaatcgttatattttatgacggagggagtaactgctaagtttctgatgtcttatgtcccaaacgatggtagctcctaagctctgtaataccattgtctttccagaaaaccacggttaccattgtcttccaattggagacacattgatagtgtaactgttgtgaaagattctagctcaagtatcccattctcttactgttctgcagccgagagatacatgctatgtcgcggacgaagggctaacagatttgagatatagtggccatcagcctcatgcacattcttgggatgaattccctgtgctcaaggatatcctgaaggcggttcatgaagccctccctgggagccattttaacagcttgctcccaaacagatacaagaccggttcagattacgtctcatggcatgctgatgacgagccgctgtatggacctaccccagagatagcatctgtcaccctcggatgcgaacgagagttcttacttagaaagaagccgacgaaatcgcaagcttcacttggatctggggaagttgcgccgaagcggctcaaggtcagtgctcctcagcagcattctttcctcctgaagcatgggtcgctgcttgtgatgagaggctatacccaacgggactggcagcactcggtcccgaaacgagctaaagcaagctcaccgaggatcaatctgactttccggcgagtgctgtagcatctttgtgtacagcgtcggaggcagcttccgggcaggtcgggcggctgcctgggctccattgctggcgcgtacactagagactatctataacatgtatataaaaattaatagatcacaggaaaacactattagtcacacaggagcgatggtgtttgccactgtttgcatggtagcgatcttatctttgcctccctcgatcttttgcgattgtgcaaacttatcacggacattgttttggggagacttgatgtttgtgttctgctactctgttagtgcatcatacattctggc

SEQ ID NO: 10148 - DNA, 833 bp, Oryza sativa
  ref <308>: DATABASE ACCESSION NUMBER: AK107496
  ref <309>: DATABASE ENTRY DATE: 2002-08-28
ctctgcgaggctgccagtgcgagccgggagaggagggcgtcggcggccggcgatgggcgatgcggcggcggtgggggaggagctgcgggcggggagccgcacctagtgaagctgcagccgtcgacgaggagttccttgccgtcgcggtggagcgccgacgccgggcagcgtcctgggtgggcgtcgggctcgccaccgaccagtgctgccttctccctttacaacctcaagccggcacccaccagtgctgcctccccgctggccgtcgtgctcgttgacgagtcggcgagaccggcgtcgccgtctgcaaagtcgcggctgttcccggccaaggtcaaggggagggtgggacccgtttctgcggcggtggcgagcgcggctcgtccgcctcgccgccgtcttcgtcgctgcggccctcatcctgacagcttcggccaagaagtccggagatgtcacggagcttcagatcggtgtgaaggtgtctccgccaccacatcgccgccgccgcatccccggccggccgtcggacctcctcaccccagcgacctcctgcccaccgtcggcctgcctgcccaatcagagaagggcgagagagagagagagagagagagagagggggaggaggaaaggagaggaagggagagccggagaggcgcttgctgacttggcatcctgatatgtgggtctcacgctgatttagccgccacgttatataaaaccaggcttaaaaccgccgagggacctagtttgcactggttttataagttggaggatgtgttgtatccggttttgtggttgggggatgattctgtaacttgatgataaattgaggg

SEQ ID NO: 10149 - DNA, 1268 bp, Oryza sativa
  ref <308>: DATABASE ACCESSION NUMBER: AK107497
  ref <309>: DATABASE ENTRY DATE: 2002-08-28
agccactgcataacatgcaacaagctatcgatcagtcacttccctagttcccttgctgcagttgcgttgcaccagtaccactcaacaaaccaatggagattcatcttcatctccatttcttagcgatccttgtagttgtgccgatgttgggtagccccgccgccggtgggctctgccgcgacagctgcggaggcatcccggtgcgctacccgctgagcatcgacgacgggtgcggcagcccatactaccgcaacatgctgacctgcgccgacaacgccacgctccgcctccgcacgccgtcgggcacgtacccagtcgtcggcgccgactacgcggacccgcacctcgtggtgacggacccttccatgtggacgtgcgaacggcccttcacctccgtccgtgccgcgcccttcagcctggacaccagcacccgcttctcgttgtcgccgaggaacgactacctcttcttcgactgcgacgaggagcgcgtgatcgtggagccgcggccggcggtttgcgaccggtaccctgagcggtgcgactcgacgtgcgacagcacggggtacctttgccggaacctgccgggttgccggggcgcgctggaggagaacaacatgagctgctgcgcgtaccggccgcgagcggcggagtcgctgcggctgatgctgcggcactgcgagtcgtacacgagcgtatactggcgcgcggtcggggacaagttcccgccctacgaccaggtgccggcgtacggtgtgcgggtggacttcgagatccccgtcacgacgcggtgcctacagtgcgaggaccggcggcgcggtgcggggggcacgtgcggattcgacccggtgacgagggacttcgtctgcatctgcaacgacgctaggaactccaccacggactgtgcagatggtcctgcctcaaggtatcattcatcagctggagttgttgccgcaagcgctgtgttctcaatctcagcagccgttggtatcactggacttgtgtggtacattcgcaagatcaaatcgaccaaagtggtgacttgtggggttcaaagcaatgagaatagatttttttaatttgagatgactacaaggaggattcaaagcaatgagaatatatatttttaatttgagatgactacaaggaatattttgatgagggtagaggcctggatggcaacacccttgtttcttttcgtcatattcgagaacttcatttgagtaacttgaagtttttgaatcagttgatttattaagtcatgtatatat

SEQ ID NO: 10150 - DNA, 1668 bp, Oryza sativa
  ref <308>: DATABASE ACCESSION NUMBER: AK107498
  ref <309>: DATABASE ENTRY DATE: 2002-08-28
acgctccactccaatccaactcgtcgtcgtacgtctccctcctctcgcaccgaaccaaatccccatcgcgccgcggcggtggcgaggcgtgcgtacgtacgtgatgccgggaccgggggcgcacctgctgtacgcgctgtcgggcggggcggcgctgtcgcggctggccggggcggcgcggttcgggccgcaccactgcgccgtctacgccgccaacgccttcctcggcccggacctcggctccttcgccgagtggctcgcctcgttcctcccctcctcgtcctcggccgccgccgccgtgggggacctcgccatgggcgtcgtccaccacccgttctactacccgctcctcctcggcttcccgctcgcctgcctctacgcctggctctcccggcggctgctcctcgccggcgtcctcgacgagccctctcgggtggcactaagcaggagacaatgcttctaccttatcacggcaggctcgctctcccatttctttttggatcacttgtttgaggagaatgggcactctacgatgtatacttggattctgagcactggttggtgggtaggccgtgctcctatcaattcggatgcagtggttattgtaggccttctttgtatttgcctcgtgctggggtttgtgtacattaacagagtgaagcatgaaaaatcagccactcaaaaatcaaaccaatctttcttcctcatcgtggtgatagctatcttgtactgtatgtggtgtgccactcagatatacctgcgaaatccacctcaaccagccatagggtactatgaatgggactcgatgatgctaatgctgttatgcttatcgtcatctctcatggagatctttagggccttctcaagatgtgacacaacttgctccatggacggacgctgcttcttgtgtccagtgcatgaaagggcaagcttcaaactgagatcaaatgcctctgtcgagtactctccgttcagcctaggatcagcaaactccaacacgttgccttctctgatgagcatggaagcctgaggaacgaaggagttgtaggagcaccataccaaagctgtagacatcccctgcagcatttaccttgtgattgtggcgatactctggatcgacgtatccaaatgttcctctaacttcggagcttacgtgtgatactcctatgtcaatgactcttgacagtccaaaatccgacaatttgggttccatatcaaccccaagaagtatattggttggctgtaacggcacaaatgagtttgacattgcttaaatttgcagatgtactagagttttccaaatcatgcaaccaaccttgacatcacggtgaacaatgcagccttcaggatatatgtgaaggaaccaaaggccacaggcgctgccaagtgcaatctgcagcctctgaatccatgacaggttaccgttgatacataactcatatacaagaaaacattcctcctgcccatcgcaataacctcttagtgacacaaggtttggatgtctcacatgtgagaggcttgtaacttcccttaggaaagtttctgcatgctcgttcttaacgatgtgctttacagcaacaggccagccatttgcaagcactcctttgtacactttccctgaaaaatcacataataaagaagatacatccaactttcagggcaagaaat

SEQ ID NO: 10151 - DNA, 797 bp, Oryza sativa
  ref <308>: DATABASE ACCESSION NUMBER: AK107499
  ref <309>: DATABASE ENTRY DATE: 2002-08-28
agtagtgcgtcagccgccgccgccggcgatggcgagggaagaggtctccgggtgcgcggcgccatgagatcgatcgatcgatcgatccgtgaggccgcgcgcggtggtgatgccgttgctccacggcgaggtgaggtgcgccatcacttcggccctcctgcttcaggcgagagaccggccgccggcgatggccggcacggaggattggcttttccgccggctcgaatcgaagccaaagcaaagctagatcgccgggatactcggcgcctcgagatgcggactcgtcggcggccgtgccggagcgcgatttggccgccattgctgacttgggtgtcagcgaattgcaaaagagaagcggggggcggcacggatttcgaggtgagggctggatcaaatgcttcggcaaaaggctgtgcttcttttcttttgttcatcctccttggcgtactccaaagttgatgtcagggagacccggcctgcaaaatggtactgtactccagtactcctcctctgtgcttagcttaatcctgatgctgcttcaagtgcatcgcattcaaaggtaggagtattttggagttaaaattgttttttttttttgttctcacaagtggattttctacctttttacctggtgtggttctccttgggtgtcttacttttgcactgacagtgtctcaaattctacatgcatttattttttaaaaaagaagggcggtgcaccagttgtaaaatgtaaagcaacgacccgttgttgataattcggaataaaaaagaggatgcagtgctgatacggttgc

SEQ ID NO: 10152 - DNA, 2258 bp, Oryza sativa
  ref <308>: DATABASE ACCESSION NUMBER: AK107500
  ref <309>: DATABASE ENTRY DATE: 2002-08-28
aaaaaaaaaaaaatcgaaaccaaatcggagatcaaaagcgagcctgcatccatcagccgcgatcgcccaaaaaagcaaaagcccacctccgcctctgcgcccgccggcgaaaaagcggtaaagcttagtggcgaaggcgaaagccaaagccaccccaccctcgccggcataaaagccgccatggcgcagcctttgcgcgcggaagctggcctcctcctcctcctccatccttcttcctcctgtggccgccgcgatggaggtggagatcgtcgaggtggggccgtcgagccggccgctgcggtacgtgccggcgcagcagcggtggaggccgacaccgacgccgcttcctccgcctcctcccccgctgccacctcctcctgccgcctccgcggcgtcgtcgtcgggcgccggggacgcggcggcggttgcgtccgcggcgaatcagttcgacagcgagaagctgccgcagacgctggtgtcggagatccgcccgttcctccgcgtcgccaaccagatcgagcacgagtccccccgcgtcgcctacctctgtcgatttcacgcctttgaaaaggctcatatgatggatccacgttcaacagggaggggtgttcgtcaatttaaaactgcacttcttcagagacttgaacaggatgagaaaagcacatttacaaagagaatggcaaaaagtgattctcaagagatcagattattttatgagaagaaagagaaagctgatgagcgtgaacttttgcctgtcctggcagaagttctgagggctgttcagattggaactggcaaggagaaacagaaacgcattgctagcgaaacttttgcagataagtcggccttattccgatataatattcttcctctgtatcctggatcaactaaacaaccaattatgcttctccctgagatcaaagttgcagtgtgtgcggtgtttaatgttcgcagtcttccatttgctaacaccaaggatcacaaaaatcagatggatatttttctatggatgcaaagttggtttggattccagaaaggaaatgttgccaatcaaagggagcatctcattcttttgcttgcaaatatgcatgctcgcttgaaccccaagtcatcctctgaaacaatgagcagtagatgaactattggcaaaaacatttgagaactatctgacctggtgcaagtttttggggagaaaaagcaacatatggttgccctctgtgaagcaggaaatccagcaacataaacttctgtacatatctctttatcttcttatatggggagaagcatcaaacttacgacttatgccagaatgtttatgctacatctttcatcatatgtcgtatgagttatatggagtactctcaggagctgtaagcttaattactggcgaaaaagtcagacctgcatatggaggagatgatgaatcatttttgaaaaaagtagtgacgccaatatacaaagagatatatgaggaatcactaaagaacaagaatggagtatctgatcactcaacatggagaaactatgatgacctcaacgagttcttctggtctgcagattgcttcaagcttggctggcccatgcgcctgaataatgacttcttttttacgtcaaacaaaaataagaattctcggcttcccattgttccaccagttcagcaaaccgagcaacaaaccaaccaattgagaacatctcagcaaactgatcaacaaaacacccaattgagaacatctcagcaaactgagcaacgaaacacccaattgagaacacccaatggatcctcatcgtttcaaaatatgctcaatcccgaagcaccggggcaaacacaacagcaaactacaagcgacacatctcaacagaagtggttaggaaagacaaattttgttgaggtccgatccttttggcatatcttcagaagctttgataggatgtggacactccttgtgcttgggcttcaggttcttataataatggcatggcatggattagaaagtcctctccagttacttgatccaataatttttcaggatgttctgagtattttcataaccaattcagtacttcgagttattcaagttattcttgatattactttctcatggagaaccaagagaacgatgagatttagtcagaagctaagatttgctgtaaaactttctattgctgtggcatgggccatcattcttcccatattttatgctagttcccaaaactacttgtcttgttcagctagacgacctaaaacttttctggggatc

SEQ ID NO: 10153 - DNA, 929 bp, Oryza sativa
  ref <308>: DATABASE ACCESSION NUMBER: AK107501
  ref <309>: DATABASE ENTRY DATE: 2002-08-28
acttcttccatagctgcattggcaatttggcatttgctgacaagtgtacaagaccacacagcttttctactacattttcttgggtttcttgaatggcgaatgcgagtgttcctaagccggcgaagcgcctgtcgcgcaagaggagcttcaggctcggcctgccgctgctctgcgggcagtccgacgtggcgagcccacgcggcggcggcggcgccgccgccgccgcccgttcgtcgtcgtcggggagaaggcagggcgagctgcacaggatcttccagcacttcgacagggacaacgacggcaagatctccggcgccgagctgagcgcgttcttcgcgtccatgggcgacgagatgccggcgccgtcgccgggcggcggcggcgccgccgccggctacatgctcgacttcgccggattcgttgccctgatggagagaggtgacagccaagaagaggacctgaggagcgccttcgaggtgttcaacgccgtcgagtccgccggccggatcacggcgaggggcctgcagagggtgctcgcgcagctcggtgacgagcggtcggtcgccgactgcgaggccatgatcagggcctacgacgtcgacggcgacggcggcctcgacttccatgagttccagaggatgatgagctaagtccatggaatgcctcagcttgaagctgctacagcgagtgagtgactcagcgaggtgtttttcagtttcagagtcctgagaaaattatactgctactataggttgttgataagtctgctgcatccagatgacacattgcagattgtttacagggcagaagagttcttcagagctcttttgcttgcctggagcaaatttgttgttgtcatcttgagttgtttggtgtgccacacacttaatccagtgtatcagtaaagttacagttgatttccttctttc

SEQ ID NO: 10154 - DNA, 2691 bp, Oryza sativa
  ref <308>: DATABASE ACCESSION NUMBER: AK107502
  ref <309>: DATABASE ENTRY DATE: 2002-08-28
aattaactccatcgcaacagcatacagctacagaagtatgagtgatacacatgggactggcgcgccgacgtcgtgcacgccgagctcgcacgattatacgaagccggcgctggtggtggtggtggtggtgatggccaccgtctccggcgccatgtcggtggtgggcgtggagcggctgatccgcggccggttcacgctcttctccatggtgcgcttcctcctccgctccaccttcgtcctcatcctcccgctcctctcctccatgtcgcgggacaccgtgcaccgccccagcgtcctcttcgtcctcctctggatgctcctcgtcgagctcatgcgcaagaaggtgtcgtccatggcgcgctcgtcgggcgccgacggcggcgccttctccagggccaccggcggccggttcaggctcatgggccactgcgacgaggccaccaagctcgcctggatcggctggctcatcttccagaacacctactactccgactccaagtgcggcgaccacaaggtgctcgccatgttcgccgtgctctggtccctcgtcgtcgccaagcttctgcagagggtgttcaacgagtggaaggcccaggagtcgctcaccgccgccggcaacactcacctcatcgccggctacatgcagctcgtcgtcgacaaggaggcgaccgccgccgccgccgccgccgccgccgccggcaccgccttggcacgctgcaagtacgtggtgatgggtgaggagaagctcgtcgtgcacgctgtaaagaagaagaagcacgatgtggtcaccaccaccatcaccacccctcactgcggctacggcgtggggacgtatccccaacaccagagcgagcagaagcacgtgaacctcctcgtcgacatggccaagtgcgacgaggtcgtcaccgtgcagaagatcaagagaaagataaagctgccacggtggtggtgctgctgctgctccaccgtcaccggcagccggttcaccgactacatataccagctgtgcttctccttcgccctcttcaagctgctccgccgccgcttcgagcactacccgatggtggaggccgggtcacagacgtcgaggcagctgctgctggaggagctcctcgtcggcggggccaagaagacgttccgggtgatgcgccaggagctcgacttcctcgacagctactacgacgccggctcacccgtcgccatgtcgtcgccatggctgttcatcgtcaactacttcttctccctcgtcttcgtctccacctacctcgccgccatcatcgtcgtcctcgtcgacgtcgagtataacatgggcacgttcaaaagtcatctcccaagcccagggctctacatcgccgtctccatcctgctcgtcgtcaccctcgtcgccgtcgagttcacggatctcctcaccaactacatcctctccaactggttcatggtgcacctcttctgcctgcaagccggcgacggcggcggccgggtctggaggtgggtctgcaagccggcgatctggatgttcatcgccggccgcttcctgctcttctactcgttccagtgcatgctgcggctgagttgcaggggcgtcaatgtcgacaagatcaagctcaagcaggtgtccatcctgcgggtttgcgagccggtccacaaggtcttgacgtggtcgcctcaggtgaagctggccacggaaggccagacggccatcgtcaacttcttggaggacgttgtccgtgacagtctcaaagacgatggcaacgtggccattgtcagcatgcccaagttaagcggccttcaacctaagaaaggtgttgatgacactgctacacaagtcgtcctggcgtgtcacctcgccacggagctcttggagatgaagcatgtcgtcatggtggacaaggaggcgaagaaggagaagaagaagatgaagagggaggatcggagagcccacgacctgcaccggggcgtcgcgacggcgctgtcgcggtactgcatgtacctggtggcgcggtcgccggagctgctgccggacaacgagaggtgggtggccgacaggtacggcgacatgagggccttcctcgacgaggcggcgtcgcgccgccgccgccgctgctgctgctgcctgcgccgccgcctctggaagtgcgggtgctggcgaaccttcctgatggacgacatggtggtcgacgccgcggcggagccggcggcgcaggccggcgtggcgttgttccggaagctgcatgcgcggacgacgacgacggagggcggcgcggtggtggtctccgcgtggaaggagctcgccgacttctgggtccgcatggtcgtctacctcgcgccgtccagcgacgtcgagggccacgccatggcgctcgccgacaacggcggcgacctcatcacctacctctgggccttctgcacgcacgccggcatcatccgcgacccaaacccaagtgacaagtcgctggtgtagtaggcatgcaggcatctgtgccctactactcatcatctctgcagatcgatcgaatgtgcgcagtgtcgatgatcatgacgtacgtacgctaccaatggtgttggtttgattgattgatttctttttcttttttgaaatttccttcgcttgtgtgtttgcatggtttggtgtggtatattgcaagtttagttcgttgattcatggtattgtatgattttcagtttgttttt

SEQ ID NO: 10155 - DNA, 2089 bp, Oryza sativa
  ref <308>: DATABASE ACCESSION NUMBER: AK107503
  ref <309>: DATABASE ENTRY DATE: 2002-08-28
aagccaagtaccgagatccccaacccaacccaagccgcgatgatcctccgcatccgcagccgcgacggcacggaccgcatcaccgtgccggacccggccgccgccaccgtcggcgacctgcagcgtctcatcgcggcgcgcgtcaccgtccccgtcccgctccagcgcctctccctcgacccggcgctcctcctcccctcctccgcctccgccgccctgctcgccgacccggccgccccgctctcctccctccgcctctccaatggctccttcgtctacctctcctacccgcccgacgcccgctcctcccagccgcctccccccaaagccctctccgccgccggctccttcggcaagaagatgaccatggacgacctcatcgcgcgccagatccgcgtcacccggcaggaggccccgctctgcgccgccgcctccttcgaccgcgactccgccaacgccttccagctccacgtcgccgagtcgctcgccttcgctaccaagcgcgccggcttcctctacggccgcgtcgacgccgacaccaaggaggtcttcgtcgatttcatctacgagccgccgcaggtcggcaccgaggacgttgtccagctcatgcgggacgcgcaggaggaggcccgcgtcgacgccatcgcccacggcctcgggatgcgccgcgtcggcctggtgttcacgcaggcagtcgggaggaagaccagcgacactggcgagtacaccatgtccaaccgcgaggtgcttcaggccaccgagctgcaggcggagggcgggatcccggagtgggtcaccgccatagtcaagctcgaggtgggggatgatggctccggtgatgtgcacttcgaggcgttccagatgagtgagatttgtgtgaagctgttcaaggatggtgtgctggagacggagattggggacaaagacgatccccgcctgtccaagatgcggaaagaggtggtggctgggggaaaggatactatggaggtggacaatgacttcttcctggtgcctgtcaagatctctgatcatcaggtattcttattctttcctactctgttgcatagtataatgaacttacagtttactaaataagtttgcttcctacaacatagcaatattaacacttgactgggtagcagcatgtttgaaaccttgaatcatcaggtgatctgagtgggtgctcgttttagtaatttgatgtaaaactgacaatgaaacaacataatggtcagcgaacaaggtagatatgccgcatgaattagaaataaaaatctcccaatacaagagaagaattagagcctttgtgttatccactaaatagtagagtgcctatttgcatgcaagcaattaattcatgacatatttattttctgcaaagtcattatgtttctgttaattttttgattcaaacttcgtagagggcctcctgcactgtcttgaaaaactgaatctctgggtgtaagggcatgatatatgagttctgttcagtgttagactgttagtaaacagccatccacaaatattcataattctagtaataatagatccacttttgagaagtaattaaccactatataagaaaaggagtatgtgtagaaaaattcaggcattttggcacattttttgaagacctactgatttaagtaactgtttcaagaacgtaaagatatagttactcttatgttccatagaactacaagtttttaactacttgttcaaaccacttgcagacacacaaaggccctgttctatgacatgcagcacacatttttgttatttggcatggaacaggacaaagccttgtgtttgtcaggaagtgttgccaaaatgttgtagctgttgcaaacttagcaatgagatctgtggttttttgatagatatgccaaaatatctatagtgtttgtgaaatttactctagaaaagagcatcttatttcagtgatgcatcctagttcatagagctgatctagatgagaatgaatctgtgaatgacgattcttgatatctatgcaactgatatcatgaatttgatgtgattccatttaatttatttcaagagcagaatcaatgggtgatttttagttctt

SEQ ID NO: 10156 - DNA, 1050 bp, Oryza sativa
  ref <308>: DATABASE ACCESSION NUMBER: AK107504
  ref <309>: DATABASE ENTRY DATE: 2002-08-28
atcagctcagaaattcttctgctatactcacccacttgccaatttgccattgccaacaccttacaaagagaggcactcctccattgcaatgctccatggtagctagctagctgcacaccacaaggcttagaaagagtgtgtgagtgagagactgagagatgagcagccatgagaggttcaggctgtcccatctcatgccaaactcatggttctacaagctgagggacatgaagaggcccaggccaacatcaagccggatgatcaccgcagcagatcatgcagcaagaagctccaggagatcgtcgtcgtcgtcaagcagcatccaccactactacctccatggacatggaaccaccactcccaagcctctcccgttgtcaccgccgcgacgatcctactacccctacctggaacgagccaagcagatgccactgatggagaaggaatctcagctcatctcccactcccctctccaccaaagaatccccgccacagccattcccggagaccaccacgacggcgagtttcaagacttgcagctacgtcctatacgcacgaggccaccgtcggcggcggcggcgtcggccgagccgaggaggacggcgagcgggagcggcacgtgcccgagctcgccgaggatgaggagcaggaggctgcacgttctcggcggctgcgagtgtagggctggtagtggtcgccggaggagcggcggcggtgggttcgcggtggtgaaggcgtcggcggagccggcgagggacttccgggagagcatggtggagatggtggtcgggaacgggatgcggtcgccggaggatttgctggagctgctcgagtgctacctgtcgctcaacgcgcgggagcaccacggcgtgatcatggaggcgttcaggggcgtctgggtcgagatcgtcgctgatgctgattgttgcgttgggttgtgagctatattgattctgtttttgtatagttggattgatcgaatcgattgagctgtaaatggatatattgtgccgttaatttttggtgttaatgaatcaagctggcatatgt

SEQ ID NO: 10157 - DNA, 1644 bp, Oryza sativa
  ref <308>: DATABASE ACCESSION NUMBER: AK107505
  ref <309>: DATABASE ENTRY DATE: 2002-08-28
gtcgtcgcgctgcagctggaggcgccgccgctgccgccgccgcggcggagctacatggagggcgccctgtccgcctcgctcggcgggctcgagttcctggagacgctggcgatccgcgacatggcgcggatcggcggcgccatcccggcgagcctgtcgcggctgtcgcgcctcaagcagctctacctcgagggcagcatgctcgccggcggcgtccccggcagcgtcctcagcggcatggcctccctccagtacctgtcgctcgccggaaaccggttcgaggggaagctgccgccggagctcgggtcactcccggggctggtgcagatcaacctcgccgggaatcggctctccggcgaggtgccgccgagctacaagaatctctccaggttggcgtatctcgacctgagcaacaacctcctctccggtgcaattccggcgttctttgggcagcagctcaagagcctggccatgcttgacctcagcaacaacggcttctccggcgagattccggcgtcgctgtgcggcctacgcaacctcactgatctctccctgcgccataacaagctcaccggcgtgatcccttctcagatcggcagcatttcttctctgaattctctctccatggacagcaatctgctcgtaggctcgatcccagagtcactgtttggtctgcagaagctgtggaacctgaacctgtcaagaaacgggttgtcaggttcacttcctcccggaatccgccatggattgccgtctctcgtgtccatggacctctctcacaaccatctcgtcggcggcattgatcacttcttcagaagcatatcaccagcaaggaggctgaccaagaatgcaagctcagacatgtcagtgatctttcttcctcggcaactacaacacctggacctgtccaagaacagtatcaccggagccttgccggagttcggcgccggcgcgagcttgaggtggctggacgtgtcgggcaatgccatcggcggccagataccaagctcggtgtggaggctggtcgggctccagaggccggacatctcccggaacaagatcaggggcaccatcccggcatccgtggcgtcgatggcgagcctccggtggctggacatctccggcaacgcgctcgtcgggaggataccggacagcttcgcccggatggcgaggctccggcacgcgagcttccggggcaacaagctgtgcggcaagataccgcaggccaggccgttcaacctgctccccgccgccgcgtacgccggcaacctgtgcctctgcggcaagccgctgccgccgtgcaggcagatttgaccggcgccgccgtgcgtggcagtgattgctgcttcgccatgggtgacatatatggtgcatttcgatcggtacagcacaagactactttgtgtgagatgttttacgaggtttagagaaatagagtagtagtgcattgtctgatttgtaatatctcctgatcatatactttgtaaatcgggaagttacacaaatctagtttagggtagaggaggatgataaatgttgtggtcgcactgtaaaatgatgacgtggaagtcggtattgggcactgtagctgcgtactaatttcgtttctgtcatacgtatctaattgagttttaatgttttatc

SEQ ID NO: 10158 - DNA, 1722 bp, Oryza sativa
  ref <308>: DATABASE ACCESSION NUMBER: AK107506
  ref <309>: DATABASE ENTRY DATE: 2002-08-28
atagcacaagccaaccaaacaccgcacgatttcgtatccacacatacttctacgtgatttcgtttcgacgatctcgaggcgccgcggcgtgacgtgacgtcgacgacaaccatggcaggcggtggcggcaagtccgtagcggcggcgctggccatggcctgcttcctcctcatcctcgccgccttcgctcccccggcggcggcggcgccgccggacatcatgtcgatcatcaggtacaacgcggagcacggggtgcgggggctggagcggacggaggccgaggcgcgcgccgcgtacgacctgtggttggcgcggcaccggcgcggcggcggcggcggctcgcgcaacgggttcatcggcgagcacgagcgccggttccgcgtgttctgggacaacctcaagttcgtcgacgcccacaacgcccgcgccgacgagcgcggcgggttccgcctcgggatgaaccgcttcgccgacctcaccaacggcgagttccgcgccacctacctcggcaccacgcccgccggcagggggcgccgcgtcggggaggcgtaccgccacgacggcgtcgaggcgctgccggactccgtggactggagggacaagggcgccgtcgtcgcccccgtcaagaaccagggccagtgcggtagctgctgggcgttctcggcggtcgccgccgtggagggcatcaacaagatcgtcaccggcgagctggtgtcgctgtcggagcaggagctggtggagtgcgcgaggaacgggcagaacagcggctgcaacggtgggatcatggacgacgcgttcgccttcatcgcccggaacggcggcctcgacacggaggaggactacccgtacacggccatggacggcaagtgcaacctcgccaagaggagccgcaaggtggtgtccatcgacggcttcgaggacgtgcccgagaacgacgagctgtcgctccagaaggccgtggcgcaccagcccgtcagcgtcgccatcgacgccggcggccgcgagttccagctctacgactccggcgtgttcaccggccggtgcggcaccaacctggaccacggcgtggtggcggtggggtacggcacggacgccgccaccggcgccgcctactggacggtgcgcaactcgtgggggcccgactggggcgagaacggctacatccgcatggagcgcaacgtcaccgcgcgcaccggcaagtgcggcatcgccatgatggcgtcctacccgatcaagaaggggcccaacccgaagccgtcgccgccgtctccggcgccatcgccgccgcagcaatgcgaccggtacagcaagtgcccggcggggaccacctgctgctgcaactacgggatcaggaaccactgcatcgtgtggggatgctgccccgtcgagggcgccacctgctgcaaggatcactccacctgctgccccaaggagtatcccgtctgcaacgccaaggctcgcacttgctccaagagcaagaacagcccgtacaatatcaggactccggcggcgatggcacgaagtgttccggaacaacctgattcaatctcttttgtagttttgaatagggaagatctagtatagaagccttatctttgttactgttaccgagtcctttattattatcgctctttttttttcgcaagatgtataaagtcctaaacagttactgttactattactgaagttattatctatctttggatatgagttctcccaaac

SEQ ID NO: 10159 - DNA, 894 bp, Oryza sativa
  ref <308>: DATABASE ACCESSION NUMBER: AK107507
  ref <309>: DATABASE ENTRY DATE: 2002-08-28
acaattaattcctcctctttctccgcccaagaaacccacaccaaaaacatcttcttcttcttctccgtgtcaaaacaaacactgtttctctctctctctctctctctctctttctctgtgttcagagccaagaagtctctgctctgcatgggtcaggaagaagcagcagccgcgccggccaccgtgatgttctcgtgggagcaggagctgggcgtgcccaagcagaagatggcttctgacgacgacatgcccgagagccccaggaaggcgccgccgccgccggcgcggcggctgtcggtgccgccgcctccggggcggatgctgatggcggggagcaagagcttctccaaggcccgggccgtccggccggaggacgacccgttcttggcggcgtacctggcctgcaccaagagcagcaacggcggcggcggtggcgttgcgcgggagagcaaggggcagaggcggtccagatgggccgggcttgggcttgggcttgggctcgggctctcttgcaagagctcaaatggagttgtggaggacagcatggtgaagatggccaaactgcctgaggttcatcctagggatgcttagtgatgatgatccagttaaatatattctcatcttctaccagtctaaaaaaatcatcttctgtctcaattctcttgtttgttttctttgatttgtttcttgatttggaatttttagtgatggtgatcaagacttgcttgcctgcttggtacttaggaattaattagaggtatagaggaaggcacatgtagatgtgtgcttgtttcatctttctttgcaaaatggagcatatcatttgtgcaggagattatcaagctcatctgtctataagttcaagattgtgtgtgacttgcatgctcttttctc

SEQ ID NO: 10160 - DNA, 729 bp, Oryza sativa
  ref <308>: DATABASE ACCESSION NUMBER: AK107508
  ref <309>: DATABASE ENTRY DATE: 2002-08-28
caaatatcgcaatatacacgcaggacgtggacatcctgtggttccgtgacccgttcgagcagatgtcgatggcggcgcacatggtgacctcgtcggacttcttcgtcggcggcgcctacaacccggccaacttccccaacacggggttcctgtacgtgcggtcgagccgccgcgcggtgggggtgatggaggcgtggcgcgccgcgcgggcgtcgtacccggggaggcacgagcggcaggtgctgaacgagatcaagcgggagctggtggagcggcgcggcgtgcggatccagttcctggacacggcgcacgtcgccgggttctgcagcaacacgcgcgacttcgccacgctctacaccatgcacgccaactgctgcgtcggcctcggcgccaagctgcacgacctccgcaaccttctcgaggagtggcgcgcgtaccggcggatgcccgacgagcagcgccgccaggggcccgtgcgctggaaggtccccggcatctgcattcactgaagaaaaaaacaaaaggcggttagcttgttagtgtagatgggtgtttttcacgaacacgtaaaaagattgtacgtgtatattcactgccacgcgtgctgtgaggaagacggatggaaaagaggaggggcggggggtctatacgtgttcttaaattagttcggtgttgcattatcaattgtttgcctggccaggtgtataactgagctgagatatatattcc

SEQ ID NO: 10161 - DNA, 513 bp, Oryza sativa
  ref <308>: DATABASE ACCESSION NUMBER: AK107509
  ref <309>: DATABASE ENTRY DATE: 2002-08-28
cttttcctctggctggccgcgcggagcccgcaccatgcccggagtcacggtgaaggacgtgaaccagcaggagttcgtgcgggccctggccgccttcctgaaaaagtccgggaagctgaaggtccccgaatgggtggacacggtcaagctggccaagcataaggagctggcgccgtacgacgagaactggttctacacgcgggctgcctccaccgcccgccacctgtacctccgcggcggggccggcgtgggatccatgaccaagatctacgggggccgccagcgcaacggggtcatgcccagccacttcagccggggctccaagagcgtggcccgcagggtcctgcaggcgctggagggcctgaagatggtggagaaggaccaggacgggggccggaagctgacacctcagggacagagagacctggacagaattgccggacaggtggcagctgccaacaagaaacattaggacaaaccatgccagattcattaataaattgccttgttcgt

SEQ ID NO: 10162 - DNA, 734 bp, Oryza sativa
  ref <308>: DATABASE ACCESSION NUMBER: AK107510
  ref <309>: DATABASE ENTRY DATE: 2002-08-28
aaaaatcccctccctactgcggcgaatccaaatggagcaggctcgagttcctccaagccatgggaaggcgccgcgacggcgacggcgacggcgacggcggagaaagcggggtggccgacggccgacgagcgtggcgaccgggcggatggagcctgcactagctcgagtgatttggcaaactaattgtgaaactgagcagcaaagcactgcatgtcattgtgatcactgtgttcatggattttatcaccatcacagggccttaaatgaacaagcgtcatattgcagactcttctatgcaacggcacatacacatcagcttgccactacatccagaggtttctgaattgcggctaatttgatgatttgattggtgctagaattcattcaagttatgatcttgagcaatgttctgccgcaaatacttcaaaaatgttcttgtagatatgcctgggctcacattcttcacggacatacgcaatttcgcttctattctgggccgagatttattgtcaggcgcatgcaatgtcaaatgatgggcttgggccgccttttctattggatcaatgctgtgtggtctatgcaattcaggtaatgtactgcataatattttcctgttggactcgatagttttgatgaattataattcacatgtgaaacatactgcttggcattttcgttgggtggaccttttgaacttaactgcatcttaatgttgtatagaataaagtttggat

SEQ ID NO: 10163 - DNA, 1990 bp, Oryza sativa
  ref <308>: DATABASE ACCESSION NUMBER: AK107511
  ref <309>: DATABASE ENTRY DATE: 2002-08-28
agtttcgcccaccaagcaccgccgcggccgcggccgcctcctcggcgtcccgccgttgcgccgcgcgacgccggcgggtaaccgggcgccccgcctccccggagatgatggccgaggtgcgtacgcgatcctttccagaagcttccgttccatctgtggagtcccacaccgcccgctccatcccatttggtacccgccggctcgccgccattgttgcccctaactaaatccgagaaccggggggatcattctggaagtcttggtcctgcgttgtcaggggtcatcagcgacgcggaggctgcgaagagggggatgattattgcaggagggtgtggtcgtgtgcggtttatcgatctgcggcggtaagtaggttaaatttagtactaggaaattggattgcctcatcctgtggttgcatcattgccccctgggaggctgggaattttgcgcctctctcattttacactcaagtgcctgcgcacaaatcttgtcagggaaaagctatagtaaaattccatgtcgttgggtgcaaggaagaagcaataatctatttagattgatatggcagtgaagcttctgatctagtttattaactatagtgtaatctctctatgaatgggtctaagttggaaggtttcagttgaaaattggaatattcaagttgaaagttttgaagtttgtgctagaagctatttttagatacggaaatccatcggttggctaaattagtgaatattctgcttcctaagttgaaatagggatatttaatagtttgaatgctcagtttaaagtgttaaagtttgttttgcaagctcagcttactagctgaaagtttcacatgttatatagccttataggtattctttcagttctttagaaattttcactagttggtaatagttctcttttggtattgacataatagaacaatgataattccttcactaagttgattattctgattcgcattatatgtcttgcttatcagttcagtttgttcttctcaatgtttccggttgcaggtaatttctggttatggcagtttagtgtcatcatgattactgcctacagtgcacttcaatatttaccactgcatgtctttcctaattcacaccagtggaaaaataaatttacctatgataaattgattagtgaattgaaatctggtgtctattttttagtgtggttaatttgataggcctatcctaatacattgggcctatgtctttttaatgaacaggaatctggtatccaagtgtgcttaattaaacaaaccaatcctaatacattccattgatgacccatttactctttctgaaactttactggcacatataaacacttcatttcatttcccccactttttacatcacccttcatgaccatgttctcattcatacaacatcttattctgttgtattatctattctcaatattgctaataagttccttcttttttaaaatcttcagatttaactgaaaacagcacctgctgacctctgctttctgacaacaaactaaaaccaggcactgttttactggctatattgagtaccacatgtatagtttgccacagtgaggccttagcagtttctctgtgtttcgtacttcaactttttttatttgaaaataatatatgtccttactttcttttctataatgaagtttgttggcttcaagtgttttgagtgccaaaggggacgatacactggtgcctctgagaaatttgtgaagtactacagatcactttaccatggagaatgggtgagtacactgctaccacttgccattttaaactgttgtggcaaacgacaacttattcagctagtatcaggataatctcttttttttcacatgcattatttctgaatgcaaaacatgtcagatatcgacttgggtacacaataccaatgataaggccatgtaaaactaacaagcatagttgtttccacttaccaattaacacatgatttgatatcagaaatttgtt

SEQ ID NO: 10164 - DNA, 1901 bp, Oryza sativa
  ref <308>: DATABASE ACCESSION NUMBER: AK107512
  ref <309>: DATABASE ENTRY DATE: 2002-08-28
gtgcatcagacagcttaaagatcaatctacatgcatgcagagcaaccatgccaaaggcatcacctttcctctccctcctcctcctcctcctcctgatcaccatctacattgcccatggcgccgccggtgacgccatcggcggcgacccatggcaggagcccgaggtggcccagcagccagccgtcgtcctcgccggcgagtggcagctcctgcaccagaacaccggcgtctcggcgatgcacatgcagctgctccccggcgactacgtcctcatgttcgaccgcaccgactccggcccctccaacatctccctcgacgcgctctcgccgtgcgccgccgcggcgaccaccgccctcgccgccggcggcggcggcgccgttgactgcaccgcgcactcggtgctgctcgacctccggtcgaacgccctgcggccgtacccgctcgccaccaacccatggtgttcgtccgcggcgctgctccccaatggcacgctgctgcagaccggtgggttctccaatggcgaccgcatcgcgcgcctcttctcgccgtcgacggggtgggtcgatctcccgtcgttcttggccgtccggcggtggtacgccaccgacatcctcctcgccgacggccgcgtgctcatcctcggcggccggcggcagttcaacttcgagttcttcccccacgacgacgcgccggcgccgcagccgaccttgttcccgttcttggaggagacgaccgacatggacgccgaggacaacctctacccgttcctccacctcctccccgacgccaccgtcttcgtcttcgccaacgaccgcgccgtcgtgttcgacccctacaaccgcgtcccgctccgccgcctccccgccatccccggcggcgtgccgaggaactacccgtcgtcgggatcctccgtcctcctcccgctccggccggactcgccgtcgcacgccgaggtgctcgtctgcggcggcgcgccgcgcggcgcgtaccgcctcgccctccgcaacggcacgttcgccccggccgaccggacctgcggccggatcgcgccgaccgacgcgaacccggtgtgggcgatggaggagatgccgctgccgcgcgccatgggcgacatggtgctgctccccaccggcgacgtgctcatcgtcaacggcgcggcggccggcacggcggggtgggagctcgggcgcgagccggtcacctacccggtgctgtacaagccggacatgcagctcggcgcgcggttcgaggtgctcgccgcgtcaaccatcccgaggatgtaccactcgtcggcgacgctggacacgctcggccgcgtgctcgtcggcggcagcaacccgcacgtcggctacgtgttcgacaacgtgacgtacccgacagagctcagcctggaggcgttcctaccaccatacttcgacgcacggctcgacggcgtgcggccgcggctggtggcggcgccgtcggaggtcgggtacggggaggcggcggcggtgaggttcgaggtgcccggcggcgcggtctccggtggccccgaggaggtgcgcgtggcggccgtggcgccggcgttcgcgacgcactccttcgggatgaaccagagggtggtgtccctggccgtgggcaccgtcgcgcagctggccgccgggctgtacggggcgcaggtggccgcgccgccgtcgccgtcggtggcgccgccggggtactacctctggttcgtgctccacgccggcgtgcccagcaccgcggcatgggtgcgcatgcggccgctcggtgcagcgacgtgatgacgacgacgacgtcgacgtgtgaaccagtcaactgccacgtctcactatttttctctctcaaaaaaaatgaaaagaaaaagaaatggtcaactaccacctactagtagtactagtaat

SEQ ID NO: 10165 - DNA, 744 bp, Oryza sativa
  ref <308>: DATABASE ACCESSION NUMBER: AK107513
  ref <309>: DATABASE ENTRY DATE: 2002-08-28
atgcattcttggccagttggcctggttagttcctgcaacaaacaaactctcagctaccacaccaccattgcatatttgcatttcaccaatggagaggtcagcctcctacaccgagaagagcaggagcgccgccacggtggccggcgccggcgccggcgacttgaggtgccacagcgcctactacgtcacctcgacgtactctgctcctcctcctcctcctctctggtacgacgatgccggcagcggcaaggcgagcaagatcaagaagaagaaggcggcggccacctggccatcgtcgtcggcgtcggcgtcgacgtcggcgtcgaaggggagggtgtggggcgggctcggcgacgcggcggagatgcagcggcggcggagggtggccggctaccgggtgtacggcgtggaggggaaggtgaaggtgtcgctccagagcagcatgcggtggatcaagggcaagtgcacccgcgtggtggacggctggtggtaataagctcatgctgctgcctgctgctgctgctgatgatgatgatgatgaattggtggtgatcactgatcactactcatcagattattattcagatatcacttatcatcagagttgtcaagagattaaaataagtttatgaagaaaaagattcagataagtgtttgtgttttcttctcctgatctcctccatatgcagctcggctgcagtaatctgttgtaaggtaggatggcaatgtgagtgtgatcatgct

SEQ ID NO: 10166 - DNA, 2769 bp, Oryza sativa
  ref <308>: DATABASE ACCESSION NUMBER: AK107514
  ref <309>: DATABASE ENTRY DATE: 2002-08-28
ttaaaagaaaaaagcctcttggcctcttgggcgacagtggaggaggcgaagctccggcggccgaggtgctccggcgacggcgagttccagttccagggtttcgtagcaagcaaaatcaggagggccatgtcgtcgtctctgctgcgctcgtcgggcgccgtcgtccgtcgcgctctctccgctgcctcctcctcctcgggacatcaacacgggcgcccttccttccgccgtgccatctcagcggcagccaccgcgtccgcccgccgcggccttgcgccgcccccaaccctgccgtgccgcaacctcacagcgtattcttcctgtgcgacacatagcagtaataaaaaggtgatgccttccatccaccacagtttctatttatttttttcccccggggtaaggttctagttcaagttgtcactgaatttctgcgtgaaggttgacaggattttgatcagatcgacagggaggggattattatatatactctagaaatttaagggttttttttttgtgtgtgtatttatgtttgctctagaacttatagcatcgacatatatcaggaatcagactgactcgatcgctcgccaaaataaattgagtttttagtttggtgtgatgtcgggtcccaaccaaacatgaaccgcggtctgttgttctacacgtatcgatgcatgtaggcctaacttaggagaagaattgattaaataataagtgtaaaaagtgaacatttgtcaatgactaattaagtattacattacatattataaagtttgaaaaatgaatttaccaaattatttcaacaaatgtggatgaagaaagttttttggttgcaaaaaaacattgtttaataacttgggaagcgtgctcgtgcaaatcgagggagttagtggcggagctagaacttttccaaatctagggctaaattagttgaatttatataattttaccggggctgtctacagttcgggcgcccgacgatttggagaaaaaacgggcgctgacgtcaacgcccgatttacgtgcaaaaactatttaaactgatttttctcttaaattacttatccaaatcatgatccgattgcaccattaaattcgttgcaattaaatcttcaaaacaagaccacacatggatatatttcgatgacaatttttttagcttattattgaattatttttaaatgttgcacgatgttcccccaggtatatcggaattgtttcactaagtagatcaaaaatgtttcactcatttaaattgggtgttgtttcacctcatataaaaacaatgtttcagccaatagcgaaagattgtttcagttcactgcaacatttgatccatacatagtgaaacattataagtgcactaggtgaaacattttttggtggaacaaaaaataaaacgaattcccttaatagagggtttccaaaatatgtgggttttttgtcgcaatggaatatttcggttcactgcaacattagatctatatatagtgaaacattgtgagtatactaggtgaaacatttttggtgaaacaaaaaataaaccaaattcccttaatagagggtttttaaaatatgtggttgatttgttacaggtgggggcaggtattgtggtggggtcagtgacatcaccgtgcgcgcgggggcggggggagcgaccgatttttcctctcccagcccggtcacccgacggccatcatttcccaattttaccttttgtcttctaggttttgaagttttaaaataaaattttaatgaatatttaggagcaggagtagctgcagccctagctgccctactcccgtctgccaaccatccaagtcaaatggggctttgctcgtcctcatgttatgggataagatgacaatttcagtagttgctacttgctcatgtctagatacaggacatttggttaattggttaccttgctagtcctttttcttttgtttgctttaagggatatatagtttgcatctaggactagtcgttcataaacattgtcagcagagagatatttctcacagtaacaggaggtcaggtcgtggagaagttacaatagagatgatgtgttccaagttgtgaaccttgccattctggcatgacgtcacaacagagatcatgtgcccattttatttcagaaacatgtttacttcttctatttaacatgcagggtatgcctaattgtctagtttgatagtaatgctgttgctttcatgaatcctccaccagagtataacggttcaattcccagagccatatttataaataattaaatttcgtttatagaaggcagattgcagttgatgactgtgaattctcaaccattgttgtttgttgtgaaggacgacaagactgatctgaagctaaaaaaacaccttcaagaactggagcaaatgcttgaccaaattgtcagtgaacatgtgaagctgcacagattagtgcacagctctgaccgtggctattttgagaggcttttgagcgaacatgggtggcccaaatgcaaacctcgtgatgtttttgtttggagatgtaggcttacaactatttttgttgcatctgtcatgatcggttacatgttgcctgaaataggatatccgtcgtaaaatgctgtgaaggaacaccctacatagttgtttgcagtcgtgcagatgtacaggcgatggacacttctcgctatctacagtagtacctaagacatgtaaatgtgatgcacttttcaaatctttctactccctccgtcttattttaaatgcaacaataagtttctac

SEQ ID NO: 10167 - DNA, 1694 bp, Oryza sativa
  ref <308>: DATABASE ACCESSION NUMBER: AK107515
  ref <309>: DATABASE ENTRY DATE: 2002-08-28
gaggcgcaacgcaagcgcgatgggctacggcttctccaccaagctcacggccttcttctggccatggcgcttctcgccgtggcgcttctcgccgccgccctccacgccgatgccgcgcccgcatctgccgcccccgggagctccttccccgacgcctatggcgaccgcgcccgcgctgcacaacttcccccacgcaagcagcagccgcaggtcgcctacgctctgcgacgggcttccgctacctcatcggcacatctccacggcgccacctcccggtccttcaccggcgtcgccaccgaagaccattgtcaagctcgcatcatctattggcacggtggtccctgtggctttatctatagtaccatatttctaccaagtctacacaggaaattttgagaggacaatagaagtgtatggtgcccccgccatgttggctggatcaattaacagcataatttggttgacgtattcaataatggccagcaaaaaggatcttaaccttgctcttatcctgatgcatgcattactttgcatgtcgacattcacttacttgatgtgtatctgtgcttgtaaaagagccactaaagagggttatattcttggagcctttttcataggatgcttatcagccatatccattgttgtgcactgggacttaaacccatcgaaggttgtgaagattatattcagatgttttggtggaattagtttgctgtcttgccactatattctgctgaatgatattttggggagtgttcccaaaagatctcagaaagttgctactggatttgaccttattctaagttgtataacgaacttggtgactttcatcataacttttcatgatcatcctgagcacactacttctctgatcacttctggagtagggtttgtcctcaatgttgtggagatcgtacttcttgtcatagtaacaattatgggctacttctttccattgtctgagcatccagatgctgatgttgaagcgtcacgtcacatatcagccacaagagttactggtgtaggcatgataccacttgaagatgcactaggaacccctgaaactgatgattttatagctgtactcactcatgagccccaggtgccccagttcgaggtctcttacctgattttgcaagtgaggaatgagtttgaaatttactctcttagatccatggtgaatcccaatgtacaaattattactcgagtgctttttgtagaagtaattcaaaggacaatgatgcggattgagcgtgaccactacattcaaattcttttacaagcctcggggatagctgctgcagaaccatacccattgatgcttagggatgttgaaattcactaccagaccatccgtaatcagcatgaagctctcccgtaatagagctgcaacactggcatgcacttcttctcagttaatgattgtctttcattacttcttctcaatgctgtaatgctagtagattaatactatcttaatgtgtgacacaggtccggtgccaaggcacagaaacttgaggcgaagagatatgacaactgattgaactgagttgagcgtataggagtggagatgtgacgacagaattcagaagagagatgtgttctccgtttggatgttgcagtagtatgcttgtacggttctaccacatactactccgtattgtagtagtatgtcctcacaaatgagcccttct

SEQ ID NO: 10168 - DNA, 1485 bp, Oryza sativa
  ref <308>: DATABASE ACCESSION NUMBER: AK107516
  ref <309>: DATABASE ENTRY DATE: 2002-08-28
attttccacgcccctctctccattcccccaccttttccagcttctcgtcgcaatcgcaaccgcctcccaaatcacacaaaccccaaggccaaaaccctcgcctccaccaccaccaccaccgccgccgccgccgccgcgccgccatgaagggccccgtggaggtcaccttcctggacggcgacgacgacagcgacgacgacgaccggtggtactacagccccaggagggaggccgtcctctgcatcggcgacgacctcgccctcgtcgacgtcaccttccccgtggacgacatggacaccaacccgtggttccgggggatcgcgcagctgtgccgcggccaccgcctccgcgccccgctcgtcgtcggcctcgtcgcgctccgcggccgcgcgccgccctacaactggtgcccgtgggacgcgagcggcgtgcgcggccacccgcgggacccccgcaaccccatccgctgcatcgcgatctgcgtcggcggctcccacgccctcgtctaccagccctgctgcgaccgcggcagctccaagtacaccggcggcgtgctgcctttcagcgagggaggctgcaagatggcgcggctccgcgcgttcctgcgcgacaggcgcgtcacggtggcctgcgtcggcgcgcgcgaggcggcggagaagctcgcggaggagtgggaggtggacgtggcgcggccggtggagctcacggatctgttcgcgcgcgcgttcggcaaggtggccggggtggacacggtgaagccgcccaaggagccggagccggataggcggtggatgaccacgtcggcgctcctgagggcggaggccaaggcggaggcggaggcggccaaggagaaccactacagctacagcaagcgcgggaagcggccggcggcggaggtggtgaaggggctgagcatggagcgcatggcgcacgtggcgctcggcccggagatgcggctggcgccatggccggagaaggcggccgacgcggactggggcagctgctacctggagaagagcgactggaagtacgcggcgcgcgacgcctacctctgcttggagatcgccgccgtctgcctccagaagctcggcgcgcccgtcggtaactgatcctctctcccctctccggcgagcctaccatttgtcgtgttcgtcactagaatgatcgtggtggtggtcacgaatctgatcgatcttgcatgcttacgagcgatgattagtcaggtcaggtctaagtgatgggtttagtgtagttaatcgttggattacaggattagtgctaatgcagatacggtatatgcctcagtcagtatgtcgtaatggaataatctctagtagtgtcgtggtattatggtaagtaggtgttgatgggagcttgttgcatggtgacggtattacttggatcatcggattgcggacttgagaaaattgagatgtgtggtttggtttctgactgtttgggactatttgatgattttacctgttc

SEQ ID NO: 10169 - DNA, 1553 bp, Oryza sativa
  ref <308>: DATABASE ACCESSION NUMBER: AK107517
  ref <309>: DATABASE ENTRY DATE: 2002-08-28
aaaaccgcccaagccgaagctagaaacttagaaagagcggagagggtgagggagaaggagagagctcgatcggcggcaatggacgagtgggaggagcttgcgtggagagtgcccgagacgctcatgctagtcagctgcgagatggaagccaccaggttgatcgaagtcgcccacagcaatctacaagtgcgcggaactttgttccgccggatacacttgggcatgccggcggccatcgccatgaacctcttcggcgacccggccgccgaaggagtcatccccaccgagatcctcgaggaggcccgccgcgagatctcgcagagcggcgctcgccacgggaagaccaggcacgtcttcgctcgctacgtcgtcgcgcacctcggcgtccagcaagatgacccggcgtaccgcagctgggaggtccaccaccaggacgccatccgcttcaccgataaggcgctggagaaggttagcgaagccgcgtcgcatgccgaggcggccaaggacgccgtcgacatcgccgagaccctcctctcccagccccagcccccgctccagctgtgggcagagtggacgtcggcggccgagaagctcgtggaccaggccgctttggaggccaccctggcgctggacgaggtgctccgggcgcgccaatctgttgctctcgagttcttcgacgccgtagcgattctgcgtcgcggaagagctccaccggcggcggtggacaagtggtggcaagagattgagaggacactccctggagccttcctgctcgtcgccaccggcgggctgaaagcgctcaggttgatccgagatgcccatggcaagctccaggaacgcgtcgctatgctgcgcgtgaacttacgccaggagacgccggcggcggccgtccccgtcgaaggaaattctgcctaccagctggatcccgagggaatctgccccaccgtggcccttgaggacgcccgccgcgagatctcgcagagcaccgttctccacgcgaagacaaggcacgtcctcgctcgctacgtcgcgcacctcggcgcccagcaggatgacccggcgtaccgcagctgggacgtccaccaccaggaagccgttgaccacatcagcaaggcgctgaagagggtgatcgatacggtgtcaaacgccgaggcgggcaaggtcgccctcgtcatcatgggtagcgttgcctacaggtgcccgctgtgggatgtgtgggcatcggaggccgaaaaattcacggcagtcgctgccctcgaggccactatggcaacgaatgagatgcgctgcgctcaggaagccgttgctcaggagttgtccgatgcctggacgattctgttgtcaaggcgaagaaactgaactagctgcaccggcgcatggtgaacatacggctcagatttgctactgatctccacttttgctgttctctttcagctgaaatgaagtcctatactccttttttctactggaaatgggaaggacgactttggtcctctgattcttcaagagttctagttgtagcaatacattaagacttagtaccaatttgcttt

SEQ ID NO: 10170 - DNA, 735 bp, Oryza sativa
  ref <308>: DATABASE ACCESSION NUMBER: AK107518
  ref <309>: DATABASE ENTRY DATE: 2002-08-28
cctgctgtttcactttcacctcgccgtcttggttgtcttgccgtctttgctgccccgagctcgagctgccgccgcggctgattcctcgtggcacccgaatcatcctcctacacgacgaggccaccacgtcggcggcggcaatgcctcgcctagcgccgccgccggccacggcctcccgccactctccgctcccgctccggcgcccatcgccggcgccgacgacctgccggcctttggccgcgctcccaagcaggcacccccgcacttcggcttcccgctccagccgaccttcggcgtcgcggcgccacctgtcgccccgaccgccgccggcgagggctacccgttcatcggcagcaacccgacggtgccgctgcccaccggcatgaccgacacctccaccgtgctcccgctcccggaccgaggcgacggcaacgacaaggtggtggggcgtgctgctgctgctccggttcgtgctcagatcgccatgattgggcttgtggctaccatctccatcttgttcttgtcggggaggagctgaccatcctagcctctcctcgattgatgcactctgtagtagaatttgttaatttgcatgaaccaagaaggagattagatataaacctgtcactgcttgcttgcaattgcattgtctgtaaatatggtttctgtcgctgtgattcgtactcagctcccagcttttgttcaaagcggcaacgaattttacctttctttgac

SEQ ID NO: 10171 - DNA, 2145 bp, Oryza sativa
  ref <308>: DATABASE ACCESSION NUMBER: AK107519
  ref <309>: DATABASE ENTRY DATE: 2002-08-28
taactttaatctacagtacttcgaggaacttatgcaagcattgccttttgccatgccacacaaacaaaaaatgattttttttcttctaaaaatagcatataagctagttgtaaatgatcatcttcatcatgcatgattaatattcataataacactttagacagaaacaaattgacataggaattattatattcacatcacaaaaattaatatcttgtcaactttcagcattcttaaacatgttgcacatgacatgaagtataatcttatgaaaacatgttgaactgaactaatgcaacaatccatttcttgttgtacatacataaaataaaaccagtgaacattataatgcacaaagtttcagactcaagtgtataacagatatatggtgaatgtagaaaaggatgaacacctcaaccttcttctagtttctctctctagaaattagaacgtgtggaagcacaattcagccttgaaaacactaaacacttgcttgctagctactggtaatagagtgtgactctgaaatctgaacttactttgtagacagatccaaaaccaccttttccaagcaaactttcacctgagaaattattagttgcatcttttatgttagagaaatcatacagtttaaagcccaggttgccctcttctaacctccagagagttattatattctgcattgccatggacagccttcgcagctccgatcttactcaccacgagtaagaactcacagggaaatgcagcaatcaagaactcaccacgcccaaatcaagaactaatgatatggtttaggacgtgcggcggcggcggtggcgaatcaagaactcatccccacccaaccaagaaaaaaagctcattccccatctgatcaagaactcactaatcctcacccacatcaagaactcaccagatcgagcagaatacgaggaggacgacgacgaatcgcggcgacgacgggaaagggagaaaagaagaaaaccctaaccctatctttggaagaggaggggagaggggaaaaggctgcgtgctcaccggagagaagatggcggccggaggagagtgccgtgtcgtcgccgtcgcctccgcgtcgcgccgcccccaccgttgcgccacctcgaatcgcctccgcgtcgtgctgccgctacgcgtgttgcacgtcgcctcctggctcccgtcgtgaggaaattttccacgccacacgagaagctgattttttcccgggcctaggtgagggggaaaggccgggataggccggggtaaaacccagactgggcttaaccgaacacacaatttcggatgggccgggattgtttcctcgccggggtgatccacggggatcggtccccgatcccggccgggaacggcccaaccgaacaaggcctaaaagtggtggaagtatttcttcatgatttctccatgtatgaaggacttgtacgaaaaatatgaaggagtttgcgtgtcctgcatgcatggcctcaccgcccataccagttgataaaaccggacacgaggggacctcttgttttattcaaacagggcaatgaccgttggaatagagtgctgccagtctcccttgcccaattgagaagccctgctccgaatggagcaccgtgtcagtatcccaaggagcaaaaaaaattttgaaaaaacggagaaaaaggagatggttaggggagttattgattgatgatgatccagacgaattgattggctcttttgatgcaaacgttgatgataatatgcatgaagatttttcaaccatggttgctcctccaatccatggagaatatacaagtcttttgtttggacttgatcaagatgccatggctgctcggaagttatattttgattagatatgaaattatggaacatgtaaggagtagtcgtgctttggtaattatttattgacatgagactgtagttttgctgtgccagcagcctagaccttctttgtctctgtatctagatacccttttagcagccagctgagagccttggtgctcctcgtgattggtttgaaagctggaattctggaaaccccgtcagtttgtattttccttttcccttttgtttctttaaatactgtatgaactcttatgctttcaagtaaaagctggacggggtaaccgtcttttgtct

SEQ ID NO: 10172 - DNA, 885 bp, Oryza sativa
  ref <308>: DATABASE ACCESSION NUMBER: AK107520
  ref <309>: DATABASE ENTRY DATE: 2002-08-28
aacagcagcagcgcgtcgccgtgctcttcttccgtacagcaggcatgcgcccgacgcagcacagggattgtgaaaagctgggttgggcggcccggccgcggctggctagcgacacggatggccagagagaggccgcgacgtcgcccgatcgctagtgtacggagaattgatggagtttcatcgacacgcggggggtgcgaaaggctgctgtcgcctgcgcgatggggggcgcaggcggcagacgcaggcggcagctagcgcgcgtccacgcatcggtgtatcgcgcaggcggcagctagcgcgcgtccacgcatcggtgtgcgctccccgccgcgtggccggtggtcaatccgcaccgccccccgccgcgttctcctcctggcgcgtttcaagtttcctcgaccccccctccccccatctgcacatcacggtgcggtttttaattttgatagagtaaattgtacttttggttcaccttttattacccaagttttaatttagaccacccttaaatatattttttaaatttagaccgggtaaatttaccattgttacggtttggactattatgaacaacttttctcgtcatgtctaacttccctttcggcaaacatatgaaccacacatagagaagttcggccgtatactagagctaatgtgtttaacgtcattaattgtacttaaaaaaattgttcgtggtggtccaaatcgtaacaatagcaaatttattcggtctaaaatgaaaagatatgtttaagggtggttcaaagtaaaacttaggtaataaaatgtggtccaaagcgtaattcactctttttgataagagtactgtagtaaggtttggttggatttcggaaacaagaacatatgctgccgcatacgtat

SEQ ID NO: 10173 - DNA, 1750 bp, Oryza sativa
  ref <308>: DATABASE ACCESSION NUMBER: AK107521
  ref <309>: DATABASE ENTRY DATE: 2002-08-28
ggatttctttagatgcagcaatgatggaagtcactggtaggattcttgctccccccaccctagaacttggcactggcacctccagaggccagaccttcaaattcactattcatcaggatgactgccagtggaactggaagcttaaaaaatacgataaacgagtagtagcacatggcgggactcttaactgctggggcgtcgtcgatttcagtgaaggcgacctagagagcaagtttattgacaaggttgtcaggaagtgctccgcccttggcatggtcatgacccgtaaaccatgctatgagcatgtgtcaaatatggaagtgctatccgatccaaagagcctcagagatgcgcttatcgaagcgaagcgtgccgcggaggaggaagacaagaagctgcagctcctcttctgcccgatgctcaaccggtgccatgggtacaagaccctgaagttgatgtgcgagacggagctggggatccagacccagtgcttcttgagcaccgccgcaaaactcgacgaaaaacgacaggaccagtacattaccaaccttgctctgaagatcaacggcaagatcgggggtagcaacatgcagctcgacccggactcgatcccagtggtgtccgccaaggatttcatgttcatcggtgcggacgtgaaccaccctccgcctgggaatgtcagtaaggacatcccgtccatagcagccgtggtggcctgcgttgataaaggcgccagcaagtacgtgacaaggatccgcgcccagtatcaccggtgcgagatgatccagaacctcggtgatatctgcaaggagctcatcggcgcgtatgagaaggtaaacaagaagaagcctgatagcatcatctacttccgcgacggcgtcagtgacggtcagttcgacatggtgctgaacgaggagctggcggacatggagaataagatcatggtgggtgactacccgaagatcaccgtgatcgttgccaagaagaggcaccacacgcggctgttccccaaggacaggaaccagcggcagaccaagaacggcaacgtgctccccggcacggtggtggacaccgacgtggtcgacccgacggcgtacgacttctacctgtgcagccacaagggggaggtcgggacgagccggccgacgcactactacagccttctggacgagcacggcttcgcctccgacgacctgcagaagctggtgtacaacctctgcttcgtcttcgcccgctgcaccaagccggtgtcgctggccactcccgtctactacgccgacctcgccgcctaccgcggcaggctctactacgagggcatgatgatgttgcagccggcggcgtcagcggcatctgcctccgaggccatgatgccggcggcacagccccaggcggctgcggctgcggctgcggcagcgtcgccgtcgtcgtcagcggcatcctcatctgagggcatgacggcgtcccagccccaggcgccggcggcggaggcggcatcctcctccgcgggagctgccgacttcagggagttggctccgatgcacggggatctgttgaacaacatgttcttcctctgacgacagcttttcgccgcatatggtctctcgttgccaggtactcctcgtatggtcctggaacttgcgtttgattttctggttgtgatacctgtccgtgtcccggtgtctgttctttaactgcctggagtctctcatgtctttgggtggtttatccatagtaaatttttgtccgtgtc

SEQ ID NO: 10174 - DNA, 1423 bp, Oryza sativa
  ref <308>: DATABASE ACCESSION NUMBER: AK107522
  ref <309>: DATABASE ENTRY DATE: 2002-08-28
gagtgagacgcgcggcgttttcatgcgagtaacatcgaacaatcccgcgaggcggcggtgggcggcggaggctcacttcacttcctcctctcgccgccgatcgagaggcgctcgaagcaccggatagcggtgccccccttcgctgccggcggcgacctgtcgtccgcggcggccgagtggtggtggtggtggtggtgccgctgggcggcggcgggggacgggcggttgctgccgctgccgctcgacacccaccggccggcccggttctgctcgccgccgtcgcctttcgaggatgtcccccggctagacggggtggcggcggcggcggcggtgggcatcttcgccgagctcctgttcctggatatggttcgtgttctctccgaatcaacaacctgattcacacgaaacaaagtgatgaaccaaaggaatccgcgaggcttttgtgcctggaattgtctccgaggcgaccggaacccgggtttcttctggcgaaggcctcaacagcaccgggaacgacagtagtggaaatatgaggtgaactctgatggataagatttgcacagaacctggtgaaaacaattttagtgcatatgcatctaggagttgccaataatagaatgacgaacttcgtgatggcaagcatcagtacctctgctgggggattcagagcaaagcccctatgttgacgaagtgaatgccagttgctacgtgttggtaacatatgtgtttgggctcagagcaaagcctctatgtcgacggtgcgctcaggcttcttggcatgtcaggctctgtactcctggtacttccttcgtcgttttcagctggtgctggtgctggtgctggttgctcctctgcgtcaggtgaagaatctatggcatcaacagaaagaaaaaaaagaggagaagatatcaaatcaaatgtgccttctaattgaagaagaacacaacactgccaaggctcttgagggaataccaaagagggatttggcgcttggtctcttagccttctccttcttcttcaactcagctgtgtagaaagtaaaagagtattaaagactagaacatatattgcaactcaatcatgtgcctcaaatagttggccttgtatagaattatagctccagataggatggaagaaacataatgcagttctggaagagacatgctctatgtcattaggtttgcactggtactatgatattctcgagaaagaaacatggttacttattgagaagatggggagtagagtacccattccaagtacttcaggatcattcacaagttcgaagttcttgtacgtgtagcccacaaaattcaaatcctttgaagacagcatctgcaaaagacacaatgggtaagtcatcatgtttcttctaaaaggtggaaattctttgcatatactgtattttccaaagctaatgact

SEQ ID NO: 10175 - DNA, 1784 bp, Oryza sativa
  ref <308>: DATABASE ACCESSION NUMBER: AK107523
  ref <309>: DATABASE ENTRY DATE: 2002-08-28
aaatccccaatcctctcccctcccgtctctcatccttctccctttccaaatttcaaaatccatccatggccggcggcggcggcggccgtgggcgcggcgcgagggtggccgcgccggcgggggacagcggcaagggcgcccaggcggagtggctgcggatctacgacgggatcgtggcgatgctgcgcaagacgcaggcgcaggtggaggagctcgtcgcggagcgcgaccacctcgcggccttcgtcaagatccagcacgacttcatggtctcccgcgtcggccgcctccagtcctccctgcagcaggcgaggaaggcggacaccatcaggaagaggtatgaggcggccaacatggagatccttattggggacaaggagcgggaggcccgctcctaccagaagattgctgaactcacggagaatgatttggaggacttcagaacttctatagctgctttggctgcagaaaactatgaactgaaggaaaaactgaaggaagtggaaaggcatgcagaacttgctgaaaacactgttgatcaccacattcacagtccaagagatttaagagcagagttaaaaaaactaaagcacgcctacaagactttgagctctgaaaaggaaaaggaagtttctgcattacgtgcagaaaatgattttgtgtggaaccagttgaggacaatggagaatgattatactgatctccttaagaagaaaaaaatagaggcagcacaagctactgaagctgcacaaaagcttcagaagaatttagaagagctgcaagatcaaaataagggcaacgagatcggcagattacaagcagaagctgttgatgccaaaatgaacatatcaattcttgaggataagctacaggaaatgctttccttggtgaaggagaaagacttggaaattgaacaactcaaacatggtcagcctatgaccagtcagatcaacaaaaaggatatcaaccagaagaacagaaaatgtaggtcccaagaccctccttcaagggacaaatcaacaaatttgcaagccacaccgcctgggagaaaagtgaagatttccagacagcatgcatcaagttcaaaacagaagcaagtccagtcaagaaataattctcgtaggcaaaaattagaaggtgataagtctgaggttggcgaaaagcggaagcgtgccttgccatcatccagtggtctgcaacgatgttccgcaaggcagcaggcgaaatcctctgcatctccagtggtccagccattactcttctccccgatattccgggttccaaaggtgaagaccccgactcctccatagccacaagcagtcagttccccccaggaccaggtcaccaggagccagccacagtaggtctgatatcctgacttgtgcagctgttgatagggattgtggcactgacagttgatgaggctaaccttaattcccaggaactgcatctgcattgctcctttatgctcccagtaggtcattggtgtgtttgtagcatacttgacgcagctcttgaacaaaaaaaaaaaatgtaggctatgttagaacgatttttttcttcatcttttccttgtggaatgcgatgtgtattatttaggcacacacccttggtggtgagaaatttgtcgatgccccatagtgtcagattggcttgatctgaatgagttctgcgtaaattttttttccattgttcggtgtatgaactctgaatgccaggaggctatgtattttgttgtgtatatatgtaatgtacgtatctcgtacatcgttaacaacatccat

SEQ ID NO: 10176 - DNA, 1096 bp, Oryza sativa
  ref <308>: DATABASE ACCESSION NUMBER: AK107524
  ref <309>: DATABASE ENTRY DATE: 2002-08-28
ctcccgagagagacgatcgagatcacgcgcccacagaaactgcagattaagcggcagagattgtagatagcgcgaggttattaaggccagcagtctgaccgcgcgcggcatgcccttctgctgctgcaaccgaccaaatggctcctgcggttgcctcctccccgtcactcgtgctctccgccgccgccgccaccgcctacaacaagcgcccggccgattccgacgcctcgccgccgcaccagggagatcgcacggggcagcaggagaagaagcagcagcagctggagtgcccgcgctgccgatccaccaacaccaagttctgctactacaacaactacagcacgtcgcagccgcgccacttctgccgcgcctgccgccgctactggacgcacgggggcacgctccgcgacgtgccggtgggcggcgcctctcgccgcggcggcggcggcaagcgccgcagggtctccgccgacgccgacccttcctcggcgtcgccgccgccacccacgacttccaccacggacgcgtacgccgacctcccagccggcttcccgttcctcagtgacggcgccttcctgccgcagttcggcctcgccggcgttgcgccggccgcgttctcttgggcatcggctgtccctgacttgtacaactgcgggatcgcgccgtgggacgatggaacggcggtcaccggcgcggcgtgggacaacttcgccgacatcgccggccttgatctcagctggccgccgccgggtaactgacgaacagtacacagctggtcgctcgtgttttggggggctccggttttagcaaagcagcctcaagtagtgcgttcttcgatcggtatgcaggtagtgtgttcttcgatcggtatgaagtatattttgctgagctagggattatgatataattattgggaatgtaattaagcagctcaattatccaacgtggtgtttgcagttttcttctctcaccaatttcatacgcttgcacaatgatgtggtgattatcattgggatcagtgaatcgtgatctgtagctggaagatgtgtttacgtatgtgcagtgttaatgacaataataagagtttgttgccatc

SEQ ID NO: 10177 - DNA, 1497 bp, Oryza sativa
  ref <308>: DATABASE ACCESSION NUMBER: AK107525
  ref <309>: DATABASE ENTRY DATE: 2002-08-28
gcatcgagtcagtttccccaactcaactcaactcgtctcctccccgcacccgccgccgcgatcgcgcgcgagagagagaaaaaaagagaaaaaccgagcagctaagcaagagcaaatgcacgacgcggcggcgaacgacggggcctactgcccggactgccggcgcgcgacggcggtggtgctcgaccacaccaccggcgacaccatctgcaccgagtgcgcgctcgtcctcgacgcgcgctacatcgacgagacgtccgagtggcgcaccttcgccaacgacggcgccagcgacgaccgcgaccccaaccgcgtcggcgaccgcgccgaccccttcctccccgaccacgtcggcggcaccaccatcgcctactcctccgccccgcccaagtccgccgacgccgccccgctgctgacgaggaggagggtcgacgtcgtcggcccgtccccggagaacgcgctcgtcgccgcgttcaggggcatcgccgacatggccgaccgcctcggcctcgtcgccaccatccgcgaccgcgccaaggaggtgttcaagaagctcggcgaggcgcccaccaaggggttaccgcgcggccggaaccgcgacgccgtctacgccgcctgcctcttcatcgcgtgccgcaacgaggggatgccgcggacgtacaaggagctcgcctccgtcaccgccgagggcgccgccgccaagaaggagatcggcaggctcaccaccctcatcaagaagcacctcggcgaccagggcgaggggcgggcgatggacatcggcgtcgtgcgctccaccgactacctccgccgcttctgctccaggctcggcctgggccaccaggacgtgcgcgccgccggggacgcggtgcgccgcctcgaggagcgcctcgacgtgcgccgcaacccggagtccatcgccgccgccatcatctacatggtcgtgcagcgcgccggcggcagcaagtccgtgcgcgacgtctccacggccaccggcgtcgccgagggcaccatcacggcggcgcacaaggagctggctccccacgccagcgtcctcttcggtggctagggctgcacgccgccgtgccccgccattgattcttgggttcttggcatgtgttcgacgacatgccaatgtctttcgacttggacatgtggagttcatgtgaacttcgtttcgttaatccgtgcttgattcgttctgtttcaagctgacgaaccgaatttggacttggtttcgttaatccgtgcttgattcattcggtctcaagctgacgaaccggatttggacctgtttcgttaatccgtgcttgattcgttcggtttcaagctgacgaacctaatagatagagatgctgttgctcattgctcgtattcgggaatgagctgattaacgttagaggcatctgttgcatgacctcggaaacgtgaagcctgttcttgcgagacaatctgacaattattcagatttttagcaatgagattagtgccgtactacgt

SEQ ID NO: 10178 - DNA, 915 bp, Oryza sativa
  ref <308>: DATABASE ACCESSION NUMBER: AK107526
  ref <309>: DATABASE ENTRY DATE: 2002-08-28
catcgcgtccgcgcacacggcacagccagcttagtacgtttggctacctatcacgcgcgcgctaatctcccgcgctcccggcatggctctgtcgacgcggcgcgtctgcgtgctcctgctgctggtcctcctcggcctcgcggcgacctccaaccgcgcgcgcgcggcgcgagtagtccccgccgcaggcgccgcggctcttcgtcgcgaagaaggcgaggcgcctgcggccgttcaccgcggacgccgcggggttcctcgcatcggccgcggcggcggagtcggtggcggtggcgtcaccgtacccgtcgagcatgtcgctagacggagactccaggagcacgagcacctcaacgaggagatgctgccgtcgttcagcggcggtggcggctctcgcggcggcggcgtctcttccggtggctcttcccgtggaggcggcagctcgatcggctccggtggcggttcacgtggcagcggtggcggctccagctcagcttcacgcggcgccggcggcactgaatccggccgacgcttcatcccgccaattatccccgccgtcccggggggcggtggcggcggctgcagcggcagcggcagtagctctggccgccgcggcgtttggaacgtgggagtcgccgcagcctcggtcctcgccgtcgcctggctcgtgtaggatgctgctgcgtgactcgggcggtagctgcgacgccgtctcgccgatgcagaatcatcaataattgtggtgtgatcgccgtatttaggtttgccatgcacacgggcagtgtaccgacgtgcatcggtgcatgtagtggttttaattttcgtctggtctggatgtggctgggtaggtcatatcgttagtgcgtcgatgtggttcggtaggtcatatatatattgttagtgcgtcgttgtgtt

SEQ ID NO: 10179 - DNA, 670 bp, Oryza sativa
  ref <308>: DATABASE ACCESSION NUMBER: AK107527
  ref <309>: DATABASE ENTRY DATE: 2002-08-28
aaaaatgccccaatttcttcttcctccttcgttccgtgcttgaagaatttgccggcggccatcgccggtttcaccggcgcgccagcggaggtgaggaatcggggcgagatcatcgtcggcagtgagtcggggtgggctggcggtcgagatgacgcaagcgacgtcaacgcgagacggatcctgggtgctaccccctctcccgacgcgagctaccggcgaccgagacgacgtgagcgacgacggccatggacggcgtgggcaggcatagacacgaccaccgtcgccgcgcggagcgagcggatggcggggatcgtggtaggacgagcttgctggagatgggaggtggtgcggatgtcctcgtcgccctgggaccacgctgacgagtgcctgcaccttcacttcatcctcccccgcgtgctcacgtggcggcgctgccggagctgctcgccgcgccttgacgccgccgccgccgttttcttgttccggagttggaagaggtagaggtaagggtatttctatccatgatggtattttggctaaggtgaattagttgacgatggtattctagcgaagcgcaattaaacgatggtatttgagcgaatcccctcttatgccatggtagatatgccattttctctttattaataaagtgcctattcattttgttgcc

SEQ ID NO: 10180 - DNA, 597 bp, Oryza sativa
  ref <308>: DATABASE ACCESSION NUMBER: AK107528
  ref <309>: DATABASE ENTRY DATE: 2002-08-28
acatcacacacacacacacacacaccaactgcccccaactccagatcgctctgcaggatggataagaaaaaccctagcaacctcggcggcgaggtcccagatcccagagcgagcgagcgagcgggagtggaagaggaggaggaggaggaggaggagggagtacgtggttggcgtgcttgatggcctgggcctcgccgcgcttgtcgaggttggcggtgaagcggaagcggcgcttggggttcttgacgacgccgcagagcttgcgccaccgccggagcgcctcctccgacgagttcttcgccttcaccccgccgaaattctcctccaggttgcagcacgcagtagcggctggttgcggctgcggctgcggctgcggcgagctccctccctcccggcggcgtggccgctccggcgaggggatgaggaggaggaggaggtgaggtggaggtggaggtgagcaatggcggggtcgttgggtcaaagagacgacaagaggcttttcctcctctctactgaccacactattctcttctctctactgcaccagtctttgagaccacttgtgttattatgaaaaatactattctgtcctcatcc

SEQ ID NO: 10181 - DNA, 845 bp, Oryza sativa
  ref <308>: DATABASE ACCESSION NUMBER: AK107529
  ref <309>: DATABASE ENTRY DATE: 2002-08-28
actgctcgactcgtcgccttcctcctcgtggcgagcgatcgatgaggacgggggaggtggcggaggcggtgccgagggtggtggcgatcctgtcgtcgctgctgcagcgggtggcggagcggaacgacgcggcggcggcggcggcggcggtgggggaggaggcggcggcggtgtcggcgttccaggggctgacgaagccggcgatatccatcggagggtacctggagcggatcttccggttcgccaactgcagcccgtcgtgctacgtcgtcgcctacatctacctcgaccgcttcctccgccgccgccctgccctcgccgtcgactccttcaacgtccaccgcctcctcatcacatccgtcctcaccgccgtcaagttcgtcgacgacatatgctacaacaatgcctacttcgcgagggtgggaggcatcagcttgatggagatgaattatcttgaggtggacttcctctttggcatcgccttcgacctcaatgtcacgccggctgccttcgcctcctactgcgccgtgctgcagagcgagatgacctacctggagcagccgcccgccgtcgatctccccaggctgcactgctgtccgtccgatcaggacgatgccggctgccatcacaagcagcagcagcagcagcaacaacagcagcagcatcagctcgccgtctgaatgttcaggagttcagaatcaatgagaagttcagagctcttcttttttgtcactggatgtggtgtcaatttgcctttcttttttcttttctttaatcttttttttaccgtgcttggtacataggtgttagttaattgtggttagtgaaagaattgagctttgatt

SEQ ID NO: 10182 - DNA, 1204 bp, Oryza sativa
  ref <308>: DATABASE ACCESSION NUMBER: AK107530
  ref <309>: DATABASE ENTRY DATE: 2002-08-28
acgccaccgcctccgtcaaacacggcggcgcaatgcctcccctgaaccctccccacctccactttggaaagctcaggaagcgggcgcgcgccgtggccgccggcggcggacgccagccggctgctgccatggccaagaaggggctcgttggtagcctgtacaagctccgcgacgtgcaccatcgcgcgccgccgacgccgacgtcgccctcgtcgtcgtcgtccccgcactgccacggccggcatcagctctgcagcaggggcaggcggacgacgacgccgccgccgccgccggctccgtgtaccgcaccgtgaacactgtctacgacacgtcgtcgctggagcacttcaacccgcggcgctcctccctggacgaggcgtcgtcctgcattgctgaccggagcttcttcgccgtggagtcggaggtggaggtggaggaggagaaggagaaggagaaggagctgcagctgcgtgagacggccgtcgtgcgcggcgtccgctcggagcggctctttttcgagcccgccggcgcggagttcttgcccaagcaggaaatggcgcgaggcaagaacgacgacgaggcgacagccatggacgtcgtcgctcgcaagaacgacgacgtcgacgaggcgacgccgatgaccacgccgcagaccggcaagaacgaagcggaagcggcggaggccgccgcgctgaagggcggcgcggtggtgctgacggtggagtcggaggacccctacggcgacttcaggtcgtcgatggcggacatggtggcggcgcacgggctgcgggactgggagggcctggaggagctcctggcgtggtacctcaagctgaacgccaagggcgtccatggcgtcatcgtgggggccttcatcgacatgctcgtgagcctcgcgtcctcgccgatcccgtcgcagtcgccctcgtcgtcgtgcatcaccttcgaggactactcgtcggcgaccatggaggaggagagctaattaagctgttctcgaggaagacgacgaccacgttttgtttttctttagcctcatcaagagatgacaatctctttttctctttttttgggtgctaattcttttgtgtttccacgaaggaatggcaagtgagggaattattgtacagttgctaaaaactaattgatgctgatcattagtgtagattaattaattaattaatgctgagatggctaattgatc

SEQ ID NO: 10183 - DNA, 1622 bp, Oryza sativa
  ref <308>: DATABASE ACCESSION NUMBER: AK107531
  ref <309>: DATABASE ENTRY DATE: 2002-08-28
tgcgggcgttgttgcgggcgggcggtcaggggcggcggaggcggaggcgatggggggctcgtacgagctcgtcaggacggacgacgcggcggggcacgtcttggatctggaggccggacgctgcgccgccgtatacccaaagggcggcggcggcggcggcggcatcgctccaccaccggtgccgtctccgccttcgtctccggcgtcggcgcggcagcggctcgtctcgctcgacgtgttccgagggatcaccgtactgcttatgatcctcgtggacgatgctggcgcgtttcttccagcaattaatcactcgccatgggacggtgtaaccctggctgatttcgtcatgcccttttttccttttcattgttggagtcgctctagctctagcgtacaagagagtgccaaacaaattggaggcaaccagaaaagcaattctccgtgcactgaagctgttttgtgttggtcttgttcttcaaggtggattttttcatggtgttcgtagtctaactttcggaattgatatggaaaaaatacggttgatgggtatactacagagaattgcaatagcttacattgtgaccgcgctatgtgaaatttggctcaagggagatgatgacgtagattctggatttgatctgctaaagagaaaccgttatcaactgttcattggcctgatcgtcatgatcacatacatgggcttcttgtatggtacctacgttcctgactgggagtatcggatatccgttcctggttccacagagaaatctttctttgtgaaatgcagcgtaagaggcgacactggaccaggctgcaatgctgttggcatgatagaccgcaaaatcttgggcattcaacatctgtactgtcgaccggtttacgcccgatcaaagcaatgcagtataaattcaccacaaaatggaccacttcgtcctgatgctccttcatggtgccaggccccttttgatcctgaagggcttctcagctctgtgatggctatcgtcacctgcttgattggtctacaatacgggcatgtaatcgtacatttccagaaacacaaggagagaatcatgaaatggctaatcccctccttcagcacgctaatccttgcgttctcattggacttctttggaatgcatatgaacaagccactgtacaccgtgagctacgccctcgccaccgccggcgccgcgggcctcctgttcgccggaatctacgcgctggtcgacatgtacggccaccggcggccgaccgccgtcatggagtggatggggacgcacgcgctcatgatctacgtcctgatcgcgtgcaacatcctgcccatcttcatccacggcttctactggagggagcccaagaacaaccttttgaggttaatcggagttggggcatgatccatggatgcagcagctagaagcctagaaggcacgtatagaggcgtatttaggacactatttggacagagacaaacgagacatgtgcaggcctagttttgctacaggtttagttatttttgcacagattcgttctctctgagagctctttgtatatggtaaacaacgagcctgtgtatatcatgacaatacgatctaaaagaaatatatagtacagaaaaaattttc

SEQ ID NO: 10184 - DNA, 1935 bp, Oryza sativa
  ref <308>: DATABASE ACCESSION NUMBER: AK107532
  ref <309>: DATABASE ENTRY DATE: 2002-08-28
aatagcatattgatcacacttaataagcatgtatcctctcagttctcaggtgttcaccactggctctcttctcttgacccttaccaagagcccattcttcatgtggagtatgacggacagcctcggctccacgacgtgccccggcaccacctccacggcaaagttccacgccatggccgccgccgtgaccttcatctgcacgagcgccatctccttgccgaggcatgtcctcggcccggagttgaacgcgacgaacttgttcgacggcacgtaccgcagcttgccgtcctcggtgatccaccgctccggcctgaactccctgcagtccttgccccacacccgcttcatcctccccatggagtagtagaacaccagcaccttgtcgccggccatcacctcgtgcccgctggggagcacgtcgtcggcgaccgccgccttgtgctccaaaggcaccggcgggtacagcctcatggcctcgcaaagggccgcgtgcaggtacaggaggttcctcacctcgctcgcgtcgaacgtcaccatgccgccgttgccggggaagagccgcccctgctgcagctgcggcttgcgggaagcgatgggcgccagctcctgcaggagcttctgctcgacgcgcgggttcgtggagaggaggtagaagaaccacgacagcgccgagctcgtggtgtcgcggccggcgacgaggaggttcatcgccatgtccctgatgtacacgtcggcgtcggcgctgccggcgatctcgtcgtcgcagaggaaggaggaaagcaagtcggcgaccgattgcttgtcgccgcctccgccgccgccttgtctggacttgctctcgtcatcggctctgtgtttcgcgatggccgacgcgacgaagctctcgaccgtccgcctcgccgcggcgttcctcttctcgtgcccaatccctagccatctcatcgtcttccagaacgacactggcatggtgtggcggaggaagatcgtccgcagcacgtcgtccatcgcccgtgcgaaggggacctccggcaggccgatgtccaggcagccggggtcgacgccgaacaccaggtggcacgtcgcgtctagcgaccaccgcgtgaacacgtcctgcaggtcgcacgtcttccgggcgtcggcgacgtgcgcgaggaaaggcaggaggcccttctccaccttgtcgaggctggagcgcgccacgaaggcgcggaaccgcggcgtggtcatgagcatctgggccttgttccgctgccgccgccaccgctcgccgtcggtgttgaagatgccgccgccgaggacgtcgaacatgtcggcgaacacgtcgcccttggggtagttgtcgaagttggacgtgaagatgtggcgcacgttgtccgggtcgcaggtgacgaagaaccggaagccggcgagccagaagcggcactggaagttgagctgcgacgtggccagcaggaaggtcacgccgtcgaggaggcggtgcatgttggcgacgatggccgggagcacgccgacgatcggccactggacaacccctaggctacattttttcatggatttaagccgctgatatcggtagcagatgacgagcacgcatactcctgacaggagaagctgcaagacgaagaacaagtcgaacaaattcatgttaccaattgctgccatgcatgcacacgcgcgcgaatgcagcacgtagctatctatagcgcagtggagtgcaacagttttgtgtgtggagctatctcatggggatgcggcggtgcttatatacgcgcggccaaggtcgatcgatggcacaatcaatcaatgctagctatcgctgccaacagttaacagaacggtttgattgattggttgtgtccatgatgatccgaagatgctcatttgcatgtatctctattatctctctatagtgatatcctggatggcaccattagc

SEQ ID NO: 10185 - DNA, 1842 bp, Oryza sativa
  ref <308>: DATABASE ACCESSION NUMBER: AK107533
  ref <309>: DATABASE ENTRY DATE: 2002-08-28
tgccgcgcgctgaccgcgcgccgcgcgtgggtcccaccgcccggtcgtcgtcctcctcccgcccagcttctctctctctcccgtgaaccctagtttcttcctccctcaaatccgcgcaaatcaattcccttatttccaaattaagtgggggcttttaatcccctttccatcctctttgatttcccccattttcccccttgattcgtgccctctaacgcccggaacggccgcgtcttctccggccaccttccatggccgccggccgtgtttcccgtcgccgttccgcccactcccgtgcccggctccctcccccatcctataaaacggaatcccctcgctccgttatatcgttttagccccctcccgcgatctcccgtggtccctagccacctccccgccgtcgtcccctctctcccgtgccgccggccgtctccagccgcctctgtctccttgcctgtgcgtcggctggccgcgccaccacctctctcggcctcgcagccgcctcctctcccacggcctgccctccgtttcgcgcggtgaccgccggaggctcgttcccgccgtcgcccttctctttcccccgcgctggccgcctccagccgcctttcccgcctcgcccgtgcgccgtccggctgtggcgtcgcctccctcggctctgcaacaccgtccccttcaccggcctcaccgtctcctcgccggaaactcgccggaacggtgcccccgccggcaaccagtggcattggtgccactgtactccctccagccggctgctgttcgtcgccggtgcgccgatcgacgccgccgtctcctccttcgacaccgcggcatcgtctccttccccggcgtcacctcctcctcgcccgaagctcgccggagtggcctcctcgtcggcgtccagtacctcccggtctccggtcggctcctgtacgtcgccggtgcgccgatcgacgtcgccatctcctccgtcgacgtcgcagcgttgtcctcacctccagctgctcctctgtttcgccggaacgccgtcgcccgtgccggcctccatcctcatcgtcgccgacgtcccttcggccgccccgttcatcctcgccggctcgtcgtctcgcggtgccgcctccgtcatcggatttgcagcggcgcgttccacgtcgtccccgtctccgtgcagctgccgccggctgccctcgtcgtctcctcgccggccccggtcgtcgtcgtcgtcctcatcgtcgtgtcgttcgtccctccgtcgagccgttctcgtccgtcgtccgcgttcgtcaagtgtgccgctgcagccccgtcgtcgtcttcgtcctcagctccgcgtcgtcaagcctcgtgccggccgcgtctcgccttcgtccaaggatcgccgccgaagccgtcccctcgccgttcgtctccgttgtgcccatctgtctccgccgcgcccgttcgtcgttgtcgttcccacgcctcgtcgcgtggtgaagttgtttctctccccgacctactccaggccgagcgaagggaaatcaacctcaggagggcgataccaagcagaagaccgttattcgcttcaaccagcagtcagaaggaagcttctcctgtgaatgatagcaatatgcagtcctatcacatcatcacagaaccaatcaaggatgatgcagtcactagaacaatgccagctatatctctccagaactagaatgagtagccatgtttgtgattttcagttcgctacttatcactgtaaccgggagtttcagcagtcatgtaataaataaatatattcatgattataaacaatgagtttgttatgtttatggatgaatcatgtcgaggatacaatgtaccgatgct

SEQ ID NO: 10186 - DNA, 1784 bp, Oryza sativa
  ref <308>: DATABASE ACCESSION NUMBER: AK107534
  ref <309>: DATABASE ENTRY DATE: 2002-08-28
cagtcgagactccgtgacatttcttcagccgttacaggattcgccgtgacaataagttgacggcatgcctgcttggcagatatgttcaggagttcctataacttaaaacttaaagacctggagctatagagaaaatgttatgtcgtgaatgctgtactggctaaagtcatgtaagcatatgcacctgtaacaagaatgttttttcataaaattgttaaaaccgtcttagtgggatcttagatgctacctaaaagtgtcgttgcgttgtaatgaccgtttcataccatataatacccagtacatcggcgacgcggcggcgccggccgcgctggttgggccgtccctccaagtcctcacagcactctccgatcagaacaataaaagaattgttcttgcattgcaaagtgggttgaagagtgagatactatgggcattgaacgcccttacagtactctcatttaaggagaaggatgatctccggcgggatacaacacctcttgctaaagttcctgggctcttggacgctctccttcaagttatagatgactggcgagatattgcaatgcctaaggatcatacaaaaccgccaagagtaagaacattgggtgtcaatacaacactctccggctttggtcatgagaatgttgaaaaagtctactcagacaccaccactccttcagatgaccaaacaaagacagctgactctactgtcacgaagaagcgatctgcaggatttttgtttgatgaagagggcctatttaatgttgatgacgaaggacgaacagaaaagcagcagtgtgctgttgcagcctccaatataattcgcaatttctctttcatgccagaaaatgagactgttatggttcaacatagacactgcttggagactgtatttcagtgcttagaagaccaaaacactgaagatgatgagctcataacaaacatgcttgagacccttgttaatctagcacctgtcctggacctgagaatcttcagctcatcaaagccatcatttattaaaataactgagaaacgtgcagttcaagccataatgggcatgcttgcatcatcgattagggtgtggcattgtgctgctgctgaattaattgggcggctgataatcaatccagacaatgaaccatttcttcttccagccattccacagatatacaagagactagttgacctcttgagtgtgccagcagtcgatgcacaggcagctgctattagtgcgctgtacaatgtagcagaagtgaatatggacctccggctgaagcttgctagcgagcgatgggctgtcgatagactccttaaggtcgtgaagacgccacatcccgtgcctgaagtttgtaggaaagcatcaatgatagtggagagcctagtctctgagcctcaaaacaggatgcatctccttgtccatgagaatacttttgctgagatactcacgtcggaagggaaatactccgacacatttgcaaggattctatatgagctgactgcaaggccgagcaacaaagtgacagcagggcaagctatctgggggaacataaactgatgcatcattgtattgttaaaatctactagataagatgtactttagtagcttaggtacctgttatgttgaaaatgccttgggtttctgactgtatgtaacaagcttttagctgtatttagttgcagccttgcaagcttacattttaacgccttgatcttccttttctgaagtactacacttgcttccagagtttcagagtactatctatgatattttttgttaggcttgg

SEQ ID NO: 10187 - DNA, 2828 bp, Oryza sativa
  ref <308>: DATABASE ACCESSION NUMBER: AK107535
  ref <309>: DATABASE ENTRY DATE: 2002-08-28
cgtatttttcggtgatggtgggccggaaccttgggggccaacggacgttccgaaggctcgccacaaaggctcgacagccggcaccgccaaccggggacacggggggccggcccccgtgcccggaccgaagtggcgctccggacgaggaagcgccctccgttgcgtgggcggcgtgacgagcgtcgcgccggcgctcgatatcgaggcgggcatccggccccccacacacatcttcttgggttggaggcgttgacgagggaatggcggacgaacggcgggtaacggccgccgctcgccgcgccctccgcctcgacgacttggagctggcggcggcagcgccagaggcctcggtggcggaggaccgcccgccggcgcctagtcgctgctgcgccgtcatgaccaagtcggccacgtcatccagccaacgtcgggctggagtctctggatcggggacgacgggtgggtgacacaggagcgcgcccgcagcctggagcgcgccctggggcgtgccgccatcgccgtagacgaggcggcgacgtgccccgtctcgccgtcctcccccgtcgcccgcgagtggcgaagtcgcggatcctccgacctccctgagcgcctccccccgcccaggatttcggcgagagggggacggtggggtgcgagcccgacggcgcgggttctgctccccgtcgtcaccgctagctttcggagagaggttgtgcgccactgcccgttcggccattgggctgagcgggcgaagcttggcgcacacgaaagaggacgagggcttcgaaagacacgcgcgccccctacctggcgcgccagatgacggagcgtggggctcctcaccgggagaccgcgcaggcccccctttgccggttcggccgggggcgctaagtgaggttcttcgccctcgatctgaggaatgtcagcgagaagaagcgcacaagacacgggtgacgtagacaggttcgggccgctaagaagcgtaataccctactcctgtgttctggtggatctgtgtatgaaggaatgcagagagctccagagccagagagctcgagagcgagagagagttcaggctcttcgatccagtggcctgccttcttcccccctcttaggcctgggcctccttttttttatctggttaggggtcaccacatgggcctctagctgcctaagaaaagaaacatgctttttacaattagggctcatctacagccggaaatgacctctgacaagcagtacacacgcctcctgctccgctcgtcagctctcccggtggacgcccgtttcaaccttcattcaatggccagcgactttcttgccatgcttgcgctgaagcctggaatggatctgaccgggactgacataccaactccaggagtcagcacgccagctccggctagagacgagagccaggaagctctcatcattccgacgggacgggacgaggcgtgcgacaggccgcctgttgccacctaacccgcgatctgaccggtctgtgaccggtcacataccgcgactggtcacagaccggataagcatgcgctgcgccgcattgaatgcggcgtggcgcgctcgtctaacccgctataaatgcggttaggtgagcgccgctgtgctcatctgacccacacacgtggcgccaacaccacaggggtcggggtgccccagtcctcggggccgaaacgggagcggcctgacccctcggggagacagagagaggggtggccacgtcaccgtcgggcccgacccccccgagggggtcgggccacgtgagtgatcgcggctacccaagcctctagtcacgatacccccggccccatgtcaccgacacaagtcgagttagaactcgagttggattggagacaaaaacttgagctggaaaaagaacagttgagaggaaagatagaggtaatgaaaatgatgggatctgaggaagatggaacattgaaggaacttgatgagttgcgtacaaagctggaagaaaaagatgatgacatggagtccatggattctcttaaccaggccctgattattaagaatcaaaggaccattgatgagctgaaagaggccaagaaaggccaagaaagaactgataaatgtatacgttttatcgctattactttgctatgaacctatgattgtcataattcatgtatccggctatccgctcatccttttccgaggaccattcacttgctgtgcagggattagaaaaaatggcaggagttcgatccattataggtgtgaagagaatgggtgagcttgatcagaaggccttttataatgcatgcaaaaataaaatgccaaataataagatgaaattggcacttgtttgttcaaaatgggaagatgagataacaaaaccagaatggcatcctttcaaagttatcgagactgctggacagacaaaggaaataatcaaggaagatgatgggaagctgcaggctttgagggcgcaatatggggatgaggcttgcaacgttgtcgttaaggcccttgttgaaatgaatgaatacaatcccagtggcatgtatcctgtccctgagctgtggaacttcaagcagaaccggagtgcccctatgccagaggcagcaagttacttgctgaagcagtggaagacgcacaagaagagaaacacctgagtgagatctggaccctgctcgtggtatcgttatctgtagaattcgtcccctgacatgtagttggatgaggctgcctattagtgaggcaagtattcatatctcccagacattgtctgtctctactggcgacattgtagtgcacatttgagagttgaggctatatgaatattcgcaaaatacagt

SEQ ID NO: 10188 - DNA, 1032 bp, Oryza sativa
  ref <308>: DATABASE ACCESSION NUMBER: AK107536
  ref <309>: DATABASE ENTRY DATE: 2002-08-28
aatagaatttttcggattagccgcatcgcatcgctcccctcgcctctccccttcaatccccccacgccaccacgtcgtcgctgatcggaaaccgatcggcgattcaccaaccgcctccgcgtcggcggtggccgccgccgctgccgtgcgggagcgggggattcccgtggcggttgcatgtatgcgggaggggagaagagaaccaatgggggattggatggtgagggggcgggagcgggaggggaaggaagaggggcgcttcgccggcggaggcagccgcccacctccggctcggccgcgtcgtcctcctacccgtccacctccggctcggccgggtcgtcttcatccggcaggagggtggaggaggaggagcaagggggcggcggcggcggaaggaaacaggggaggcggaggaaggcggtcgcgagggcgatccgggagaggctgcccgcggcggtggcctgctggggcaacggcgcggtggttgaggggatcgggggcaggagcgggaggaggagccggagggagagaccgggcgatgacggtggcggcgaggacagcgcgggcgccgccgcgagggctcccgcggcggcgtggtgctgcgtgtgccccgacgaagagtgccggctggaggcgaacccgagcgccaacggcaaggaggacccgggcctccgcgccctcctcgagaacaacgacttcttctccgacgactgcaacccgcacgccgccgccgccttccccgagcccggcgaccgctccaattaggtgccattgatcccattccatccaattacccatcatcatcaccacacacatttctgtacacagttttacagaaaaagaagaagaggatttttcttttgttttattccattcggagctgtgatgaggtgtctgattgcgtttcttgattcctttcccctgattcttcctgtactttctctgtcactggttgtatgtgtactactgtgatggcaggcgtggtcatgaagtggaatgaaatcaatggatcggcatggattttcttggttt

SEQ ID NO: 10189 - DNA, 2918 bp, Oryza sativa
  ref <308>: DATABASE ACCESSION NUMBER: AK107537
  ref <309>: DATABASE ENTRY DATE: 2002-08-28
aaaagtctaattctcctccctgctacagtgtcgtcttcaagcttggacagaagcccgagctgccgtcctgtgctctagccgacgccgcttcctccaccaaatccgccgcatcccgtgctccgtttgcaaaattagttgaggggaaatattcctcttatcctcctctatcctttcccccaagaatcggactttatcacgaagaaatcaacgcggaatcgaattcgttttcgagtttatctctccaactaaccctcggattttccggcttcgattcctctcggttggagtccgatctcttcaatccaagcctataaatagcatcccctagtcgtcctctttcgtttgccccatgtcccgagctctctcgtgccccgtagtgccgccgccgcgccacccaaaccgccgccgtcgccggccggcgaacagccgcctcgcgccgtcgttttagccgccgccgccgcctcctcacgtcgccgtcgggtgcgcgtggaagaggggaagctcggccgccccttcgccgtcaccaccggtcaccggagagccgccgccgccgcacaagctcgtcgccggtcgtcgttcgtcgcattgtttccgacgttccggaggagagcgttttcgttgaggaaggttcggaagtgtttgcggaagctcaaggctgttcagcacaagcaattcggaagttctgtctgaaactacactgaagattttggagggtccttaagcaggttttttcaaacatactgatggatggggaatcccagacgagtaaattatcatgtgagcacatgtactcttggtacttcaccagggaagaactggagaaattttccccatctaggaaagatggtattactgagataatggagtcagaaattcggcagttgtactgttcattcattcgggatgttggcattagactgaaactaccacagatgactatagcaacagcaataatgttctgccatcgcttctatctgtaccagtcccttgccaaaaacggatggcagacgattgcaacagtgtgcatatttctggcttcaaaagttgaagatacaccttgtcctctggaccaagtaattagagtggcctatggaacaatgtacaggagggacccagctacagctcgaagaatccaccagaaggatgtatttgagaagcagaaagcactaattttgaccggggagagattagtccttacaactgttcggtttgatttcaacatccaacatccttacagaccactacttgatgctatggaaaaacttgggatctctcagaaggaagtgaaacaagtagcttggaactttgtaaatgattggcttaaaacaacactgtgcctacagtataagccccaatacatagctgctggttcgctctacctggctgctaagtttcagaacgtcaagcttcctgtgcatggagggcatgtttggtggcaccaatttgatgttgccccaaaacctttggaagctgtccttcagcaaatgagggagatggttcacatgaaagcaaagctgtttgctcatcccagtccggctaagcaaaaggaagttctttttgaaggaatgctgctcatatcaaatagcccagattctgtgttgactcaatctagcttgtcagtaagcagctcgagtcctgaaattggagaccccaatgaccacctgcaggtggattcaagtcaagacatagtgcatattgaggatcgtagcaagtcatatcctgaaaggaatttatcgaatcttactgctgatatgaataatcccggtaaaacacacaataaagaaagcttggatcaggccttaaaaatcaaacatggtggactgatctcatgtaatcagcagataccattagatgcaattgcaaagattgatagcagcactgctaaatgcgtggaacagaatattggcatttgttgcagctcaagtaacacattcaatggcaaaatcttgaacccgttctcaataagtcagcgaagtggtgataaaacaaagttatgctcagagggtggatcatcgcttacagatgtggacagcaaaagcactcaatctgtcgaaccgcccactacaatttgtaaccataccagtgacagtctcaatgtggacagtttgtgctctgatcagagactggctaattccactgcaggtaccacggagaaggcatcatttgtattgcctgtccagataaaggttgatcatttgtgtgtggagcgtaaaaaggtagatgtggcacggataaaggatttgttgatgaagaggaagagacgaagagaaagacaagggcggtgcattccttcagttgacctaagtgaagaagcctggattgagagagaacttgagtctggtatagtttttaaaaaagttgaccatgttgttgcatcgtatgatttaagtgatgaaggctggattgagagagaactggaatctggaattgttattggacaaaaaaatgaccagcctgtatctttagatggtttgactgaagatgattggattgagagagagcttgagtctgggattatagttgaaccaggaccagctggtaagaagctaaagtcaaagcttctttcagagggtcatgagataatgaatagcaggtgggaaataaatggcaaatcaatgcaaaatcaagtcacatagaatatgagatatccatacagataggagcaccattgtttactcgtgttctttatttgattgaattaactatacacctcgtgtacttgaaatgctaggggtgtgcatgggaaagatttttgttctttgtataactagtaacagtgggaattcacaatttcaatctttaggttgtaggtgcaactgtacaataattaagtgtaaatgtacaatccgtccttgttagcagctaatccttcattgtaaactgtacctgtcatcaaaacgaaaataatgttctggtgt

SEQ ID NO: 10190 - DNA, 2050 bp, Oryza sativa
  ref <308>: DATABASE ACCESSION NUMBER: AK107538
  ref <309>: DATABASE ENTRY DATE: 2002-08-28
actgcttcctcctgatgcttttcatggtggagatggcaagaagcttccctcttcctcctcctcctcctccccaaaggtgcaatgccctcgcctttgcatcatctttctggttaatttagcttctcccctttctcgtgtccttagatttcttggttcttggtaacgccgcctctgctgccggaaaatggcggcggggctactgctgaagctggtcgggttctgcttctgggccgtcttctggctcggcggcgccgccaccgtcagcaccaacgccggcggcgaggcggcggcggcggcggtggtggtggacgcgcggtccgccattgctgtgacggacgaggacttcgtgtgcgcgacgctggattggtggccgccggacaagtgcgactacggcacctgcagctggggactcgccaccctcctcaacatggatctttcaaacaaaatcctgttgaatgccgtcaaagcattctcacctctgaagcttaggctgggaggatccttgcaggatgtgttgatatacgacaccggcgatcctcggcagccgtgcactccgttcacgaagaactcatcggccatgttcggtttcactcaaggttgcctgccgttgcatagatgggacgagctcaatgcattcttccaaaaatcaggagcaaaaattatctttgggctgaatgctctgaatggtagggttccaatgtctgatgattctttaggagggccatggaattacaccaatgcggcttccttcattcgctacactgtcagcaagggctatgacatccatggatgggaactcggaaatgaactcagtggcagtggagttggagctcgagttgatgcagaccaatatgcacaagatgttctagctctgaaacaaatcattgacaactcctaccaaggccatgcatcaaagccactggtgatcgcaccgggaggtttctttgatgcagcctggttcactgagcttatcagcagaacaaagccaaaccagatggatgtgatgactcaccacatctacaatctaggccctggcgtcgacacgcacctgattgataaaattcttgacccgtcttacctcgacggcgaggccggcacattcagcagtctccaggggatactgaagtctgcagggacgtccaccgtcgcgtgggtcggcgaggctggaggcgcttacaacagtggtcaccaccttgtaactgatgcttttgtgttcagcttctggtacttggatcagctaggaatgtcatctaagtatgacacaaagacctactgcagacagaccttgattggagggaactatggtctgctcaacacaacaacgtttgaaccaaaccctgattactacagtgctttactatggaaccgcctcatgggaaccaaggttctctcggcaacattcaacggcaccaacaagatccgcgcttacgcacattgcgcaagagattcacgtgggatcactctactcctgatcaacctcagtggcaacaacacaaaccatatctacgtgacgagcgaaggcgtgcaaccttacagcacaaagaaggagggccgcagaaggttcggacgcatccccgggctcggcgaagaagctcagctcatcagagaagagtaccatctcacccccaaagatgggagcctgcagagccagcatgtgctgctgaatggcaatgtgttggcacctgatgccaatggagagatccctaagctggagcctgtgcaggtggagggaacacagcccataacagtggctccttactccattgtgtttgctcatattcccagattctatgctcctgcctgtaggtagatattgttgattgttgattggtttttgtgtgaatttgggatgatgtttattatcttcatagatttagagtaattgtgggtgagaggcaaagcatgctcacctgctgcaaaatgaagtaaactgtaaggctgaaagctctgtgatttgccattcttttaggtggaaaaagggttaaggaaatgtatgaacaaaaggatgtgaattgaaaagaagaaataatagtaagttccaatttgatcc

SEQ ID NO: 10191 - DNA, 1363 bp, Oryza sativa
  ref <308>: DATABASE ACCESSION NUMBER: AK107539
  ref <309>: DATABASE ENTRY DATE: 2002-08-28
tggcctggaaccacgatctctcttctgcttggaattctctatcctatttttcatctcatattctaaccattgattatgccatgattggatcttggcacagtgctctgcatgtgttcttgtgttaatcagctgcccctaatcccctaggagaccaatctactgctgcttagctcctgatacaaatttgcacattgcccggtgaaaattcagcaactgagcaagccaacaagagcctgggtttctgaactctgactagcagtttcatcagattggtttgagcttgggagagatcgatggggtgcgtgtcgtccaagatcctgagcaaatcagggagcttccaggagaaggtggtgagccatggattcaaggggagcaacctgatcgaggagatcatcctgtccacccccaagaagagcaacggcgatcagttcttggccctcctccgcacgtccacctcgtcggcgtcggcggcggcgagcagggccaaggacgccgccgatcagagcaccacggcggcggcggtggccgccgaggagtttgtcaagatcgagacgatcaacgtgtccgagctgctcgccgggctggaggaggaagaggaggaagaagaacgcgacgacggcgagaggtgttcggctcaggcgtgcgtgctcgatggcgcggtggcgacgccggcgagggcgacgagctttcgcaccgtggaggagttcgacgcgctggtgacgcggagcggctcgtcggaggtggcggaggcagcctcctccgccgatcaagacgcgacgggcgccaaaccgtcggagcaagaggaggccgccaccgccgccgccgggaacaagaggcgggcgagggcgaggcagctcggcgagctgaaggtgccactgccaccggcgttcgacttctccaagtccggcagcctgcgcgactggctcctccagggcggacagatattctccccgggctcctacgtcacccccaagttcgggacgacctcaccggcgccttcgccgccgccgccgcaagaacgtggaggagtactccacaacgccggcgagccgcagccgcagcacaccgtgtttgatcccgagctggtcgcgcagttcgagcaagccatggagcggctgtccgaggacgaggagcgcgtcttggagaagatcctggaagccatgggagcggcggcggaggaggaggaggaggaggaagcgacggcgacggcgacggcgaggctggagatgccaagccatcggccggtgatggtggtgcaggagtaggcgacggttttggtaggtttttgcagccgcgcgtgtgtgatgtgatctgtaattttaaaccctgtgcttgcaaaatgtaaatatgaatgtgttcagtg

SEQ ID NO: 10192 - DNA, 1219 bp, Oryza sativa
  ref <308>: DATABASE ACCESSION NUMBER: AK107540
  ref <309>: DATABASE ENTRY DATE: 2002-08-28
tcatccgcggcagcgccaagaaaccatccccgccaccgcacggcggcgcctccttccgccggcaaccccccgagaacctgccggcgctccactccccgccgcttgccggctcgaagccgtcgaggcacttgcacgcggcggcggcgcccgtcgtgatgtcgcagtagccgttcggcccgcagtagccgtacgtggtgcagtggtgcgtcgggaacgagctgaaggtgatccactccgacgagctcttgtcccagcccaggagctggaactcgccggagctggtcatcacgtaccgcgtcggcgaggcgccgtcggagaccctgagcttcacgtagatctcatcgtcgttgtccaccacgtcgaggtagatggtcgtgccggtggcggcgaggtactggctggaggtgaggtagcccgtccacacggtggtgcgccagtacggcctggacccgttccacatgacgagctggagcgacgtctccgggtccatgccgtacgagaagctccccggcgaggggtcgccgccggcgtccttccaggacacaaggcgcgcgccacgccgcgtccgtttgttcagctggatcttcatctcaggtatgagcgtgtcggtcgggtggtcgaagctctgccacaggatggcgccgttcgaccggacgacgaggttgccattgttgaggagctcggccaccggcggcgaggtcgagcgcccagccgcgacgccggcggtgacattggtcgaccaaagaacgcggccgtcggcgtcggacaagacgaggttggagtcgttggtcagcgcaagcctcggggcgatggacctgccggcggcgatcgccggagcttcccggttggccacccacaccacggtgcggtcggtgatgttgtaccatatgccgatgtactgcctctccggtgtggaattggacggcgagaagaagcctagcacgaaggccccgccatccgaagctcttgtttgccccggcaacagttgctcgccaagctctatcttgtcgctggccgacgaacacaaccgcggcaagaggaggaggaagacgacgatggtagtacaagctgtactatccatcaccaagatttgtattcccttctgtactctacaggattacagaatcaggaggagcagcttcgaagtgcacaatcagatacataaactctgaaaattgcagtctgaatgaaatttcattgggcgagtttttttttttcc

SEQ ID NO: 10193 - DNA, 1126 bp, Oryza sativa
  ref <308>: DATABASE ACCESSION NUMBER: AK107541
  ref <309>: DATABASE ENTRY DATE: 2002-08-28
cacatcagcaaattaatcaacgggctcaagcgttaacacacacacacaccgatcaccgaacacgtctgaattcgccacgggcgacgcgccgccgccggattcacgaggatgctagtccgctgcctcctcgtcgttgccctcgccgccgtcgtggccgccgccgctgggcgcctcgccttggccaaggagaataacggcggccgtgggagatggcaagtgtactcgccggcgccgtcgccgcagaagcacccgtgcctggagaacccgccgaacatgacggagaacacgggcggggaggccggcgacgtcgtccacggctacggcggcctggagtgctacgccaccggctcccgccgctccggcggccgcgccgtcatcctcgtctccgactactacggtttccgagcaccaaaactgaggaaaatagcggacaaagttgcataccagcttggatgctacgttgtggttcctgatttgttgttcggggacccttacaccgatgatccagcgaggccatttgaggagtggatcaagacacactctccggttgaagcagctgaaaagactaaaccgcttattgcggctctgaagaaggatgggacgtctactgttggagttggaggttactgctggggtggaaaggtggccgtggagctatcaaagactgaagaaaccaaagcggttgtcatttcgcatcccgcgctagtggttgtagatgacatgaaagaggtcaaatgtcccattgaaatccttgggggtgagcttgataccatctctccaccacagctaatacaccagttggaggatgccttagatcagaacaaaagggttcatcacttggtgaagatcttcccggatgcgccccatggcttcgcctgcagatacaacgctaccgacccgttcgccgtcaaaactgcagaagaagctcgtgctgacatggtcaaatggtttgacaagtatctggagatcatgaagcggtgaaagattcagttgcacggttccttggacttggatatccaatactactaaataagaagaaaatgaaccactaggcgcctcatgtatccagtaaattacaaaccaattatttggcttacagtttcatcaaaattttcctgcctgaagc

SEQ ID NO: 10194 - DNA, 1413 bp, Oryza sativa
  ref <308>: DATABASE ACCESSION NUMBER: AK107542
  ref <309>: DATABASE ENTRY DATE: 2002-08-28
aaaaaaaaataataaaaagaggcaggagcagctatacgatttcctcctacgcgagaaaccccaattccccaacctcgccggcgatcgccgattatcgcggcctcgccgccggcggctcccaccggcgatgcacctgtccccacaactcggcgagactatgccctcgaagaaacggaaggtagagctccacgccgacgatcagcctccgccaacccaggcaataatggccacaccagagccctgcagtggacgcccatggccggacctcccgtcggagctcctgggcctcgtgctcctccgcctgccgtcccacgccgaccgcgtccgcctccgcgccgtctgccgcccatggcgctccagcgcgcgggtggagctggatcttcttccgccgcccctcccgtggctcctcctccgcggcggcgccttcatcaccctccccgacggcgcggcccaccgcttgcccgccgtccccggcgatgccacgcacctcgcttccacgggaagcggcctcctcatcgtgcacggcgacggcatgctctccctgatgaacccgtcctccttggcaacgacccctctcgccgccctcgccgccgtgctccctaaatacatcagctccatcgtcgacattgcatccttccaagggaagctctactacctaacatctgacgtaaggaaacgtcaggaggagctctatatctttggagtcgataatgctaagcagattggcataagatgcataagcagcaccctgaaagatataggcgaggaatcatggtttggcccttgctccaccgaaaggtacgcgacggagcgatatctcgtcgcgtccaacgatcggctgctcatggtgcgacggtggatcaatcttccaccaatctatccaagcgacagtggcattgttaagcgaacacggcggttcgaagtctttgaagccgcagacctgagcagtggctgtggaaggtggatcaaggtggatacattgatggggcatgctctctttgttagcaagggctgctccaagtcgctcagtgccggagctgaagaagactgcatctacttcatgcatgaggacatcaagaatgggaagcctgaagatccttttttggactctggcgtgtacaacatgagagacgggacagtggcgccattgttgacagagactctagtggcggagcctcttgcagtacacggcggtccatggtgtccaacttggcttttcccctctgaaacttgaacttagttggatagtattcttgcttccaggtgttatatttacgatttctcttcttggcatctcctgatagtagagttttggcatgaacataagagaagtgtcaattaacttttactgatggttcagatgtaaatgtaatcaggttgcttttggtaagatgaaggaaacacattcagatc

SEQ ID NO: 10195 - DNA, 1973 bp, Oryza sativa
  ref <308>: DATABASE ACCESSION NUMBER: AK107543
  ref <309>: DATABASE ENTRY DATE: 2002-08-28
aacgactcggacatcgccgagatggtcgccatgtggggcggcctccacgagttcggcgacgtggcgtcgctgccgcggcggcgcatggtcgtgtaccgcgagcacggccgcgccgccgaccacgcgggcttcctcgacgccgtcgaccccttcctgaatctcttttttttttactgaatcacccacatacgaatcaatttagagatttacctccattgttgcatccattaactgatgagttaggagatttactaaatctgatttctgcctgttcagtagataaggctccaagagagacatatgctggctattactcggtgcggtgaattatacaatgttagtatcaagtattagtttaattagcgagattaacaaaccacgctaccagctcaacattgttcctcaatcattgtctgttgtcactgccttatcgacttggcaatgggaaacaatatatcaaaagtattttgagttgtacatattttcttaatcgttatagattatgaattaccaggacttacatatatattctagacctaggtcatatttacacaatacacgtaaataaacagattcttgtacttataatatgctcaatttaatttatattgatcataacgtgtactacacgtgcacgattgctagtttactatcaatagaagcagctattctagaaattaaccgttcactctcagcattttttggatcttaccaaaccgagcggcgccaggatgggctcctcgacgtcgacggcaaccgccggccagccggccaccgcgacctcctcagcgtcaacaccgtacaccagcaacgggaggactgctgcgagcctgcagatcagcaggcgtcaggcggcgtcgcgacaagcatcagccaccagcagataagctagcagagcaggctaccgagatactgtctggtgagtcactgagtatctgaaattgaatgttagtcttgctgcctatattggctatctctcttcattgactgcaaattattaatctgtaacctattgaatgagtaattgagaatatccaagactttagcctcatgttttatagttctgaattattcgtagatttgcaatggataagaaaacaaaatttttaaattatttaccttccatttgtcaccgattttgatatatttatttattgtatgaccaaaataaaagttttagatcttgatgagttattcaactttgttgttgataatttttcagttgaaatcatttagtatttgaaaatattgtttgaagttgtcatattttcaaattcaaattcaaactgttcaaaaaatgttatatagaaaaatgaccaaaataaaagttatagatgttgatgagttatacaactttgttgttgatgacttttccatttgatatcatttactacgcgtaaaattgatttgactcataaattgaattactatactgcaagttaattattttgctatagttcaacatacaaatataaacatttcatatgtaaaatggaaaaatgctcatcggtgacgggctttagttaatgcccaatagagattaagtcatgtcaaccggggattaatatatagtccgtcattgatgagtcatctatgacgggcctcaagttggtgtacgtcacggatgatggtcatctgtgacgggccccaacttaaggcccgtttgagatatggaatgttatctcaattgggtctaaagttggtgcccgtcacggatgatggtcatctgtgacgggccctaacttcaggcccgtttgagatatggaatattatctcaatcggacctaaactacggcccgtcactgataggtgtcatctgtgacgggcttaagttttactgtaacgaaatctatctactaatagaaggtgtaatttgtttactgtaacgaaatctatctactaatagaaggtgtaatttgtttactgtaacgaaatctatctactaataaaaggggagggagagttatgcaagt

SEQ ID NO: 10196 - DNA, 897 bp, Oryza sativa
  ref <308>: DATABASE ACCESSION NUMBER: AK107544
  ref <309>: DATABASE ENTRY DATE: 2002-08-28
aaatcatttcccctcccccctctctctctcaaaatgacagcgtcagcggtgcctctccctctccgccgcaacggcgccgctccccttctccctcccccaccggtggcgctgctccccctcccagcaccggtggcgccgctccatctcccccctccctcccgtttcgttcacacggcgctgcatcggcgagtgctcgacgggggtaagtcagcgacgacgaccaccctcacttcccctctccccatcggcctcgatggtggggctacggggcgggccatccttctctctttttctcatctgcctccgagcaggaggagagcgccggaggatggggcgccggggtagagggagagggtgccgacgcggttggggaggcggtgagtgtggccgtgcctggcgggcgtgaccacgataggagcgcagtggacggcgatggcgacgagctaagatcaaccggatcgggtgacattaagcttgcccatttatgtgattttttcctctcctttttttctttttttctagggttctcgatgcgtatatctgttcgaattgattcttttttcacgtagatttacccgtttaaatttctatggagctccccaattgaatttcgtaccgatctttgatttgattttgtgtgttttctatcgcacatgattggcatataaagtgatgacggaggaaacattagcgccatgacggatgaaaacgcggacacagagatgtgacgatcggaaagttacgaattttttaattagttaagattagtgtttttttatctttaggaaatttgtatcgtgtccaataaaaattagtataaacatgtggatataaatatatatacccgggattttgtaatctatctctcgatcgttatacaattttcggcgcattgcc

SEQ ID NO: 10197 - DNA, 2131 bp, Oryza sativa
  ref <308>: DATABASE ACCESSION NUMBER: AK107545
  ref <309>: DATABASE ENTRY DATE: 2002-08-28
gaaaagcagacagacgcccacaacccaccaccacgtctagggttccgccgctcctccggccgccgccgccgccgccgccgacccccctcgatctcctccccgagccgccataggtggtggcgggggcgggggagctagcatccgtccgtcaacgcacatcgtcactgctgcttcctgaaatctgccaccatgtccgacatggagtccatggctacacttatggagtccacaggctccaagctgcagcagcttcagcgtgcatttgcagagctcgagagccagagcgctgtttccttgaacttaaagtggaagcaactggaggaccatttccatgggcttgagcagtcgctcaagaaaaagtttgatgatctgaaaaggcaggaagaggagttcgaggagacggttgcaaagtcagagcagatgctgtgcaacaagaggctgttgtcgtggcaaaggaactgacttctcttgaaaaactgcagcagaaaagggatgccgcgttggctgtgatctttggcaagtccaagctgaacttgtctacgcctcttatcaacccaatcagcaaatccgtgaataacaatgctgtgtttaatggaaacatcggtggtagtctttctgttaagtggcccaaacctgcaactgcgcatggtgcatacctgcaagatgaaaacactgctgtgaagcctcgttctcaacttgttgtcctctgtgaagagatgaatgttaacgggcttcataagttcatatcagacaatcgcaaagacttaacatccatccgtgaggcaatccccgttgcacttaggggagcaactgatccatatggcttggtgttagcttctctagaagacttctattttggagacaatcttatattggatggcaaaaaggatggaaaccttctgggtgtacggaggacgtgcctcatgttgatggaatcacttgctcagctgcaaactgatgctactactggtttcatatcggaaggtcaagtgcttactgcaagtatcaaggagcgtgcaaaaaagattgctcttgagtggaaatccaagttggatagccttgactttgatgctagcaatgggaactgcctggaagcacatgcgtttcttcaactcctggctacctttggtatatttgctgaatttgcacaagatgagctgtgtaagctacttccctcagtcagtcgtcgtcgtcagacacctgagctttgtagaatacttggattgtcccagaacatgccaggtgtcattggagttctggttgaaaatgggagaactattgatgcaattaatttggcttatgcatttgagctgactaatcagtttgaaccggtggaattactgaaagcctatctacaggaggtcaagagtgtgccacatttcaagactggaaagatatctctgcaagtacagaatgaaatgaatgaacgagagctgtctgccttgaaagctgctattaagtgtatcgaggagcacaaacttgatgagaaatatccgattgacctgcttcagaaaagagttatccagctagagaaagctaaggcagacaagaggagggctgttgaagctgcaaagccacagtctaagaggcctcgtgccaatggatccgtatatgcgccacatactagctttcctgacaaaagcttctaccaggctgctccgccgcagaggcattcctacccttacgagaggcagtatgtgtatggtgctgaggcccatcaccatcccacaatgataagctcagctccctatggcatctcacctgcccacacaacatattatgagaaggatggggaacctaatcgtggatgatggatcctctgtgatttgtgttcatgatgagtgatgactgataagtgcgtatgcaagggcccacaaatcaatcatgcaattaggtatgggaaaaatagggagtgagcttgataatgttgagagcaactggatgcatgaaattccaatcctagctaaccaaccaactttgtcggtggaatcggtaccacgtgttttcttagtcatcttgggcccaccactgggcttagctgttcttcagtgacctggcacccaacggcatgcatgtgtggattttggaatttctagttgtatatgcatcgcgcgcatgacaaaactttgtc

SEQ ID NO: 10198 - DNA, 1078 bp, Oryza sativa
  ref <308>: DATABASE ACCESSION NUMBER: AK107546
  ref <309>: DATABASE ENTRY DATE: 2002-08-28
cagcgacagcctcccttcgtcgccgtcactgcccaccaccgccggcctcgacgccgccggtggcggcgaccaagaattctcctcctaccagcaccaccagagtctcttcctgccatcctcctcctcctcctacctcgactcacccttccatggcctcctccacacctcctcctcatcctccgccaccatgtccccctcgcaggcgccgccgccgcaccctccccctccggcgccgacgtccaacaacaagccgcccaagaagcggcccagagcgtcccgccgcccgcccaccaccgtgctcaccaccgacacctccaacttccgcgccatggtgcaggagttcaccggcttccccgccccgcccttcgccgccgcgccgccacccgccgtccgccctcgcctcctgggcggcgtcggcggcggccaccagctccctcccttcttgcttcgcccctccccgctcaagtacacgcacagccaccccacgccgccgccgccgccgccgctacaccaccaggcttgcaccaccacctccttcctcggcaacgccgccgccgccaccaccagcacgagctctctcgtcgacgcgctcgcgctgttcgccaagagcaacgtgatggtggcgccgccgccgccgccgccaacctccgccgccgcctcgtccagcgccgatcagtaccaccaccaccacggcatgacgatgggtggtctattcaacccgttcgacgactacgaggccgcggcggcggccgccgccgcggaaggcgacaaggttgtgcacggcggcgccggccatggcggcttcttctcccccttgggcgccggcgccggcgacgacaagtacgatcggcactagcgcgcgccgccgcgtgtacgtatctctctcgatctctaaaacctctgtgtgtttttgcgtgtggatcgagagatcaatcaatcgatcgatcgatggagaaactaagagaagcatttggattatggatagctaagctaagttaatgaagctgagctagcttctactacttggccactgcaactgtgttggcatttgttgtgaggagttgattaatttcttgtt

SEQ ID NO: 10199 - DNA, 1044 bp, Oryza sativa
  ref <308>: DATABASE ACCESSION NUMBER: AK107547
  ref <309>: DATABASE ENTRY DATE: 2002-08-28
acacatcaaccaccacaggctgacgcccgcgccggccacagctagcgcgtacgccgccgccgccgccgccgtcgtcgtcgtcgtctccgatcgatcgacgaaccgaggcaccagcagcacggagctaggagggtagcgatcgagacatggggaagcatggcaagtgcgacgtggaggcgtgctacccgggcggggcgccgggcggcgggatgtacccgtacatgatcgagaacgcgcagctccggtgggcgttcatccgcaaggtgtacgtgatcgtgtcggtgcagctgctggtgaccgtcgccgtcgccggcgcggtgaacctcgtcgagcccatcaagaccttcttccaggctcgcacgccggaggtcctcgtcgcctacgtcatcatcatcatctcccccctcatcatgatgctgccgatgatctacttccgtaacaagcatccgatcaacctcttcttcctcctcctcttcaccgtctgtattagcttctccgtcggcctgggttgcctctccaagaatgggacagtgatatttcaggcggcgggaatgacggcggcgatagtgatcggactgacctgctacacgttctgggccgccaagagaggctacgacttcgagttcctcggcccattcctcttcgctgccacgctcgtcctcttcctctacgccataatcacgatctttttgccgatggggagaacggggaagttggtgtacgggtgcgtggcggcgctgatcttctccgggttcattatctacgacaccgacaacctcatcaagcgatacacctacgacgagtacgtgaccgccgccatcacgctctacctcgacatcatcaacctcttcatggccctcgtcacggcgctccaggccgccgatgggtagtagaacaagtttgccaaccacattgggctgcaggatgaagctggatcgaaatgtgatttctagtacttttttttaaacacaagacagtgtatgtaaagatagggttaaacaactcctttgtgattgggcattaacaagcaagcattgccagtcc

SEQ ID NO: 10200 - DNA, 1731 bp, Oryza sativa
  ref <308>: DATABASE ACCESSION NUMBER: AK107548
  ref <309>: DATABASE ENTRY DATE: 2002-08-28
ttagaccacccacccaaatcctttcctcctccgccatcccaattccattccattccaccacccccaaaaaaatctccacccgccgccgcctccggcgacaccgccaccgcccaccggagagatgttgctggtgagccaggccgccaatggttccgtctccgcgcggcggctgccctccaagcagcccctccggatcccccgccaccaccaccgccaccgaggaccccgtcctcgtcggcgttacggacgagggcgtccccctcgagggcgtcatccagttcgataagcccggcgacgccgccgccgagtccaagctcgtctcctacgcgaagctggggcttctggccagcggcgatgtgctctgcctcctcgtcttctccgcgataggaaggttcagccatgggctgcctgttcttgacgcggagacgttcaagacggccgatcccttcattgctggatggttgctcagtgcctatctccttggcggattcggggatgatgcgaaaggtcgcaatggcgtggggaacgctgtagttgttgcggccaaatcctgggctgttgggataccgttgggcctcgccattcgagcactgtcatctggtcatattccaccaactccttttatcctggtagccatgggaagtacttgggttttgttgactggatggcgtgccctggtttctctactattttccactggacagagccagcaagatgatgtctacaggcggggaagtccttttgagctttttgaggttaagaaagttcttcaaattattggcatatttttttacacctgcaactagtttgctgaagagtgatgttctgggcctatacttttgttgtcacgtaaatggttccatttggagcaactagtaaagaatgcatacaaccacatctaaccatttaaacttttgcgccttattacctgatgataccatgctactcacgatgattagaaactctacattttattgactaaccctatagagtgtcatctaacagccaccgaacaatactatcaatcctcacacatcagtataactgcaaaaatgatgaaatcaaacaattatttgaaatttttcaatgagcatggatcttatgtttctttatatatattgggagtttgctttggtcataagttggctacttgcctgaatatatcttgggagtttgctttctgaatatatctcactgtaaccaatttgtaagttgtaacatcatggctccaaactcatcatgcatgactggaggagctcattgaggtagccagaattcgtaagttaataaaatggtgagagctgaactgttgcattttttttaaaaaaaaatctgaaagtgatcatgtgataaggtttcttggtttctgtcgaaagccattttttccttgcattcttactgataattgtttactcaagaaactgcttgcaagaagcgctaactgcttctattgttttgacagttgctcacatcactggtgcgaaggtggtgatatctgatattgtgtaaaggtgatgattgccatccaacactaggttctaatttctatcgtgtaagtacaattttggagggaagatgagaaggctagatcatagttggaagcacatccataatcgctttctgtaacaagatggcacaaggctgttacatatgttaatcttgaagatgtactactaaatccatcactgacatctctttcttgtgtagcatggcccaatcattttgattact

SEQ ID NO: 10201 - DNA, 841 bp, Oryza sativa
  ref <308>: DATABASE ACCESSION NUMBER: AK107549
  ref <309>: DATABASE ENTRY DATE: 2002-08-28
aaaccaaaaaaaaaaaaaaaaagaagaagaataaaaaaacttgtttaaacaactccttacctttgcaatcttgcatcccagcatcaggcagtgcatcatcattcatcaccttctcctccttcccgatccatccatctccttccttgcatctactattttattattgcaatccactcccccactgtgcctttcttggtggtggtagtagactagtagtagcagtagctgcattcttgcagaggcagccgaggaagtgtgttgagtcagtggccatccatggcggctggcagtggcagagaggaggctgctgctgctgcagggtacgggcgcgggccgccatgggtgttcaggggcagggcattgtaccagctgcatttggtgaaggcggcgacggcgcgggcgttcgtgcccagggagctccgcctcgtggaggccttcggctacaccctcggcggcatgttcctcgcccgctacgacgacagccccgccggcaagttcgacgagctcgtggtgatcgccggcatcgtgtggaacccgccgacctcctgcgcgtgagtcgccgagattgctgcgtctttttggcctagtttaatcgagtccaccgctagtgcttttgcccttgcctgattgggtggagttcttggccaagttgcattagattagggggaaaataatccccgagctttgcattgcggcaggttcgagtgatcgagtccctcaaaaaagccaataaaaaaacgcgtcttgattagtgttgattgtacttgagcacagggctttgcatatgggctctccttttgctgcacccttttaattattgggtgtttgcatgattcgattc

SEQ ID NO: 10202 - DNA, 1712 bp, Oryza sativa
  ref <308>: DATABASE ACCESSION NUMBER: AK107550
  ref <309>: DATABASE ENTRY DATE: 2002-08-28
gcaggggaaagaataatcctctattcgatccggaaaggtttctgctctgtcgatcgatcgaatcgccggcggcgccgtcagtcatggagccgaccggcaccggcgccgccgtggtcgccgattggacgaggctgccggaggatatactggtcaccgtcttttgccagcttgagatacccagcctcctcctctccggcgccgtgtgcgcgtcttggcacgccgcgtaccgcaccttccgccgcctccgcctcccgtcgccgaagcagccgccgtgcctcctttactcctgcgacgcctatggtcccgacgccgccggactctactgcccttccaccggcgccaagtaccgcatccccgtgtcgtgcggcggcggtggcggctttcgcaacctgacgctgatcggctcggcggacgggtgggtcgtcgccgccgacgagatcggcaacctgcgcctcctgaaccccctcaccggcgcccaggccgagctcccgccggtgtccacgatgcaccacgtcgagaccgccttcgacgaggacgaaggcggcctcgtgtacgacatcgatgaggatccatccgaacaccccccccccccccgtgcgcatcccggcgcgcgaggcgcagaactgcatgtacgacagggcggtgctctccttcggccctcgtactcgcgccggcgacgccgcggcggcgtgcgtcgtgctgctcctgcacaagcccatgtgcgagctctcgtacgccaggcccggtgacgagcggtggacgtgggtctcgccgggcgccggcaccggcctgcagtggcgcaactggtactgcgacgccgcctacaacaaggacgatggcctacgtcgtgcggcgagacgactccgtccatgccctggacctcaccggccatcgccggtggcgaggaaggtgttccatgagcgagaatggagcgagagcctagcttctagattcctcgagaatgtccatgggctatgtggcatcccttttaggtaccttgtccacacgccgtccggcgagctcttgcacgtctggagatttagggatagcgtcagttcctacgatttgtcgttagatgatcaagacgacaacgatgacgatgacgatgacgactccggtgactcgcttcaagaggaatcctcaccggaggatgaggacgacgactcatgtgacccacctgatgaggagctcgtaaccgaggacatacagctctacatgactgacttccatggacagaagctcgaggcgatggacagcttggatgatcatgcgatggacagcttggatgatcatgctatgttcatcggttacaatgctcccttgtgccttccaaccaaggatttccctggattaagcccaaattgcgtctacatcacggatgattcactcgagtatatcaactattctagaagaaacaacaagcgagacattggtgtgtggagcatcgaggatcagaaattgcaaagccttggaggagcatcacctattaaagatccttggttaaattggcccgctccaatctggataacaccctcccttttataggggaaatgaatatatgttcctgagacatgattattaaatcttactagttaattgttttgacactggtgtgctaccctagatttgtggcatcataaactattgctgttattgtaacagggtgtcctcaccttttcattagttgataacatttttcatcattgaataac

SEQ ID NO: 10203 - DNA, 604 bp, Oryza sativa
  ref <308>: DATABASE ACCESSION NUMBER: AK107551
  ref <309>: DATABASE ENTRY DATE: 2002-08-28
gattcattcgcgtttcttcctcctcctcctcttctgccgctcctaatcctcccctccaccgccgagcctcctctccaccgactccatccgctggaagcgcgcgaccgtgatgggaggaccgctctctaccctaagcacgtggacacggcgagcatggcagcaaccgccgctgccgcgaggaggaggagggtgcgcggcagccgccgccgccgaccgctcggcgtcgacctggccaaggcagcggccgggaggagggcgcgctcgtcctcagcgttcttggcagcggctcaagaaagggcggcggggtcgatggcgccgcctcgcctcgccgtcggccgctcgcgtggcggtggagctcggcatcgacctggccaaggcggtggtcgggaggagggcatgctcgtcctcggtgttcttggtggcgggtcaagaaagggcgcgcggtcgacagcgttcttggcggcgtttctgtgttttctgcttggtttcttcgtcgcactccagctcctccaccgccggctgggaaagagaaaggattttgtgctttcttgttttatcatctatgttctctttctcagattttaatgaagaataattgtgattc

SEQ ID NO: 10204 - DNA, 1776 bp, Oryza sativa
  ref <308>: DATABASE ACCESSION NUMBER: AK107552
  ref <309>: DATABASE ENTRY DATE: 2002-08-28
aagaaatagcccaagcaaatagcccatgtggtcttcgtagtgaggcaccgccgtcgcctcgccctcgacccctcccgccgccgtgggtttccgcctcgttctcgagcgctctcgccgccgccgcggcgtcctcgctgcggtcttctcccttccttctcctagtctaagccgccgctgtgaagtggagctcgatctgtgccccgtgaaacttcgccgccaactccatggccgccgccgccggaggccagaccgtcggccggagcagcttctctcgagcagcggcacctcatgtggcgtcctcatccaccgccgcaggagtcaagcttggtcctaatggcgccgccttcgtctcctcgggcatccccgacctcgacaggattctaggtgggggttttcttattggatcagttgtaatgatcatggaggactctgatgcgcctcaccacctcctactgcttcggagcttcatggcgcagggtgttgtgcacaaacaaccgctgcttttcgcaggacctatgaaggaaccccgcttgttccttggtacattacctgctgttgcatcttcaaaggaggatggacgacaaagagggatgggggctggaacaagtagcgatggccgaacaagtgacgaggctttgaggatagcttggcagtacaagaaatactttggagaagagaagacttctcatgctgaacacagagacaacaagcaagaatttagcaatgattttgatttacggaagcccttggaaaggcatttacttaatgctcagaatattgaatgtgctagcactcaagaaggagacactcttggtgtcctccaggaccgttgttccacattcttgtccaaacttccgagaaaagatggtggaaatgcgcatgctggacggattgctatacaatcactatgtgcaccacaatgcggatactttgagaaggactgggacatggtctcatttatcagatcgctgaaggccatggttcgtgcatctaatgcagttgctgttataacatttccaaatacagttttatcaagctccttttgtaagagatggcagcacctggcggacacacttctgtcaatcaaagcaattccagatgaggacaaagagttagcaaaactcctcactggatatcaggatatggttggttttttacatgtgcataaggtggcacagactaatagccaggtccccgtcatattggaggcgtccacgttttctctgaagttgcgcaagaggaggtcgctggtgttagaacggttgaatcaagctccagtgggtggatcaggtggtccttcacttgatgcatctggcagttgctcctcatcctcacaaggttcacagcttgatttctagttcagatgctgaacctggtctccgagaagatgggaaggccttcacacgagcttcacagtatcacttgatgactagtagctttcatgtttcagctgagaggatgctcagaaaaagtattgacacagaaggttctggtgttgtgtaattgttgctctctggaaaaatgtagtttgtagaggtttagttctttacaaattaggcaatttggtggatagtatcagccagtccaatcccatgtatggttcagttgtggacttctgctatacaaactcttttgttaatcaggttgaaattgtactacctctgtccaaaaagacttcatttctagcaacgaatctggacaagtactaggaatgaagtcctttcggaaagaaggtatattatatgcagaattgcagatgatgccatataatttcct

SEQ ID NO: 10205 - DNA, 2054 bp, Oryza sativa
  ref <308>: DATABASE ACCESSION NUMBER: AK107553
  ref <309>: DATABASE ENTRY DATE: 2002-08-28
gtgcgacatggcgccccgtgggcgccgcctgacggagcagatccactcggagcaccaggtggtcgccgccctcctcgacaaggcggaggccttggtaatggcggcccgcgccaagggcgcccatggcggcgccgcggcggcgggggagcagcaccccgatcaccctagccgcggcaagaagagcggtcgtttcttgcgccgccaggagaccccaccggaggccgccaccgcgatcggcggggatgtctctccccccgagaagaggaggaagacgacggccgcgagcccgatcgtggaggtggaggttgaggtgatcgagccgaccatgcccaaggcgcagagggaccgcctctacggcctcctcgcctcgctgtcggcggacacgccattgccgccgcacatcgtcggcctgatgcgaagccaatgctgctgcgtcgtggaccctaacggcgaagagatggatgtcgatcttagctccgcgaaggatgctgccttgttccagttgctgaacctgctcgtggaattcgctcaacagcagaccaccaagattattgaggagcaagaaccgcccaagatcgaggcatccgacgccaccagcagctcgtcgatctgcgacctcctcgaggacggtgagatagccgatgagggtgcggccatgggcatggacatctgcggcggcgtctctcccctcatcgtggacagtgctcagctcttgccacttccgaagcaacaagaggatgacgagttgatcgacatctatggtggcgtctcccctgtatcagtcaacaacttccctgattctcctcgttcgagcagcagcaggagcgactcctcatcatcctccagctctagcaatggctctggctcctcctcatcttccagcagtggcgcctcttctggatcatcatcctgcgccggttcatcctcctcgtcgtcgggaagtgacaccgacgccgacgccgacagtgcgagcaacaggccagacaccaccacagatcatcccaccgaagctgaggtgaagccaatggtggagcacgaggtcatggagcaagacaagaagctgaccactgagagggcagcagcatctcctgcatctcagctctgcatcacggacatgggcatagacatctgcggcggcgtctctcccctggtcgtggacaaggctcagttctcgccgctcccgaagcagcaacaggaggatgacgagttgatcgacatctgtggcggcatcgactcccctgtatcggtcagcaagttccctgaaactcctcgctcgagcagcagcgactcttccagcagttcatcttgcagcggttcatcctcctcgtcggaaagaaacgacagtgcgagcagcaggccagacaccaccgctgatcatcccaccgaagctgaagtgaagccaatggaggagcagaagctgatcattgagagggcagcatctcctcacactgagatgcaggagctgatcactgagagggcagcatctcctcacactgagatgcaggagctgatcactgagagggcagcatctcctcgcactgagatgcaggagctgattgcaagggcccaggagaggcagaaactccagcgtgagctcgagagagaggcagcgcgtgagctcgagagaaaggcggcgcgtgagcagctgcaggagatgaagaggacggcgcagccggtcttcgacatcatcgatcccagagacatgaagcagctggggatctccggcgaggcgcagtacattgtcagcccggtgaaatctagggacagcctgcgtcgccgtggaggcggcctgctacagaggcttggcttcttcctgaaagcagagttttgatgagctagagcagagtaggaataggaccatgatctcgtctgtttctgctgtctgttcgattctttggttgcttgtcaagcctgctttgaaccttagaaatctgtttaatgtaatttacttgaagccattgatttatttgcagccaacttgtgctggcagtagccccatcatatgtatactgtacattattctgatgatatatgaatgtgatatgatttgtctt

SEQ ID NO: 10206 - DNA, 2100 bp, Oryza sativa
  ref <308>: DATABASE ACCESSION NUMBER: AK107554
  ref <309>: DATABASE ENTRY DATE: 2002-08-28
ggcgtgtacgccaggatggtgcacctgcagaaggcgccacccgtggcggcgagggaggagcgccaccgcgccgtggatgtggtggagagcgagatggtgtcgttccgcagcgtggagattatgtcggcggtcagcgccaccgagcaccgtcctagccccgcgccgtcgttctgctcggtcgaacactcgacggagattgggggaagctcgtggaccacggtgtggcgcgctccaggaagccctcgaagcttcgcctgctgaagatgaaccggccggagtggaagcaggcgttgcttgggtgcgttggcgccgtcgtcttcggcgcggtgctgccgctgtactcgtacagcctaggctcgttgccggaggtttatttcctcgccgacgatggccagatccgttccaagaccaggttgtactacttcctcttccttggcatcgccgtcgtctgcatcacggcgaacatcgtgcagcactacaacttcgcggtgatgggcgagcgcctgacggagcgtgtccggggccagatgctcgccaagatcctctccttcgaggtcgggtggttcgacgaggacgagaactcgagcgccgcggtgtgcgcgcggctggcgacacagtcgagcaaggtccgctccctcgtcggcgaccgcatgtgcctgctggtccaggcgggcgccacggcgtcgctgggcttctcgctcgcgctcgccgtgtcgtggcgcctcgccacggtgatgatggccatgcagccgctgatcatcgcgagcttctacttcaagaaggtgctcatggctgccatgtccaagaaggccaagaaggcgcaggtgcaggggagccagctcgccagcgaggccgtggtgaaccaccggacgatcaccgcgttctcgtcgcagcggcggatgctccgcctgtacgaggccgcgcaacaaggccccaagaaggacaacgtggcgcactcgtggttctccggcttctgcctgtgcctgtgccagttcagcaacaccggcagcatggcggtcgctctctggtacggaggcaagctcatggccaaggggctcatcactcccacgcacctgttccaggtgttcttcatgctcatgaccatgggaagggtcatcgccgacgccgggagcttgacgtcggacttggcgcaaggcggcgacgcggtgcgctccgtcctcgacacgctggaccgtgaaccgacgatcaaggacgacgacaacgacaacgagaggaagaagaagaaacggaaggagataaaaggcgcgatcgagttcaagaacgtgcacttcagctacccgacgcggccggaggtggccgtgctcgccggattcagcctcgagatcggcgcggggaagacggtggcgctcgtcgggccgagcgggtccggcaagtcgacggtgatcgggctgatcgagcggttctacgacgcgcagaggggctcggtcctggtcgacggcgaggacatcaggagctacagccttgcacgcctccggtcgcaggtggcgctcgtcagccaggagccgacgctcttctccgggacgatacgcgacaacatagcgtacggcgccgccgaagagcacgccaccgaggacgaggtggcccgcgccgcggcgctcgccaacgcccacgggttcatcagcgccatggagcgcgggtacgacacgcgcgtcggggagcgcggcgcgcagctgtcgggggggcagaggcagcggatcgcgctggcgcgggcggtgctgaaggacgcgaggatcctgctgctggacgaggcgacaagcgcgctggacgccgcgtcggagaggctggtgcaggacgccgtggaccggatgctgcgggggaggacgtgcgtcgtggtggcgcaccgcctctcgacggtggagaagtccgacacgatcgcggtggtgaaggacgggagggtggcggagagagggaggcaccacgagctcctcgccgtcggccgcgccgggacgtactacaacctgatcaagctccagcacggcagatcgccgtgccttagtcccatgtgaagtgatggcgtagtccaccacacgaatcattgcgttgcatacatggtcgagcaatggaacggttgaatggatc

SEQ ID NO: 10207 - DNA, 1312 bp, Oryza sativa
  ref <308>: DATABASE ACCESSION NUMBER: AK107555
  ref <309>: DATABASE ENTRY DATE: 2002-08-28
aactcactctttaattcgcctccccctgaatcgtgtgcgtatcgtatcgtggcgtcgtcagttcgcgaaaaaaaacgcccgttcgttttgccgggtgcgtgcaggatggcgttagaggccgtggtgtttccgcagggccatttcggctacgggtgcggaagggactcgccggcgtacgggatgccgtggtgcgacgtcctggctgctgccggcggcggcggcggcttcggtgagttttacggagtggacgagtgggatgaccagctgcaggtcgcctccgtggatgagtgggaggtggcatccaaggataactcggatgcttccacggagggcaaggcggcggcggcggagcgggcggagccggtggccgccgggaggaggaaacggaggcggacgaaggtcgtcaagaacaaggaggagatcgagtgccagcggatgacccacattgccgtcgagcgcaaccgccgccgccagatgaacgagtacctcgccgtgctccgctccctcatgccggcgtcctactcgcagaggggtgatcaagcatcgatcgtcggaggagcaatcaactacgtgaaggagctggagcagctactgcagtcgctggaagtccaaaagagcctcaagaaccgcagcggcgccatggacgccgccggcgattcccctttcgccggcttcttcagcttcccacagtactccacgtcgcctcgcactggctgcagcgccgccgccagcgccgggagctccggcagtgcgagcagcgtcgtcatggacgacacggcgggctccgcggagagcggccggcagtcggcggccatcgccgacatcgaggtgaccatggtggaagggcacgcgagcctcaaggtgctcgcgcggcggcgaccgaagcagctgctgaagctggtcgtcgggctgcagcagctgcgcatcccgccgctgcatctcaacgtgaccaccgtcgacgccatggtcctctactccttcagcctcaaggtggaggatgattccaagctgggctctgtggaagacattgccaccgctgtgcatcagatcctgggcagcattcagcagcaggaggccgtcctctccatcagctgacgccgcgatcgatggagacgacaaccgagacggccgccatgtgaagcctctgcctcgtccgtcctggaaatggaaccatggcgcctcgatcgatagcttgttagcttgtaatgtgtgaatgtgattgtaccctagccaacagagtgctgcatgcatgcagtatctccggcgaccttaatgagaaatctataccaacattttgagctcttgtaaacgt

SEQ ID NO: 10208 - DNA, 1771 bp, Oryza sativa
  ref <308>: DATABASE ACCESSION NUMBER: AK107556
  ref <309>: DATABASE ENTRY DATE: 2002-08-28
cgagccatgtccacctccgcacccacctcgtcgcctgagccgccggagttcatccgcgggagcctcatcccggctctccccgacgacctggccatccactgcgtcgccctgctgccgcgcgccgcgcacccctccctcgcgctcgtctcccgcgccttccacaccttgctgtgccgcgacccgggtcccctcctggccgcgcgccgccgcctccgcctctccgacccccacgtcatcctctccctccgcccgccggcctccgcctcgcctctcttcttcctcctcctcccgcatcccggatggccaccgctgcctctcccgtcccctcccgtccccgtctcctcctcctcctcggtcgccgtcgacggcaaccgggtgttcctcttcggcgggtccgtctccggagtgccgtccccgtcggtgcagatcttggacccccgcaccagatcctggtcagtcggcccgcgcctctcctctccgcgggagttcgccgccgccgttgcccactccggcgtactattcgtcgccggcggttgtgttccttcctcccccttctgggctgagtccctgaacctctcctccccggatgcaaagtggtctccggtccccagcccgccccacttccgggagaagtggatgcacggctccgcctcgctcgccgggaaggtcctcgcggtggccgatcgcggcggcttggcctacgacccggctgcgccgcctactgaggcatgggcgccggtttctccgatccttgacatggggtggaagggccgtgcagctgtggtcggtggaatcctctactcctacgattacttggggcaggtcaagggctatgatccggacaccgattgctggagcaaggtggaagggttggagcaggagctgcccaagttcttgtgtggtgccactctcgccaatgtcggtgaactgctctacttggtttgggaagggaagtggaaagggaaagggaaagcgaaaggaaagggcgaagcaaggagcatggtggtgattgattgggctgccattgcggtgacgaaagccgaagagggccggctaacggggaaggtgttgtcaagggacaccattgtattcaaggacatgccaaaggggtcagcaatcacacattgcatcgcattggagctgtgacgatggttgctccagtagcccagtcataaatcaaatggcatccatgttttaaatgttctctgctgatttgaggatggaaaaactcagtattgtggtaggctggtagcacctcctgctgagaaatgaggatgcttcactactgggcagcagagcactgataaatctggctggatgacaagttaaagataattcagaaaattgtgtttcaattccttatcgtctggatgctggaagaaggcatttggaattctacccagcaaaaatcatgcatttggatctctcttagacattgaacatatttgatgaagcagaagttttgccttaaacactatttattcttcattgccggtcagttgtaattgtaagataaccaatgtagcttgtagccctcttgtatagttgtatggcctattgctgagcttgctgtgctcgtgtgtggcagcattagttgtgtttaaacatatcgaattactttgctagcttgggccagtagtgcaaattgctaaaaccagtttggcccaagagaaacagcacctacagttgtctcattctgtgcagagtttctatccatggatgtacccctaaataaactatgaaattaattcatgcattctcttctaggacc

SEQ ID NO: 10209 - DNA, 1723 bp, Oryza sativa
  ref <308>: DATABASE ACCESSION NUMBER: AK107557
  ref <309>: DATABASE ENTRY DATE: 2002-08-28
atttctctgcaacactggatcgcactgccgccgccgccgacgcctcaacttatcgacagcgatcgatagccacggccggcgacgcacggcacgactctctcaatcggtcgcggccacgcgcggtcggcgaggccaccgtgtacgccggtaagaacacgccgccaagaggcctaagctagcagttggacaaaagcccaaattaaccatggagcactcaccttcaaacaggatgaccttccttctccttctcctcctccaactcctcattggatgcacacactatgctcaggccaaccctggccatcacatgatcgactccatcttcagcttcggcaactcgtactccgacaccggcaacttcgtcaagcttgccgcgccgctgcttcccgtcatcccattggacaacctcccctacggcgagaccttcttcggccaccccgctggccgtgcctccaatggccgactcatcatcgacttcatcgccgggcactttggagtccctttcctccccccatatcttggccaggtgcagaacttcagccatggcgccaacttcgccgtcgtcggcgccacggcgctcgacctcgccttcttccagaagaacaacatcacaaacgttcccccgttcaacagctcactgagcgtgcagctcgagtggttccacaagctcagacctaccttgtgctcgaaaacccaagggtgcaaacattacttcgagagatcgctcttcttcatgggagagttcggcgggaacgactacgtcttcctcttggccgccggcaaaaccgtcgacgaagtcatgtcatgctacgtaccaaaggtcatcggagccatctctgccggcgtcgaggcggtgatcgaggagggagccaggtacgtggtggtgccgggccagcagccgacgggttgcctcccggtcgtcctcacgccatacgcgagcccgaacgcgacggactacgacgccggcaccggctgcctgtggcggttcaacgagctcgcacgctaccacaacgcggcgctgttggcggcggtgtcgctgctccggcgcaagtacccgtcggccaccatcgtctttgccgactactacgacccggtgatcgagttcatgcagaagccagacgatttcgcattcagtgactcgtccaagctccgggcgtgctgcggcggcggcggcggaccatacaactacaacgcgacggtggcgtgcggcctcccaggcacaagcgtgtgcccgacccccaacacgtccatcaactgggacgggatccacctcacggaggcggcctacgcccgcatcgccgcctgctggctgcacggcccgcacgcgcatccgcccatcctggcggccgtgcgccgccgcacgtagacggatttgaggttatgtagaaatccatctactgaaatgctgataatactctaagctaccctttgtcaacttcactttagtttttcacaagctcgttttgtaaactgataaacgatacgttttctaataaaaaatagaataggaaagttactttgaaaagatcatattatttttcaaaaataagttaagttaatatttaattaatcatgtgttcatgcatgggtatcacgtaagtggatatatggtacttattgaatcttttatgggcctgagtcggtatgtaagatatatatatcatacattgtttatcgatgccgattatataattcttattatgatgtcgtagttgctattgtt

SEQ ID NO: 10210 - DNA, 504 bp, Oryza sativa
  ref <308>: DATABASE ACCESSION NUMBER: AK107558
  ref <309>: DATABASE ENTRY DATE: 2002-08-28
atcatcaagtcacccaccaagcgaagcaaacccatcgcatcaaccaccaaatcgaaggcacgtaggtgagcaccaacagctacatcggccatggctcgcgcgctcgttctcgtcgtgatcctcctcgccgctatcgcagtggcaccgttcgcggaagcctcgacagtcaccggtggctccagggtattgttggcctccgacgcgcccgctgagagcccggctgggcctgcggcggccccaggcccagcggaagagtccagcagtgaatctgctccatctccgagcgccgctgatgcctgatcgagtaataatgaagtccaagtgaataattcttcatcccaagaacattgatcaagcatatatgtcctacccttccttcataaaggctaacagagcctcatttctatttttatttttattttttattgctttcttctgttgattgatcgtgttaatcatgcaatatgatgagttaatataagttcgatgaagatatttgtttcc

SEQ ID NO: 10211 - DNA, 2349 bp, Oryza sativa
  ref <308>: DATABASE ACCESSION NUMBER: AK107559
  ref <309>: DATABASE ENTRY DATE: 2002-08-28
agcgatcgatctcgaccgcaccggccccgcatgcctgcccactgcccaaataaagcgtcgtcgatcgaccgcgcgcgatcatggcgatggtcgtcgcggggagccatcggccgccgccgccgccgcagtcgctgcggctggtcccgccaccgccgccgcagcctcctcctcctcctctgacgtacaggcaccactgcaaggtgtgcaagaaggggttcatgtgcggtcgcgcgctcggcggccacatgagggcgcacggcatcggcgacgacaacgacacgatggacgacgacgacggccgcgatgatgatcattcgctgtcaccgtgcgatggtggtggcgagccgtcggaggcagccgggagcccgacgacgacgacgacgaaacgtatgtacgcgctgcggaccaatcccgggcggccaaggaactgcaggacatgcgagaactgcgggaaggagttcacgtcgtggaagacgttgctggatcatggcaggtgcggccttgacgaggaggacggtcgcctcgacgtctcgctccgttcgccgccgcttcacgacggtggcgacgaaaacgacggcgaggaggaggaggagggggacgacctcacactggctgcgggcgggtggtcgaaagggaagcgctcgcgccgtgctaaagtgatggccgtcgggaccggctccgtgtccgagctacagctgccggctccgtctaccgaagaggaagacctcgccaactttctcgtgatgctctcttcttcttcgtcatcatcgtcgcgtgttgcacagccagccatcgtcgtcgacgacgcggaccaagagtcctgcgcatcaggtagcaaggacgaggagaggaacaggttcttggtgccgcagccaatctcgatggcagcccccatgatggctcagatgacagtgatcgctccgcaagtggtgccacagcacatctcgaccgtgccacgtggcatgttcgagtgcaaggcatgcaagaaggtgtttacatcgcaccaggctcttggcgggcaccgtgccagccacaagaaggtgaaaggatgcttcgccgcgaagctcgagagcagccgcaacgagactagtcagactcagactcagcagcaacacgtctcagccgctcctcatgacaataccagggccaccacctctcatgtcatcaccagcgatatcagcatggatgcaaacacgatcggtgccagtgctgatgctgacggcaaggcagcggcaagcggcgttggcgcaggtgaaattgtcctcgccggagcttcgtcgacggatatggccatgatgatgtcggtcgaggacttcgcgccgacaccgttggcgccatccgccgtctcaccgttcaagaagaaggggaaggtgcacgagtgctccatctgccaccgggtgttcacgtcggggcaagcgctcggcggccacaagcgatgccactggctgacgtcgggcgcaacggacccgctcacgaagctccagcccgtcgcccaagaccacgccatgatggccgccatgtgccaccagctcacgctcgggcgcccaatattcgaccctaccgaccagcggatactagaccttaacgtgccgacgaacccactggcagaagcggtcgcggccaggcagcagcagcagcagcaggtcgccgctctcaacgacggcgcactctgcctcaacgcggcggcgtcggtgtacctgcagtcctggacagggcacagcaacgggagccacgtgaacaagaccaccgcgacgagcagccgcatcaacgacgcggccggcggcgtgaccacggaggacgatgaagcggacagcacgagcgccaagagagccaagatcggcgacctcaaggacatgaaagtggcaggggagtcgttgccctggctgcaggttggcatcggaatttcatcagagagcaaagaaaagaacactcaagagtgacctggtcatgacaaggaggtcatgccgactaatgaactaagaaattaattaattaattaattagtgctaatctaatccatatatatatatacatattgtaggtgtacgtactatatcaatgctttatgtgatcgggatatatgtatgtgtatatacatccaatgtaagtatttacaagtagggtcaattcatgtgttcctaaaggtttgaggcaacatctagggacgtattgcttgggggactgtaaattaataggctagcaagcttgattctaaaaggtttccttactgtacgattctttgaggagccttgctttttatttttatttttttccttttattttttctattttgtaactaaccgattatttaatttgctgcttccaaaatgtatatatgcaagttgattt

SEQ ID NO: 10212 - DNA, 1038 bp, Oryza sativa
  ref <308>: DATABASE ACCESSION NUMBER: AK107560
  ref <309>: DATABASE ENTRY DATE: 2002-08-28
attgcgccgccgccgagctctgccgtggccatgaagcagcatcagcagcaggaggctacggcctgttcatcagaacagcagattgttccatggctgaagcacaacaagaagtcgcagcagcagcgaaagggtactggtcttctccctcctcgccgtcgtcgatgtcccccactccgtcacctccaccggcggcagctgtccatggaggcggaggaagagcggaggagtccaccatcgccgccgctgcaacgccagccgcacggagtttggctgcaggggacaacggcatgcaggtgagtggccatggcgagcatgctgggttgagctccgggcggcgccgtggccggcaaaaaggatccgggcggcgccagatccttgccaatctaggtcagtacatcgccgtccacccgcgtgcgcactcgccatggccagcggcagtggcgctggcgccggccttccactcgaagagctagggcttgacggtgctgtactcgacgcgctctggcgatgcgccgccgccgccgccccgccaccgtcgcgcctctgctccgctgcgaggaagaaggggaaaagaaaagaagagagagagaggaagccgtgcgccgggatgccgccatgcgtcgtcaccgtcggcggtgaaccctggcgatgcgccgctgccgccgccccgctgtggccgccgtcgcgcctctgctccgctgcgaggaagaaggggaaaagaaaagaagagagagaggaagaacagtgtcaaagggttattttggtacttacacaactctttctctctccatttcaaccgaaaataataaaataatgggaggagtgtccagcagctaattaccacttttttacagtgttcacgagcaaatacacgtttttgggtgtctcacagcaaaggccacaatctttcggtgtcctgtagcaaattttgcctaaattaaatttatgtatcatatactgctatcgtttttttccccaagttggattcttgactgctattcagatttggaaatgtcaacaatctgcaatttttgtgcg

SEQ ID NO: 10213 - DNA, 2050 bp, Oryza sativa
  ref <308>: DATABASE ACCESSION NUMBER: AK107561
  ref <309>: DATABASE ENTRY DATE: 2002-08-28
ggtctccctcaccgccgcatcctcctccgccgcatctcccctcctcccgtcgcctccccagcaacctccgccgccgccgccacgacgacgagcctccgagtccgaccaccggcaatggcgccaaccctgccttccgcacgccgcacctccgcaccgcctaccgcaagccggtgccacccgtggcggcgacgggggagggcgaggcggtcctcgccgccgctcctcaccttcctcttccccatcggccttctccccgatcgcctccctcgtccaactactcctcccttccagagaagcgctgccactgtgatccttttccagacgcgagctcgaaggcgctggttgcccccaagctcgaagaggtcgaggaggtggttaggttttgcgccgccgagctcagcgaagaggccaaggagatgaggcacacctcctccccctcccccttttctccggttggtggtcaggctttgggctgttcgatctggcgccgctgagctcagcacgatgaaggccgaggaggcgaggcgcacctccaccgttgcccctcgcctccccatcttcctctccctgcccgatctggcccgaggactcgaggagtggagagggggaggagccacggtgatgttgtggtcgctcgccgagtcgccgttgtctgcagcttctggaaagaaatcaagatcttggattattgccttaagcgaggaaaagggaaaagtatacaggtgcccttgcatgactttgcttgtttgtacaggacatcatatagcctatctcccttatcatggtagtttgactggttgtaaggatcttaattagttatatccaatttacagatttattgattatttgaacaactagggcaatttgtcctgttactacaaattttagagcaattttttgtgtataactttttaatctccaaaaacatgccttaagctgactatataaaagtttagttggtgaaagttcagtttagtttggaactttggagtaccatttatcttgaaacatagaggaagtgcatgacactgaatatatattaatgcaaaaggactgtttgagtgaggtaataaatgagaaatagtccaataaagaacatatcaacactaattagatgatgcagtagtaggaaacatatatgatgatttcagtcatgtgcttatggttttatccaccatctactttttttaatcttttattcatactgctgcttaattagtggatgcaatactagaatggaaatgtatggcgtgaaacttctagcccgcttttgcttttattctgaatgtagctgccaagctagtcttcagtatttgcagtactcattgagctttgatttggtcctcagttagtgttaatacttttgccccttctacaacttatttactccgcatctctctctttctgttttgggcacaggagaaaatattagttctctgaagtagacagtgtgttccttaataaatatcaggggtctcattagttgcccaaaggcttattataagccgtaacggtttattagcgactagaaaataatttgtgtctaaaaattttatatatgtgttgttagtgacttaaaaggcaatgctgaaaaaaaaactacgttgaaaatatctcaaaatcaacttcaaaattaagtttcaaaattcaaatgttggctttggctttttatgccaaccgatgtggctttggcatacctttcagttagtagctaatgacagtctttgatagcatatattgcttttcatccagtattcatggcattcaatattattatctgataatgtaagtcgatcattttgcaggtctgatctttgttgatcttgcacttaccttggtggttacatgcattttggggtgtgcctttggcgattttgaacaggcctagatatattgctttgctatgttgacgtttattagagtagataattgtatttctcgtaatgtggaaatggcaaagattatgtattgctacaaaattgtatagttgctcttcccaattccatgtacaaggcatttctcattgaatggcaagatcatgtattgctgg

SEQ ID NO: 10214 - DNA, 1589 bp, Oryza sativa
  ref <308>: DATABASE ACCESSION NUMBER: AK107562
  ref <309>: DATABASE ENTRY DATE: 2002-08-28
tacgcgcgcgcgcccaccaccgccggcgtcacacctcgccaggcgccagccacatcaaagcttcctctcctacctcgcccaaatgggcgccgccggcgacaacgcagccaaggcccctgcagccgcagccggcagtaatgggaagggcactgccgcctccatggacgtcgtgtcgtcgtcgtcgtcgtcttctccggcgccggcgccgtcggtgctcaagtcggtgctgctctcctacgcgtacgtaagcgtgtggatcacactcagcttctcggtgatcgtgtacaacaagtacatccttgatcccaagatgtacaactggccattccccatctccctcaccatgatccacatggcgttctgcgcctccctcgccgtggtgctcgttcgcgtcctccgcgtcgtcgccgtgccggcgtcgccgcccatgacgcccagcctctacgccgcctccgtcgtgcccatcggcgcgctctacgcgctgtcgctctggttctccaactccgcatacatctacctttccgtctccttcatccagatgctcaaggcgctcatgcccgtcgccgtctactccctcgccgtcgcgttccgcaccgactccttccgccgcgcctccatgctcaacatgctcggcatctccgcgggcgtcgccgtcgcggcctacggcgaggctcggttcgacgcgttcggcgtcatgctgcagctcgccgccgtcgccgccgaggccacgcggctcgtgctcatccagatactgctcacctccaagggcatgtcgctgaaccccatcacctcgctctactacatcgcgccgtgctgcctcgtgttcttgacgctgccatggtacttcgtcgagctgccgcggctgcgcgccgccgcgggcgccgccgcccggcccgacgtgttcgtgttcgggacgaactcgctgtgcgcgttcgcgctcaacctggcggtgttcctgctggtggggaagacgtcggcgctgaccatgaacgtggccggcgtcgtcaaggactggctgctcatcgccttctcctggacagtgatcaaggacaccgtcacgccggtcaacctcgtcggctatggcattgccttcctcggcgtcgcctactacaaccatgccaagctgcaggggctcaaggccagggaggcagagaggagggccgcgtcaatggcgacggcgaaggacggcgacgcagaagccggtgcgcggctgctgccggagaaagatgccggtgagcagaagaactgatcaaagtcgaacaccaagcatagtacattaatgaaggttgataaatcaacggcattcctttgtcatctttaggatgcctgaactgtggtttaattgacccttgatgaacttcaagctgcatatttaagtttgtgaccattcattatcatggagaatacagatcattttagatatgcatttgattgaggaacaatgcatgtgattcagcaggagatagcaacacaggaatgatttatccaatcccttttcgtcaaaaggggcaagttatgtagatgcatgatgtaacgggagaacaactcgaaacttcttaatccattggctactaaatatctttagtttc

SEQ ID NO: 10215 - DNA, 827 bp, Oryza sativa
  ref <308>: DATABASE ACCESSION NUMBER: AK107563
  ref <309>: DATABASE ENTRY DATE: 2002-08-28
atcgacgacaatggcggcgacacgcggctccgtgcggctcctcctcctgatcctcctcctccgccccgccgcggcggggagcccactgatgatgacgtgcgccaagacgccgcacccggacgtgtgcatcaccgtgctgggcgccatcccggagtgcaggaacaccggcgacccgcgcgtcctcgccgagaacgccgtccgctccgccgccaccatcggcgcggcggcgggcacgttcgcgcgcgcggagctcgacatcgtgaaggacaccgacatgtggcagtgcctggacgagtgcgcgcaggacatcgaggaggccgtctcccacctcgacgacaccgagggcggcgtcgtcgacctcgacgccaagttcaaggacgtgcggctgttcatggacgtcgccgagagggacacgtggtcgtgcgaggagagctgccgggacgcgccggactccaccgtcaaggccaccctgctcgacaagaacgaggcgttcgagaagttcatgcgggtcaccggcgcgctcatcgagatggtcatcggaacggccgacgagccggcgccggagccgtcagctgatgaacactcggacgaactaataccggatgtccagttatgatcaattcataatgtactaatcgctcatgtgacttctcatctccatttttgatcgatcgtgttcaggtattttgattaggttaattaagggcccgttcaatttgacgtcattttcaaccataccattttttttaaagttgtcaaaaaaatgtctacgtttagtttgctactaaatttgataaatatataagaaatcctgccaaaatttggac

SEQ ID NO: 10216 - DNA, 1723 bp, Oryza sativa
  ref <308>: DATABASE ACCESSION NUMBER: AK107564
  ref <309>: DATABASE ENTRY DATE: 2002-08-28
actcaggtcccgcatggccgccgccgccgccgcggcgctcatcaccgccgcctccactcctttcccgctggtctccttccgcagccggcgggatggccacctgagcctttcgcctcctcgccgccccggcgccgggcgctgcagggcctcggcgccgacgttccaggggggacccgccgccagctacgcccgcgagatggagcgcctctccgccaaggagtccctcctcctcgccttcagagatgctggagggtttgaatccttggttagtggaaagactacagggatgcagaagattgatgtcaatgagcggattgttgggctcgagcgtctaaaccccactccacggcccacaacgtaagtgtccagctcagaaaatttatcatgttctgcagatcatttgtagtttgatgaccatgcttttggttgcatgtctccaggagaacttccataatttgtctgtttcacttcacagatctccctttctggaaggtcgatggaactttgaatggtttggtgacagcagtcctggagcacttgcagcccgtcttctgtttgagaggtcacctacaactgttgcacactttacaggacttgatgtcctgatcaaggatggatactccaaaatttcttccaacgtgaagttcttaaatacggtgcaaagcaagttcctgctgactactcagttgtctgtggagggtcctattaggatgaaagaggaatatgtcgagggcctaatagagatccctaggatcagagaagaaacactgcctgatcaactaaagggtttctttggacaaactgcaggtgctctgcaacaactccctgcccccataagggacgctgtttcagaggggattaaattgccacttaatgggatgttccagcgcctattcatgatttcttacttggatgaggaaatactgattatcagagatgcatctggagcacctgatgtcctaacaagattggaagggccacagccaaattcaattgatggcacatcagacgcagtgctgtcagaatatgaaagctagtgttaattgggtgcactaattagaacgtcgtgattagttttttgttcttctgttcagccacttttcacgcttgcacatacataataactgtagtgcgtaacagcatccacttgaatggattaacttacctcctttcttgtgagcagagtacatactgatactgctcttcaggatttgttatggctgtcagctcatggaataagatgaatatctcgacataaacattggactggcgaaccactttgagcaggcctcctcccagatatgaacaggcaaacaaatctgtttctgatttccaatagcacaaactaaagcctgctctgctcgtatcagcagttgcaggcttgcagcatcagtggggtctacagcaaccactccacacgtcaatgacgcaaacatttgaaacagccaactgttaatgagatcgatttacaagcatagagggttctttctttttagtcaagggcaatgttctacagagatcactgggttagcccgagacactttatcagaaaaattctgccgtgtcagacaaaagctggaagctactaaaacccatctaaataaaagaagaaatgggtgtttctattccattttcactttatcagttatgtagtgtatttcaaagagtcttcaaaagacaaaaatgcaaagaaactgaggaagataatatttgacgcttcatc

SEQ ID NO: 10217 - DNA, 1009 bp, Oryza sativa
  ref <308>: DATABASE ACCESSION NUMBER: AK107565
  ref <309>: DATABASE ENTRY DATE: 2002-08-28
gtccgattctaactttatgccaacgaggacgcgttgccatataagatcatccaatgcatctagtgaatcgatcccgatcgatcagaattaatcttatctcccgtcctcctcgtcgccgctactcgccatcgacgatcccatggaatcaggatcgatggatatcacagccatcgacgatcccaaggagtttgacatgctgctgggacgatggcacccgatcgaaggaagtagcggctacgacgggtcaccgttttgtgaaaagaggatccagatcgtgacggggaagacgacgacaccgccgccgccgccggccacaccgttgtgtgcggcggctaggggcaggtttgctgcctgccccgccgtcaggcaccgtacgcccaaggagaacgcgcgcctccggtacgtcgaccccggcaggcagcgccgtgccgccgaagggtgcacgccgctggggcgctcccgcgacgtgcggcgccaccggcgcgtctaccgaatcaccgtcttcgccgccgtcgaccacgactccttcgccgcccgcggcgccgaagggaccatgctcctccaccgccacgtccaacgctcggtcgtcgatggccgcgcctcgcgcatctcggtcggttgccggatcaagcaccaccgcctgagcggcttggtccccgccgccgagacgggcgccacttgcccgccgccggccgctgactcggcggccatggagggcggcgtcgcggagtcagagtcgccgccgccgccgcagcaccctctcgccgacgctctcgcgtcgagcttggattcttgcacgctggcctcagacacggcggatcccggggacggcgacctcgcgctagatttaccgttcatgtcagtttgacagaggagacagcagcctcgcgctagatcgagttagtgatctacttaggttgcatgcatatttgatttcaatttaggttaccaaattagcacgcatgtttgatcacgtctcaatttgaataaagctctatgctcaccctac

SEQ ID NO: 10218 - DNA, 2248 bp, Oryza sativa
  ref <308>: DATABASE ACCESSION NUMBER: AK107566
  ref <309>: DATABASE ENTRY DATE: 2002-08-28
gcgaacaaatattagttgccaaattctaagtccaaacactgctgtgatgggagagatcatgaaggaggcaccacattctctgtggagaagcaggctagggatgcctttctcaggtctcgctgctgctgccttattgttgctgctgctctccatggccaactccaccattgcatgccttgagcaggagaagagctctctcctccggttccttgctgggctatcgcatgacaatggcatcgccatgtcgtggcggaatggcatcgactgctgcgcgtgggaaggcatcacctgcagtgaagacggggctataattgaagtctatttggtttctaaaggcctagaagggcagatctcaccatcccttggagagctcagaagcttgctgtacctcaacctgtcctacaacttgctctccggtggccttcctgaggagctgatgtcctctggcagcatcatcgtccttgatgtcagcttcaaccgcctcgacggggacctgcaagagctgaattcatcagtatctgaccggccactgcaggttctgaatatctcaagcaacaggtttacaggagaatttccatccaccacatgggagaaaatgaggagcctggttgcaatcaacgccagcaacaacagttttactgggcagatagcttcctctttctgtaccggcttgccatccttcgccatgcttgatgttagctacaaccagttcagtggcagcatcccccctggaatagggaaacgcactgcccttaaagtgctcaaggctggtcacaacaacatcagtggagccctcccagatgatctcttccatgccacatcactagagtgcctctcttttcctaacaatgatttgcaaggaacaattgatggtgtactcatgataaagctcagcaatctggtttttcttgatcttgcgtggaacagattcagtggcacaataccagattctataggcaagctgaagagactacaggagtttcacatgaacaacaacaacatatctggggagctgccatcatccttgggtgattgcacaaatgtaatcaccatcaaccttgaaaataacaagttggcaggagagctttctaaggttaacttctccaacctacacaatctgcaagctttgggcctttcctcgaattacttcaccggcacgattccagatagcatctactcatgcggtactttaacttggttgaggttatctcgcaataagcttcaaggtcagttgacggagaaattagaaaatttgaaatcccttaccttcgtatctctttcctacaacaattttacaaatatcacaggttcacttcacatactcaagagcttaagaaacctcactaccttgctaattgggagtaatttcatacatgaagctatgccagaggacgaaacaattgatggttttgagaatcttcatgttcttgccataaataactgcgcactgactggaaaaatacctaattggctctcaaagctaaaaaagttggaacttctacttttacacaacaatcaactcagtggaccaataccaacctggatcaatagcctaaacttccttaagtatatagacttatccaataatagccttataggggacataccaacagcactgatggagatgccgatgctaaaatccgacaagattgaagatcacccagatggcccaagagtctccccgttcacaatttatgtgggtgtatctttgtgttttcagtaccgtgcagctagtgcattccccaaaatgttgaatctaggtaataacaaattaagtggtctgatccctgtggagattggtcagttgaaagcactgctttcactcaacttgagcttcaacaatttacatggggagatcccccaatcgatcagtgacatcaagaatctgatggggctagacctgtcttccaaccatctgacaggtgcaatcccatcggcactggtgaaccttcacttcctttctgaattcaacgtttcctacaatgaccttcaagggcctgtaccaattggaggccagttcagcacatttccaagttctagttttgctggtaacccaaagctatgcagcccaatgcttgtacagcattgcaatttggcagaagcagctccaacctcccctacctccacaaagcagtatattgacaaggttgtctttgcaattggatttggtgtgttctttggaataggtgtgctatatgatcagacaatcatatccagatattttggctaaagcagttccaatagagac

SEQ ID NO: 10219 - DNA, 1886 bp, Oryza sativa
  ref <308>: DATABASE ACCESSION NUMBER: AK107567
  ref <309>: DATABASE ENTRY DATE: 2002-08-28
aacacaatcttctacgacgccggctcgcccctcgcccctcgcttgaacgcttagagatacagtttttgccgcgctagttgatccctcctgcattcgcaccatggtggaggctgcctcggctgcgccggcgacggtggtcgttccgctgacgcagacgctctgcgcgaatgcgcctgcgacgagcgtcaccgtcgtttcgaagcagaccgttcggcccgacggcgcgtcggcggttggagacgtcaagctctcggtctccgacatgccgatgctgtcgtgccactacatccagaaggggctcttcttcccgccccctggcgtgccgatcgcctccctcgtgtcgtcgctcgtgtgcgcgctctcccgggcgctcgcggtgttccctgccctcgccggccggctcgtcacgctggatgatggccgcatcgtcatccggtgcgacggcgtggccgttgagttctaccacgcggtcgcccccgctctgtcgctgggagacttcctcgtgcccaacgccgacgtgccgaccaggctgacgaaggatttgttccccatggaccgcaccgtgagctacgacggccaccgccgtccgctcacctcgttccagctcaccgtgctcggcgatggagctgtcttcgtcggcttcgtcgctaaccacgccgtcgtggacggcacctccttctggcacttctttaacacgtgggcaggtctctgccgcggcacgccggtccagccgccggacttgcgccggaacttctttggcgactccacggccgtcatccgcttccccggtggcgcgggtcctgccgtcaccttcgacgccgacgcgcccctccgcgagcgagtcctccatttcagcgccgccgccattcgcgagctgaaggccaaggccaaccagtggaaaagatccgacaaatttgccgaggctaacgggaagcatgtggatgaaacgaaggctcatggcggttacagagagatctcgtcgttccaatcgctgtgcgcgcatatctggagggcggtgacgcgatcccggcggctgctggcggccgacgcgaccacgatgttccgcatggcggtgaactgccggcaccgcctgcgcccggcgatctccccgctctacttcggcaacgccatccagagcgtagccacaaccgcgacggtggccgagctggcgtccaacgacctgcggtgggcggcggccaggctgaacgcgaccgtggtggcgcacgaggacggcgccatccgccgggccgcggcggagtgggaggccgcgccgcggtgcttcccgctgggcaaccccgacggcgcggcgctcacgatggggagctcgccccggttccctatgtacgacggcaacgacttcgggtggggcagggcgatcgccgtgcggagcgggcgcgccaacaagttcgacggcaagatgtcggcgttcccgagccaggctggggacggcagcgtcgacgtcgagttttgcctcgcgcccgacaccatggcccgcctgctcggtgaccacgagttcttgcagtacgtgtcgcgtgcaccgtgacgcacgtattctggtgtggtgcagtgagcgaggggacgatcacgagatgcgagttccccacatgacatgattatctctctggtggtgatgcagattgcagtagccgctggacacatacgttgctgtgctggattggtgtatgcttgcaaaaatatctaagctatatatccgagtatccgttactcttctggtattccatccattaagcggttggccaagtttgaacagccgcacagagagttgcttttaggatcaagtggagtcgtgctctgttccttcctccctgttagaagtacttgtcttgtgagttcgatggataattatttgagtacaaatttcacac

SEQ ID NO: 10220 - DNA, 1129 bp, Oryza sativa
  ref <308>: DATABASE ACCESSION NUMBER: AK107568
  ref <309>: DATABASE ENTRY DATE: 2002-08-28
acctcctcgaattgtcgaggaagctcatgccttgatttttctctgttttgaactgcaattgcagggatggcggaccactttgcagtaatggccggccggttgctaacggaatcgactgttcagtctgccattgatgaggcctctgctgctgccatgccttcttcagtgattgcttctgaacataatgatgttcaagatgagagggagaagagtggtgttcttgtagaatgtagaatttgccaggaagaggatgatcagacctacatggagaccccttgctcctgcaggggcagcttgaagtatgctcatcgcaaatgcattcagaggtggtgtgatgagaagggagacaccatatgtgagatatgcttacagcaatacacaccaaactacacagcacctgcaaagttgtttcaacatggaagaaactcaattttcttcagaactcctggttacattcaagcacaggtcatgcaaaacacagaccgaagtgctgctgcctcaacaagctacgatcctgaactccccaacccagaaggtgtaatctattgtcgcatagttgctctaactctgatggtactcttgctactccacgacgcaatctcggttttcctcggtgatcacgatgcttacaccgtcgcaatgatcactctgctgatgcttagaacggctggaatcgttatacctgtgtacatcatcttgctgtccttaactgaactgcttcatcgacgcaaccagcggcagatttcagacgctgctgctgcggtgaacatcaaccagcaggcgccacagtcaccgcggcgacagcatgtcatcagcatccaataagttcagagatggaacatgtgtacgtgtatatacaaaggcatgtcacttggatgaggttttgggctcaagatgtgcgatcaagatacgaagatatgcaagacattggtgtgatgtgtgagtagttgctctttgtaaatattgtgaaaaaaaaagtgcatgcgtaagcggccactcgcttcttaagtaaatcaagatgaagtgagattactgtacataagaagaatacagacaatacacgatgaaaatgggtacagctgatgtacctgcttaagttgaaagtaacatgagatttttttttgagggt

SEQ ID NO: 10221 - DNA, 1277 bp, Oryza sativa
  ref <308>: DATABASE ACCESSION NUMBER: AK107569
  ref <309>: DATABASE ENTRY DATE: 2002-08-28
aatgcaaatgccatttcttgcaatccatcgaatgatcattcgatcgatccatgcaacaacatcctgatttgtttttctcccttccccttcccctgacataagccggcctggctgattgcgttgtgtaactataactcttatcttctaatatattaacgtgtaattctttttgcgcgttcgcggaaaaaaacagcatcctgatttgatcttgattcttgggaagcttttcttggcaatggaggtggagtcggcggcgaggaggatgtggggatacctgcgggcggtgttcttcatggtgaggaaaggggtgatctccaagcggaggctgctgctcggcatgcagctcgccatgcggctcaagcgccggaaccgcgccgtcgcgcgctcggtggccagcctcctctcccaccaccacggcggcggcggcggcggcgcgctgcgccggcggcgggagtacgagttctcgtgcagcaacagccccgacgtcgtgcatggaggtgcggcgtcgaggcggcggctcgcctacttcccttgcctcagcgcggaggacgacgtcgtcgacgccggcgcgagcgcgacggcggcagcggcgttgcagaggatcgagtactatggatacgccgcggcggcggcgtcctccccggcgccgtcctcgccggggttcatggtgcgggatgagctgctcgcaccgggggacgagtgcagcacgccggggctctcgccgctgctgggcaccaccggcggctactccgtgcgggtctccaactactcgtcggaggaggaggaggacggcgactacggccacgccgacggcggcggcggcggcgaggccgtggacgacgaggcggaggagttcatcaggcgcttctacgagcagctgcgccgccagaaccacgtcgcgctgctcccctacatgacggaatccgccccgtgatcggtcgaacgttcgtcccgtccacgccgcgccgcgccgcgtcgcgccacgcgcgcccagagcacgaacgccggcgaggccgcgcgcgagctcgatcacgcggtggcccatcgcctcgccgccatggcgccatcgatcatgtacacatacgagtcatgtatacggagcttgaattacatggtgcgtacgtaatgcgaagatctgaagggagtccccatggttttggttgctgcagggacagatgtaaatcttgtgcaaatctttgtgtattttgagcttatttgtaatttgtaatgaaaaatattatgtcatctctctcgtcttaaaaaaaaaaaaaaaaaac

SEQ ID NO: 10222 - DNA, 1472 bp, Oryza sativa
  ref <308>: DATABASE ACCESSION NUMBER: AK107570
  ref <309>: DATABASE ENTRY DATE: 2002-08-28
gtgccgcgtcaagcaactctcggtggtgtggtgtccactgtgcagctcccgtgcaggcgttccgctttgatggaaaccgccgcggccgtggtgtgccgaggcggcgggctgcgcgcgccggcgcgtcgcggtggcagtgacagcagcacgacgcgcgcgggtggcgttgctgcctccccggcgcccgccaccaccgcgcgacggaggccgctgctcgtcgcgtcgctcggggagcccctcatcacggcgcaacccttgtcgtcgtccctgggagatggcgccgcggtacacgagacgctggctcgctccgattcggtgatcccgtcgctgaagccgtctcactgcgttgatcactcggtccaggttgacgccgacgaggagaccggctccaccaagacactcccacctcctgatgacgttcctacgaagacagtgcacgtcaaattcgtgctgcaaaagcggtgcgcgttcgggcagcgcttcctcgtcgtcggcgacgtcgcggcgctcggtctctggaatccggcgaaggcggctgctctggattggtccgaagaccacgtgtggacagtgaagaaggaattgccagcagaaagatcgatcgagttcaagttcttgctgcaagatcgatcgggacatgtcgaatggcagcacggtcgtaacagaatactgcatgtagctgacacctcgaacaccttgattgtctgcgaggactgggacgaggcgaagaatcagcaagtatcagaagagattggtgacgcagatgggatattttcaggaagcgatggcgtcttccaggaagatgagcttcaactgggtgaagaacaagagaccaacaagggtgtgactgtaggtgtggatgatgcaaaatcggctttagtcacttatatttacagggaaatgatgggagcaaacgacgcgatccagccacagttagcattggacaaacaccacaagattccagatgagcttagtggggaggcaaacatggcagcacaagatggcaatcacactgctactgcagccgcagcttctggttttgctggaagcaacggtgaggatgccatcttgcacaaggagggcgatccagtagagaataataggctggggctggccagcattttcttcaatgacatggcctggaccaggaaagccctgcagcagttgctccgaagccttggtttccaaatcggcacgagaaaaacatgaagtaagcatcagagacgctgacctgcagttttggctgatcacacggtctcgcggtgccttcattcaaaactcgaaagcttctacatgctgcaaacctacaaggaacaagtgtattgagaactgcaacaaaaaaccctttacgttgctaaggtctgcaacaccagcagtacttgttagcagtgcaaaaagagcaggaaagctgttagcagtgcaagtatgtttaggaccagtaatgactaagctaccaaaaaactcaattagtg

SEQ ID NO: 10223 - DNA, 1646 bp, Oryza sativa
  ref <308>: DATABASE ACCESSION NUMBER: AK107571
  ref <309>: DATABASE ENTRY DATE: 2002-08-28
atctctctctccccccacacaacccatcggcggtgatcgccatggcgaacaagctggtctcggagatgcggctacctccccacctcgcccacatcctcgccgcgcgccgcctcaccaccgccaaggacgtgctgtcgctgccggaggtggagctcatgggcgtcctcgacgccggcatccacaccgcccgcgccgccgtcgcccacgtcagcgagatcgcctgccctccgtaccaaacggcgcttgcgctcctcgaggccttcagggcaagaggagatgggcggctggccaccacgctccgcggattggatgaggcattgcatggaggaatccccgcagggaagctcactgaggtcgttgggccctcggggattggcaagacccagttctgtctgaagcttgctttgctagcaacattaccagaatgctatggaggcttaaatggtcgagttttgtatattgatactgaatccaaattctcttcacggaggatgatcgagattggtgagaaaagctttcctcaaatatttcgtcaagaaggcttggcccaaaagatggctgggaggatcctagtcctgcgcccaacatcattatctgaatttaccaagagtttggaacagatgaaggtgactcttcttcagcatgatgtgaagctacttgttgttgatagcatggctgctcttatgtcatctgagattgagaaaagcgcaacaggtctcagacaacaccctctaagatgggccctttcatttcttaaatctatagcagagttctcacagattcctgttgttgttacaaaccaagtacgcagccaaagtaatgatgatggctatcgttattcatttgaagttgagaagaaatacgatagtaataatgctgaaggctttgaatctcatcttgttgctgctctaggaatccagtgggctcatgctgtaactatacgtctagtctttgaggctcactcaggtcacaggtacatcaaggtagctaaatcccctatgactccagcggtagcttttccctttactgtggagtcatcaggaataatattacttagtgatgagggcattgatgtgccatctcctgaaataacctcaatccgttgtcaaggagaaaatgtcctggctcaatgaccatttgaatgctaccacatctacagttgcaatataagaactgaagatatttcttcagtccccagggatggcacaaatggctgatgatcaagctcatgcaggattccatccttgatgacatctgataatgtggtgtcgaattgaggcaaaaaattatcctcgatttcctagaagattggcgtgtattgcaatccttgtaccatcagagatgctaacccaccacctcacccctagttgtgcaaggaggcccaacagccaatttgaccacagtacctgccaccctgggggaattaatctagagggccatcggtggcgaagaagagcaactcatcggagagaatgaatacgtacgctaatatgacaatcatcaaatctttcaagatccaggtgacagaatcttaagcattctaacatagtgccacgtaaaggagaagatctagttgccccctcccccatgtgttggtgtagcgtgtttagcagtggcggtaagtactccagtacactcactctgtc

SEQ ID NO: 10224 - DNA, 1372 bp, Oryza sativa
  ref <308>: DATABASE ACCESSION NUMBER: AK107572
  ref <309>: DATABASE ENTRY DATE: 2002-08-28
tgaaagatttgtaaatggagatgacgcattcagaaattcaaggttcaaactcatcccgtacatctcaaaggggtcttggatagtaaagcaaagtgtgggaaagaaagcctgtttggttggtcaagcactagagatcaattatttccgtggaagcaattatttggagcttggagttgatataggctcgtcaacagttgcacggggtgtggtgagccttgtgcttggctacttgaacaacctggtgattgaaatggccttcctggtacagggcaacacgcaagaagagctcccggagttcctcctgggcacctgccgactgaactacctcgacgcgtccaaggcagtgtccatagacgagtgctgaaggcgtcatcagccaccattgaccccgccaacattctttctgaggccaattacagtagtacagcgaaccaaggaaaaaaagaggctcaagtcattcgtttcccctgccggccccggtccaaagatactccttgtattgctccacacaaaagccgaagaattctggctcattctgcctgcctgccagcactgtacattctcctcttgccgacaggtattgcgatgtaatgatgatagcaatctacgcccattctttggcatgccatcatcgagaaaaagagaaagggaagtgtatcctaacggtgacccccgtggcgttcattctgacctgggactcgtctcagcttactgtgagtagtgagattgcatcattagatccaactccaaagcaacccattaccggacacttgactactcctgttccataatatttctcctgagttcgagtgagtggtggcagccatgattataccagagggactcgtcaacaactgaaagcgaccaaagtcacagggattgatatactatgctcctaccattggtaaggaaggaacacccaggcagacgcactcacaacccaaaccctttctttttgcctagtcacttgagctagaagggagggatggaacatgagcaagtggagccggcatttccctttgttcttgagaaaagacaggacatgcaaactatgcttaaggcagggacggatagagatgatggtgtgtgtcgccgtcgcaaagcggcgagacatcgtgtggtcgagatcgctgtgcgtcgtccgtcgtctgcgtgcttggctagctaacctaaaactaaaaggcttccgtctgcccgtgcaccccgtcgccgctgtagcagccgacgtgacaggtgaaccgatctctcctgcattttttgctcacacaaattctgtaccactagtagtagtttgccgcgtcatcgcttcgaaatggagagagattagtgtggggagaagtatatttaagtggacacttgcagggttagacag

SEQ ID NO: 10225 - DNA, 1204 bp, Oryza sativa
  ref <308>: DATABASE ACCESSION NUMBER: AK107573
  ref <309>: DATABASE ENTRY DATE: 2002-08-28
gtgcccactccgttgctgcctgcctgcctgtccgtcctagctagcatcctacgctcgcgtgtagagagggtgaactggcgaagggctgagcagagagatggaggtagcagaggccggcgtcgacggcgtggcggggaggcggcagcaggaggaggcgtccggcgcggcgccgttcggcaggtcctcgtcgctcatcggcgccgcgggattcgacggcgcgctgagagagctcaaggaccttcgctcccagctgcaccagacggcggactgctgcgagaaggcgttcctcgacaccgagaagaagaagctaattctggagagcacgaaaggttacatctgcgacgcgattgtagcggtgattgatcatttggggaccgtctcatccaagctcgagcaacagctgcaggagaagattgagatcacacaaacagagaaaaagctcaacttcttgaagcagaggctcctgacatgtgaacagtatgcaattactctcaaactattgaccgtacgtggggacaatgatgccattcagtatcatcgccgttacctctcgcaatctactggaggaaccaaagaggaaaatggtgctaactccaggaaagatgatgtaaaatttgtggagtacaacagcccaaccatacctggagcaattcttactttcaagccatatgatattcagtcaaccattgggagagaacgttcggtggcaactacagactctgaaagcccaacaacggatgcaaagagttcattctctttcagagcagaggacgttcccattgttctagctgaacacaggaagaaggcaaatcatggcagcaatatcttgtcatttatcaggaaaggtagacggcatgcgtaagagccaaaagcgccaccggaatagctcgggactggatatatgcacgcatactttaatgaattcagtattgattggcaacaatgtacaacctaatatcactgaatccccaatttctgtcaaaccagtgtccattgaccatcatgtatgtttagctttgcatttgtgccagcagtaaattcggcccgatcatcctgaacatgtaacaaacttgaaggatcgagcagtaatatctgcttggaaagctagtttttcttcccctctacaaactctcaatatcatgtaacaaactttaatctgtctccttattatcaatgacaaagattcaggtgaggaatctctccc

SEQ ID NO: 10226 - DNA, 938 bp, Oryza sativa
  ref <308>: DATABASE ACCESSION NUMBER: AK107574
  ref <309>: DATABASE ENTRY DATE: 2002-08-28
atcccgacgccgccacgggagctgctcccgcttctcctccgtcgctctccgccgccgccgccaccgtcaccctcctcggcctcccgctggtctcctccgtcgtcctcctctgccgccgccgccaccgtcaccctcccttcgcatggcgatgtcgagcgtgaggaaagccttcgtgcgcgccgcaggggggccgatctcctccttcgctgagaaacggggctcgttcttctccggtccggacggtggaggaaaatggctgaaggatgccagggaatggtgcgatcgctggcaatctgttggatgggcaattggctcattgtgtgcaggcgcaggagtggttggtgggattgccgcgaggtacataaggcatgatgtcgaggcatatgttgatgggaagatagcgcaggtcgtatcaaaaaatgatgagttccgtgtggctgcgacaaaaactcattacgactttcaacagaagatcagtgacctctttctggagtatcaaagggagttaaacatgttggctaagagtcacctgcagtttcagagagacatgatgaagctggagcattccatattccttcttcccaattttgctccagaagaaaagggacctgtgggtgctgtgggaggtgacaggggacctgtggatgctgtgggaggtgacagggaaccagtgggtgctgtggggggtgacaagggatctgagggacagctgaacctgtaacattcaaaagctgattttggtggaggggacttcaactgatgcaaggatggacctgagtgtgcttcttcaactgaagcaagggatgacctgagtgtgttttttgggctgcttaaaaaattaggcagttatgtgacctagactctattccagctcacgtatgtgctctgtggttgctgatctttggacccaatttaaacaatgggaatgtgggatggtc

SEQ ID NO: 10227 - DNA, 1550 bp, Oryza sativa
  ref <308>: DATABASE ACCESSION NUMBER: AK107575
  ref <309>: DATABASE ENTRY DATE: 2002-08-28
tattttacttattccgtgagtcggaagcggggcctggcccctccttttggctctaaggcccgagtccctcgggccgatccgggcggaagacattgtcaggtggggagtttggctggggcggcacatctgttaaaagataacgcaggtgtcctaagatgagctcaacgagaacagaaatctcgtgtggaacaaaagggtaaaagctcgtttgattctgatttccagtacgaatacgaaccgtgaaagcgtggcctatcgatcctttagaccttcggagtttgaagctagaggtgtcagaaaagttaccacagggataactggcttgtggcagccaagcgttcatagcgacgttgctttttgatccttcgatgtcggctcttcctatcattgtgaagcagaattcaccaagtgttggattgttcacccaccaatagggaacgtgagctgggtttagaccgtcgtgagacaggttagttttaccctactgatgaccgtgccgcgatagtaattcaacctagtacgagaggaaccgttgattcacacaattggtcatcgcgcttggttgaaaagccagtggcgcgaagctaccgtgtgccggattatgactgaacgcctctaagtcagaatccaagctagcaagcggcgcctgcgcccgccgcccgccccgacccacgtctcgccgtttcaccgccgccaccacgcgactcttcctcaccgccaccaacgccgacgactcctcgcctcgcagtagccagcagcccagcggcagcaactgagcaaccagcaggtgttattcctcattccttaacctccacctctgtcactctgtgttagtgttactgtgtaggctctatatatttgagtgaatgttgaatgattgatgtcttttattttctttgtactaaggagcttggttatattacattctgtgtagggagcttgaatactgtgtaggttttattttctttatatgtttatgccttcttgcttctggattttattttgttctgttaattttgtagaagttattaatatgctctattgccatttgccaagcactccaattatagaaatactgctttgtttgtggggaataatacaaatgcagctgaaaaataatatatgctactatgtccagctaaggacagactgtggtcttgagcctaaaccattgatttgatttcttttatgctgcagatttgtgatggaatcatcaaatgcaagtagcagcagtgcaagtgtatgcaatgcgggcattgtagctttgccagcatcacaaccaacccttgcaaatgtaggagatcctaccacaaatgtgggtgcagtggcaagagtagaagttgctgttctgtgatgattgatgaactaagtattgatggactgatgttctgttgttgttctcaaacccatttcctggagagataggctgatagcagtatagcacctgaattgtgtataccttataccattgtgttttgctgtattcttttagaatatttgttatgcaaattatatgaagttatagaagaatatattttgctgttgatact

SEQ ID NO: 10228 - DNA, 1467 bp, Oryza sativa
  ref <308>: DATABASE ACCESSION NUMBER: AK107576
  ref <309>: DATABASE ENTRY DATE: 2002-08-28
cttgtaatatcgtcaccctctcgagcttagcttcctcctaccttcctccatcctcttcgtcttcctcctcctctcgatcgatcgcctcgcgaagtcgcgagctagccaagaatctcatctccactacataagcgagaagctggaagagagagagagagagagagagagagagagagagagagagagagtgagaggttagctagctagagatggaggtgatggtgccagtgatggcgccgagcgcgccgtgcagcccaagaacggcggcggagcaccaccacctgccgagctactgctacttcttctcgagcgcgccgacgagcccgacgagggcgagctactccggcgaggcggcggcggcggcggtgggggtgggtgagggggatggggcgttcgatttcgcgttcgggttcagtggccagctgcgggagtcgacgccgatcctcgcagccgccgacgagctcttcgagggcggcaggatccggccgctgaacacgccgcacccgagcattctgcagctggtggatgatagcgcgtacgcctcgcctcggtcgccggggaggaggcggaggatcgccgccgcggaggcggcggaggtgtcgtcgtcgtcgtcgtcgcagagagggaggtcgggccgtgctgcgcctgcgtcgtcgtcgtcgagcgcctcgtctcgtagccggcgagccacgcggtctctctcaccgttcaggggaggaggaggcggcggcgccgacgacgagtacccgtcctcgccgccgtcgccgaggacctccatgatgcgcggctgcggcagcggcagccggaagtggaggctcaaggacttgttcctcttccggagcgcgtcggaggggcgcgccaccggtgccggcagcaaggacccgctcctcaagtacaccatgctctcctcctccgcctcgtcggcggccgcggcgctgcaccacaacccgcagaagcttcgcggcggcggcgacggcagcgcgtccatgcgcaagggccgcgggtcgacggcgtcggccagcgacatgccgtacacggtcggccgcgccgccgccgaggacatgcggcggcgcaccacgacgccgctgccgttccaccggaacagcctcttcggctacctccgctccaacccggccatccacagcatcagccgcaagctcagcggctccggctccaatcgcggcaagaccgccgcttgagcgacacgcgccatggccgccgccggcgagtcgcgcgccatacatgcacgatgctctcgaacccaaccttgcagagagatggtcagaaaatttgccaaaattcgtccccttttttgtttgaattttcaatgtattctttcgtttcctgtgaaaccacaaggtttttcatatactagtgtagatatgtacgtagtacatgggattcgcaagaaatttggaagtccaaagtataatacggctctcttcagttcatcctacacgtatattc

SEQ ID NO: 10229 - DNA, 2617 bp, Oryza sativa
  ref <308>: DATABASE ACCESSION NUMBER: AK107577
  ref <309>: DATABASE ENTRY DATE: 2002-08-28
caaactttaccgagatgtagaaatggtataataattcaacttgtctccccaggcactctgacatattgtctaaattgtgcatgttgctccatagatagcagagggaggcccatatcttctcccataattcctgaaagtgcatacctaaagacatttgtttctttaatgctgaagcacatgtattcataggaagaagtcacaacaattgagatatcagcttcattaacaaaattttttgatacaacaattgtccaaattgagatacaaagaagtacttgcaatacacaacatcaggtcaggaggcccttatcctaattggcttcctcgtaattcctgaagcccttttgtggatgccatggtatattcaaatttaaagcacccatggaacttgctgcatatttcacccaagaatccgcatggccacatcaagccccaattgcattttcagatacaaaatacctgtcagtccataggggcagaactataaaggaaaagataatttgtaaatttgcaaagtagaacgtgatgccatgaagattccatcaaccatgtaattaacatacttataggaaatcaacctccaacatgtatacatgaaatgaaacttgtatcctgctgcatctccttcagtggagctgacaccaccgaccagtggagcaagagaggatggatctaaaaactatatattgtttccattagcagactaacaaacaaaagcttatctccaatcaaataataaattgtagaatatattccttactttcaatagtaagagaaaaaacagaaatgcactgacactgcttttgtgatttgccacctaaacactgcttattcaatatttagaaccaaactgacatatcaaaggtctctaccggttcagaactgcatatcaaaatgatatatccacccagtacatgatcaaaattgaagcaggtgagccacaaatggggtctggatagagctcagagatggtagttcgtcccgggttgccatcaccagtttggcctccatctccgattctctgatccatccctgcctcagttgtttgggcatgagacaagcacagtctgccccagggaggctggaggcatgggcggggtggaaatgatctcgaagactgcgagatggagtggagagccggtcgtgggttaggagggttttgtccatcagggacagcacgacacgcgtgggcacggctggagggcaaccccaagcaaagtgtgatggaggcggagcagccacgcctgcgggagagcggaccattcccaacaaagaagcatctaacatcaatttagatcacaaacataaatcaattatctatatataagatttgcaaaccataaattcacaattaattcaatacgtatattttctaagacacagcaacataagtcatccatgaatcacatatttgcttgctgaactaaatgaagaaatagtacatgaacaagatcaagggaaaaggcctactcgcacttactcctcggtggtggccggttcagcctgatcaggtgcctccttccccgctgcttcttcttctcctcctgcttgcgctgcttcttctactgcttctgcacccatgggaatggcggttgtcttggaggtcgggtgtcggcggagtgggcgcaagtgttggatagtataggaggagagaggatactgcgaatattggacacattatattgagcctcgggggccggtatatataggagtacatggggaggagataaggaaggattacagatatggaagtagtccacataaatcaatcctatcctaatatgactctaactaccgtatactctaacagcaagcaccggcagccaaggggacgcgcaagcggggccgctggagtcgcgcggtagtcggtgacctagggtgcacgtctagcggtggtctagtcacggccatgaaaggagaggggtggagggcagcggcttgatgtccgcaggcatcggtagcaacttggggtggacaataacgatgtggtggcagtgggtgcactgatcttggtgacggcgagtgagtggctggcaacagtgccaatctaagcgagggcgaacaacgcccccactctctcgtcgcccacgggagcacagtcggggtcaggtgggaaggaggaagtgatgttgaggccgtgcttgcgggagcagggactggtcttcgctcacggcggatctccgtcgcgccgcctcaaaccccaccgtcaggcagatctccggcgaggctgtgtgcagttgtggtgaaggagatgaccagcaagtcaagtggaggaagagattgagcgattttgtggatggcgaatcatgtctaggctgagcgattttgtggagggagagctaaggagaggaggacgctatcggcggcatgatgaccgatgaggggaaaactacgatgcggtgacgaaaggagtggggtgaggaatttgctacgctaggttagcgcgtggaggaatttatggtggtggggacgaggatttggtgcattcgcatgtgggcctagtttcctctaatgatttcaccataggattggataggcacaactcctcctttttatattagtatagatgatctggggtttatatttatacctcaagtacaaacttagtaaagaagtt

SEQ ID NO: 10230 - DNA, 1632 bp, Oryza sativa
  ref <308>: DATABASE ACCESSION NUMBER: AK107578
  ref <309>: DATABASE ENTRY DATE: 2002-08-28
attgtcaatttcaaactccagaactgggtaccatggcggcggcgcgcgccgccgccgccgtcgatgcctaccaacacaacaccctcatccgcgccgccgccgaccaccgcagcctcctgctcgccttccgcgccatgctgcgggagggcgtcgcggcggaccacttcacctttcccttcgccctcaaggcgctcgcccaggcgcaccaccgctcgccgccgccgtgcgccgccgcaaccgcaacggcaaccacaacgttggggtgcctccacgcgcagatggtcaaatccggccacggcgccaacgtgtacgcggcctccgccctcgtccacgcctacgtctcccgcgccgacgccgcctccgcgcgcgcggtgttcgacgccgctcgccaccggaacgtggtcacctggacggcgatgatcgcggggcacgccgcggccggggaggcacgggaggcggtcgcgcttttcagggaggccgtggcgcgcgggcaggaggtcaatggcatcaccgtggcgcaggtgatgggggcttgcgctcagagccgcgacctcgagagcgggaggtgggttcatgcgacgctccgacgctggggcgtcgagcctatcttgctcgacgtcgctcttgccacggcggtactccatatgtatgcaagctgtggcggtcttgatgctgccttcgaagtgttcgataaaatgcctcgaagaaatgaggtgtcatggaatgcaatggctgaggtatgcagtagacatggaagacaggataaggttctggaggtgtttccgggtatgcattctgttgggatgaagcctgataaggtgacatggctgagcatactccgcgcctgtacatccaagggagctgcgggcttaggccaaggcgtgcacgcctacatggagaagacgattggtcatagacatgtcgcagtttgcacatcgctcatggatatgtactcaaagataggcaatgcacggagtgcactccagatatttcagtgtctcaaaagaaaggatttgatggcatggacaagcatgatcatcggcttagctaagcatggccatggcaaggatgctgtgcaactcttcaaccaaatgcagcatggtggtgttgttccggatcatgttgcatttgtaggtgttcttactgcttgcagccatgctgggatggtagacgaagcaagaaaatactttgactccatgtggaatcattatggcatcaggccaacaatcaaacattatggttgtatgattgatctcttcagtcgtgctggtcgattggcagaggctgagggaatgatgcaaatgatgcctattcaacccagtgtcaccatgtggggaagcatgatgaatggttgcaaggtacatggcagggctgatattgctgagagggtaggaaggcaggttgctgagcttaatcctcagtttggcgcaatatatgtgataatgtccaatatatatgcggagattggtaggtggcatgcagtggagcacaccaggagattgatgtggcagactggattgaagaaaattgtaggctcaagtggcactgaagtgcaaatgttgtgctcctgaatatagtttcctctagcatctgtctatggaactttttgaagtgaaaggaggagaatttgtt

SEQ ID NO: 10231 - DNA, 1339 bp, Oryza sativa
  ref <308>: DATABASE ACCESSION NUMBER: AK107579
  ref <309>: DATABASE ENTRY DATE: 2002-08-28
aaaaatccaatccgacgctcccccagaaaccctagcaatcttccgccatgaaatccgccgccacctccaagcccaagccgcggcccaagcctccgccgccgccgccgccggaggcttcctccaaggcctcctcctcctcctcctccgccgccgatcccaactccaagcgctccggccccacccccacccccacccccgccgccgctaaccccacgaacagcgctaaccccaactccgccccgctcctcccctccccgcacccgcgcctcccctcgccgcaccaccacctcccgccgccgcagcagcagcagcctccgccgctgccaccgtctcggccgctgctgacggtggcggcggtggaggcggccatggcgtccatcccgcccccgccgcagtacggcctcgagagcctcgaccggcggaacgtggtgctctccgacggcaccgtgcgcacctacttcgcgctcccgctcgagccgccgccgcagctccggcagcctctgccgctgccgctgccgccgttccccgcgcgccagctcggccctccggtcggtctcccgccacctaccgccgagagatgggccccgatgcggccgcccgcggccttgctgccaatgccggcgcccaagcggaagtgggagggtcaggccaatggtagtgtccccggggagtcctcgggtcgccagcagcagcagaagccggaggagaagcgcgtcgcgaagcaggtgaaggtggagacgccagacgtggatgcgaagcagctgaagagctccttccttaagatggttaaattgatgaacgagaatgcggagcagaagaagaattacagggccaacgggaagatttcgcagctgaaatgcaccgtgtgtggaagaaatgggctttgtgggtgcaagcgtgaagccactctctggaaaggatggacagagatccatgctggtgaaatttgctagcagcctcgctggtctcagcgaggccgagaggcttgctcagtccttggagaaacaaggccatggacgcgctgaatggtatcgcgtccgtagtgttccccctggtgctgatgggggcagcaatccgctgcttgtgaaagtgggcgcaaagggggaacggacatgggtcctatatggctacttggcgaccgcatgggacctggatgcactcgacctggagtcgaagcaaaatgctgtaataaagagcagaaaagagctcgatttgtcataataggatcaaccctgctagagctgtgtgtgttggaaatcagtgattcagttcttgtaatttatgtagacagcaactggatggcgggagcaggagcatgatttaagaggtttacctgact

SEQ ID NO: 10232 - DNA, 2915 bp, Oryza sativa
  ref <308>: DATABASE ACCESSION NUMBER: AK107580
  ref <309>: DATABASE ENTRY DATE: 2002-08-28
ctggctgcttcctcgacgtcgtgattatagcgtcgtcttcatcctcgctagccggtggcgctgctccttctctcgcgcacacggtcacagagaaactctcccgcagcaactatcctctctgaaaggcgcaagttcttgctgcgctcaggggagctcagatggctggatacatcgacggcacaaaggaggagccgccggccaccatcatcaccaagaaggacgacaaggatgtgcgggtcaccaatcccgcgcataccgagtgggtggcgcaagagcagcaggttctcagctacctgttgctctccctctcacgtgatgtcctcatccaggtggtctcaattcccactgctgttggggtttgggatgccataagtgggatgtttgcatctcactcccgtgcgcgtgtgatgaacacacgcatggctctgacggccacgaagaagggcaatctgaaggttgccgagtacgtggccaagatgcggggtcttgctgatgacatggcctcggcaggaaagaagctcgacgacgacgacatcgtctccgacatcctggctgggctcgatgatgattttgacccggttgtctctgcagtcgcccaacgttctgagccaatctcagtcggtgagttgttttcacagcttgttacttttgagcagcgattggaacttcgacagggtggcattcagtcgtccaccaactctgcttctcgcggcggcaatggaggaggtcgcggccatggtcagccaaaccagggccaaaatctgaaccgtggtcgcggcggccaaggccgcggccgtggtggcttcaccaacaaccaaggaggagatcaccccaagtgtcagctgtgtgacaaattgggccatacggtggtcaagtgctacaagaggtttgatgcttccttcactggcgaagagaagagtgctgctgctgctacctcctcctacggtgttggtaccaattggtatattgacaccggggcgacggaccacatcaccagcgatcttgacaagctgacggtgcgggagaagtacaatggaggtgatcaagttcatactgccagtggttcaggtatgaagattaatcaaattggtcaatctattgttcgcacccaacaccgtgatcttatactaaaaaatattctttatgttcccgaagcaaacaaaagtttaatctctgctcatcgccttgcatttgataaccaagctttcttagagcttttccctcgttatttttctatcaaggatcaggtaacgaggaaactacttcaccaaggcagatgtgagcgaggcctttatcctctgaaatcattcccaaataaacaagtttttgcagctatcaagctttctccttcgcagtggcattgtcgcctaggccacccgtcctcagtcattgttcaacaagtcttgagtcataataatttaccttgtgttagtgagtcaaacaagcattcggtttgtgatgcttgtcagaaagggaagagtcatcaacttccttattctaagtctttgagtcgttctagtgctcctttagagcttattcattcagatgtttggggtcctgcaccaacctcggttgggaagaataattattatgtgagttttgtggatgatttcagcaaattttcttggatatatctccttaaacataaatccgatgtgtttcaatgtttccataattttcagaatcctgtagaacgactctttgatcgcaagatattagctatgcaaactgattgggtggtgaatatcacaaactcaattccttttttcaacgcatcggtatttctcaccgtgtgtcatgtccatatgcacatcaacaaaacgggtctgccgaacgtaagcaccatcatattgttgaagttgggctatcccttctagcctatgctcagatgcctctcaagttttgggatgaggcattccttacaggtacttaccttattaatcggcttcccactcctgttctccaagcctccacacctctagaaatgctctttcatatcaaacctgattacacctccctccgcacctttggctgcgtgtgctggccaaatttacgcccttacaattctcacaaactccaattccgcttgaaacggtgtgttttccttggttacagtgtaatgcacaaagggtttaagtggtcgggtttatatttctcgtgatgtggtttttgatgaacatatctacccattttctgaccttcatccaaatgctggtcattgtctccgggctgaaattcttctcctcccagaacatcttttgaatccttctcgggacgaacatgttgaccaatatgtgattaattcttctactaaccctgctcatgagtctccagttgatgttgctacgagtgcagatgctgctgctgaaatttctgggcgaacagggcaaattttggagcaaaacacccatggttttctgctcggcgggcggcccgggcactccgcggctcctaacactcacgcagcccctgacgacgctgcgacttctgacgcaactgcggcgcatcatcctggggatataggcgctgcagccggctcttctctcagccgatcgccatccaccagccattcctcgtcgcgtgtctccgacagtgcgcccgagccggcgtctcctccacgcggcgatgactccttggctgttccgatcgacgggggctcgtcggagcctctctcggacagctcgtcgtcaagatcgtccatggcgaccaactctacggcgaacaactctaccacatccagcgaagctgccctgactcagcctcaacgaccagccactcgtctacaacagggaattcgtaaacccaaggtttacacagacggtacagttcgttgggcaaatttaattactgctgagtcagaacctgatactttgaatgatgctttgaatagtaaaaattggaagctagccatggac

SEQ ID NO: 10233 - DNA, 1809 bp, Oryza sativa
  ref <308>: DATABASE ACCESSION NUMBER: AK107581
  ref <309>: DATABASE ENTRY DATE: 2002-08-28
cagcttagatcatggtacaaagatgttgctcctagacaaaaaaaaacataaggatgaatgaataaaatcctaagcaacttgaacaaccttgatgaggaccgtatataagactgggagtgtctacatcattccacatatctttttataaaaaaactgacagattttccaccaaacgatttaaaaaacagaactgaaatcagaactcctcttaggacaaaataggaaacacaagcattttgctaggctagttcacactacccaatcatgcagttctttattatatttatcctaatgtatgtattaacatgtacattcatgtacatgagtattattcatgtcgtagctcgaagctctatcctgaataaaaatagctatgtatttagcagaatttgcatccattcataacttaattactgattcacgggttagcagaaatctgccaattgcaaccatcaattcttcattcaaaacaacaataatgctagcaaaaacaggtcacaagttgcatattactcctaagaaagttccagcatgaaatcaaatttaaagtagagtataactataataattactagtacatacggtagagaaagtagcgagggggcagttctggtggatgatgacatgaatttgcatgtttgaaacacttacttcatcacctcctaatgcaatctgacattccaaacaattatggcatgagcaaaagtatgacaatcactgccagcactaatatgatgtttgggattattaaatagtgtgctcaccatgtcttgcaaatatatcatgtccatgctgcagcttctagtagatgcaaaaatgatcttcctgtgagtagctaactggagctgcctaaatccacagaagtatacagcggaacaaattcagccagtgaatccatcacggtgaggtggttgctgctggtgctgaaactgaaagcacaggggatgcgcgcctgcgtaagccgccacccgtttgacacgatgatgcatcatgctggcgctgcgcggctggaccagatcacgtcaattgacaacatgaggctctttatggacaatttcacaaacacattgcatacaagacgagatgctggagataaaacgacagcttagcgtggtgataggggttaccagcgtctagcgctccaaccgttcgggacggggtttgccttgctgaggatgatggcggcggcagcggcggcgcggaggccggccgtcacgccggcgtcacggcagacgacggagccgagcagcgcgaacgacccggccgtcgtgttcagccggtcgcgcttcacgatgttgtccttgaggatggggacgccgtggagcggcccgcagtagctgtggccagaggcgtgctcggtgtcggcgcgcgccggctgctggagcgcgtcggagttgacctcgatctcgatgacggcgtggagaagcgcgttgaggcgggtgatcttgccctggggacgagcagacagggctgaggcaccgccgcaccgacgacgtcgtcggccgtggcgggcgccgggatctgctgtggagaagctgcgatgactggagagattggatcggtatgttcaggagtaaggagatgggttttgttttctctattaggatcataactgcttccgatagtggagaagaaaacccggcaaattgagggaggaaaaaagcgtacaaacacaaaaatttggagcaaacccgcggcaaaatcagttttatgtgtttctctttttcaggcacaatagaactagattgatggaaatctgacagggtggacctataaagaaataaattagtagtagttttatttggaatt

SEQ ID NO: 10234 - DNA, 1801 bp, Oryza sativa
  ref <308>: DATABASE ACCESSION NUMBER: AK107582
  ref <309>: DATABASE ENTRY DATE: 2002-08-28
atgaacatcactacatcaaactgagcaaaatggactctctcaaaatacaaaagacccatgaaattacttgaaagttgaaaccaatcaaccatacagcatctagctaggcagctactccatttacgagatggagttcctccaccttctcgggcccttcctcgccgcggcctcgccgccgccgggcggcgccacgccaccaccggccgccgcgtcggcgccggacatcttggccagcctgcccagcttcttccacccgctgctccacgccgacgccgacgtgccctgctgctgctgcttgccgatcttggcggccgccggcgacggcgcgccgccgccgcggccgtccacctgtttctggagcgcgtccatctcgtgctggagctccaggtacttggccttcatgctctccagctcgaacttgagcgtgttgatgtccttcttcgccgccgcccacccctcctggaacgactgcggcgtcccgtccagcagctgccgccgcgtcgtcggcatcgccggcgcggcgtccgcccccggcgccgaagacgacgacctgagcgccgcggaggagctcgccagcgcgttgctgatcttgacctgctcggtgaagagcacctgcaccaccacccgcagcggcagcctctcgttctgcgccgcgtgcatgcacgcgtcgaacgacagcttctggcagtccatcaccctgcacagcctcttcctctcgtgctccgtcagcgtcgggtgcgcctgcaaatcgatcgatcgccattaactccggcgatcaccggaaactagctagctgtaatgtgctagttaccttgaggtaggagtcgacggcgcggtacaggccgtcgtcgcaggcgcgcgccgactccggcagcgactcggcgaggacctggaacttggtgagggagaggttgcggtcgcgggagacctcggagaggtagctgtcgagcagccgggcgacgcgcgccttggcgttcagcccgcccgtcgacgccgacgccgacgccgcggccgcggacgacggcggcatcctcccgctgtagtactccggctgcggcggcggcggagggtcgccgcggccggggctggacgccaccgccatctccgtctgctcctgaaccaggaagtgctcgacgaggcgctgcacgaggtcgacgtcgtaggcggtgtcggcggcgcggccgccgtaggaggggatgaggaggtcggcgagcgccgcctgctcgagctgcatcccgacgcgcttctcgagctcggtgaccagcgccggggcggccctgagcatgatggcgaggcggaggaggcggaggaggaagccgcaggagacgctgtcccgctgcggcggggtgatgctgatgatgctctccaccaccatgcgctgctcgcgcgacggcgcgctgcaggcggcgaggacgtcgtccttgccgccgccggcgccggagatgatcatcatgtggaggccgccgccgccgacgccggcggcggaggcctgcgcccacggctcgtcgtgggtggcgccgagcggggcgtccttggtgaggccggggagccatttcgacgcgtagtgggtgatcgccgcgccgatcaggtcgaaccgcatgcctgtcaaaaaaaaaaacttacgtttttagttgatggaattcttgaaacagttcagctactgtatatgcaccgtgcaaatttgttaatgtctggggtaaatcttttacaattgttagcatgcacttatcttgtgcagttttttttttcaaaataattaactgtagccattatagttttatcgtggatacaccatattttc

SEQ ID NO: 10235 - DNA, 1392 bp, Oryza sativa
  ref <308>: DATABASE ACCESSION NUMBER: AK107583
  ref <309>: DATABASE ENTRY DATE: 2002-08-28
gtccagatcgccactcgcccatctctctctcccgccgctctctccctctccgcccttctccctccacccgtcgccgcctccgtcgcgcccaccgccgactccacccctctccctccgcctgtcgccgcctctctctctctctctctctctccctccacacggcaagtggcgcgcggggtggtcgcgggtcacagtgacggacggtgcacggcgtcgagtggcgcgacgaacgacggtggcggcatcgagtagtgcggcccagtggcggcggtgcctccctctccctcgacatcgagccgtggcggcgaagtggcagcaagcagcgaccatgcgagaggagtggcggtggggtggccagatccagcctaggcttgccggatctggcctcgggcagcaacggtggcggctcgtcggcgaggacagtgcccggtcgccctcctcccgctcccctctcttcctccagccgtcgccgacagagctcatcgtcatcgtcgccgacgaacctcctcttcaccgcctctctccgagatctggcacgccgccaacccccagcgccacctccaccgccggtcctagtgccgccgccctctcgcgaggacaacgacaaggcgaggggtggaagaggaactctgggcgtgggagcgatggccaagggacactcaccctcgccaatgcgtctcccggctcggtgtctcagcaaaaaggtggtgaggaacgctccccagcgaaggaccacgcgcctagctaagggaacgggtgcggctgaaaaggtaacggagggcggacggccattccccgggctacgaccctaggacaccgattgtagatggcctaactccttaagtctcaagccactgcattccccactgcgtgagcgcccgccatcatcgtcgtcacgcctccgccatcatcctcacctcctccgcctccccttgcaccgctgtcccctttgctccaccccagattcctccgcaatcgttatggctgaccttgagcaggctatcctgcttgtcttagactcccctgtaacggtcgtcagctcgcctcagactcccctgtaacggtcatcacctccctggtcgtgtgtaccgaggcgctcgcctactatgtcagcgcctgcgacgagaccctgccatcgtcgtttctccatgcaccgtcatctccaccttcgcctccatatcgctgaggtgttggtgccagcatgccgccgctggtgggtggtgtacagctagaggatggaggtttggagacagtggttgagaggaaggtgaagggaggaaggagtgaaacaatgacgtatggatctcgctatcatactcgcaacgaagagtatatgtagatggagagattgttggaacacaaaaaaaatatggcgagggatacttttttgtc

SEQ ID NO: 10236 - DNA, 1865 bp, Oryza sativa
  ref <308>: DATABASE ACCESSION NUMBER: AK107584
  ref <309>: DATABASE ENTRY DATE: 2002-08-28
gcacacaacgtgtagctcgacaatctacttagcaagatcactttagaaccagaaccaccagcaaccatggagatggagctaccatcatgggcctcagtactggtcattgtgctcgccgccgtcgtcttcctcctcgccaccattctccgccatggccgacgcgcgtataggctcccaccagggcctaacccgtggccgatcatcggcaacctcaacctcattggcgcgctgccacaccgctccatccacgagctctccaagcgctacggcccgctgatgcagctccggttcgggtcattccccgtcgtcgtcggctcgtcggcggagatggccaggttcttcctcaagtcccacgacattgtgttcaccgaccggccgaggaccgccgccggcaagcacaccacgtacaactacaccgacatcctctggtccccctacggcgcctactggcgccaggcgcgcaagatgtgcgtcaccgagctcttcagcgcgaggcggctcgagtcgttcgagcacatccgcggcgaggaggtgcgcgcgttgctgcgcgacctgcacggcgcggcggcgcccgtgctgctcagggactacctgtccacggcgacgctcggcgtgatatcgcgcatggtgctgggcaagaagtacgtgggggttgagggagcttctgccggcaacggcggcggcggcgaggggacgagcccggcggcgacgccggaggagttcaagatgatgatggacgagctgttcctgctgagcggcgtgctcaacatcggcgacttcatcccgtggctagactggctcgacctgcaggggtacatcaggaggatgaagagagtaggcaagaaactggatcggttcatggagcacgtcctggacgagcacgacaaggtgcggcggcagcagggtgataggtttgcagcgagggacttggtcgacgtgctcttgcagctcgccgatgaccctaacctcgaggtccaactccggcgtgataatgtcaaggcacttactcaggacctgatcgccggcggcacggacacctccgccatcaccgtggagtgggccatttcggagctcctgaggaagccggagatcctcgccaaggcgaccgaggagctggaccgcgtcgtcggccgcggccgcttggtcaccgagacggacatgaccagcctcccctacgtggaggccatcgtgaaggagacgatgcgcgtgcacccggtggcgcccctgctggcgccgcacgtagcccgcgaggacgcctccgtcggcggctacgacatccccgccggaacgcgggtgctcgtcaacgtgtggaccatcgcccgcgacccggcgctgtgggactcgccggaggagttcatgccggagaggttcatcggcagcaagatcgacgtgaagggacaggacttccagctgctgccgttcgggtccggccgccggttgtgccccggccacagcctcgggctgaaggtgatacagctgagcctcgccagcctgctgcacggcttcgagtggaggctccccgacggcgtgtcggccggcgagctgagcatggaggaggtcttcggcctgtccacgccgaggaaggttccgctcgaggtcgtcgttaagcccaagctgccggcccacctctataccgggccctgatgtatctatatgtcagtacgtgggccattgataccaatacttcccatgatctctaccatggaataagtttgttatgaatattatctcctcgggagataagattctttcttgtgaaccaatcccaactagagtgagataagatttatctcctcctaaaaccgctgtatatggtaaacttgtaatcaagatcagatttataattaagagagatttcaccctat

SEQ ID NO: 10237 - DNA, 1476 bp, Oryza sativa
  ref <308>: DATABASE ACCESSION NUMBER: AK107585
  ref <309>: DATABASE ENTRY DATE: 2002-08-28
atcaaggagacagcttagcgtagctgttgttgttgcagtccagtcagagagcagagggcactgcaccgagaggatcgagcttccaagaacaagtgaagctagcatggggtggtggctcggaggtggcctgccggtcatcgccatgctggctctcaacgtcgtcgcggcggtgttggtgtcgctcgtcaaggtcgccatggacggcggcctcaaccctctcgtcctcgtcactcttcagcagctcacggccgccatcttcctcggcccaattgcctacttcaaagagaggaagtccaggccaaagctcacactggagatcttcacttatctcttcgtcagtgctgcgctcggggcagctctaaggcagtacatgatcttcgttgctttgagatacaccacggcgaccttcgtcactgccttctccaatatcgctcctgtcctcacattcttgcttgccatcctaacacgaatcactgaacctgaggagaaagacaggcattgcaaagcttgtgggcacgctgatatcagtagcaggagccatggtgctgacattttacaagggcgtggctgtcacccacacaaccaagatccaccatgcaacagcagcagcagcagtagcagcagaagcagccatgagcagcaggaactggacgctgggcacggtggccatcctgggcaactgcgtgtgcctctcctgctggttcctcctccacagcaggctcgccaagaagtacccccatgtctactcctgcaatgccttcatgtgcatgttcagcttcctccaggtggccgtcgtcggcctctccacacaacgcaacgtctccgtctggatcgtcaggaccaagttccacatactcaccatcctctacgccggtgtggtggggtgtggcctttcgtttgtgctactgacatggtgcatcgagaagcgcggtccagtgttcgtcgcagccttcattccggtggtgcagatcattgtttcagtgattgacttcactgtcctccatgaacagctcttccttggaagcgtgctgggatctgtacttgtgataggtggcctttatcttctgctgtggggcaagaggcaggaggccttgcacctccctccaaaagttgctgaacatgataaagagcagcaacagcaacagcaacagcaacagcagcaacaacagcagcagcaagtgcaactctgaatgaagagtggtgacagcgtcccctttgggattttaacaaataagttctccaccaacttttttttttgtcaatcagggcagccatgttgttgtacaattaatccgagagcactatcatgcatgaagttatttaggttttaattgatccaaagaatactagaaatgatctaaaccaacactgagttaattagctaccacttcagaaatagatcctgtatgcaatagtttaactgcaaccatataagaattctacgtgtaatttatggataaaccgtgtaattccatg

SEQ ID NO: 10238 - DNA, 1229 bp, Oryza sativa
  ref <308>: DATABASE ACCESSION NUMBER: AK107586
  ref <309>: DATABASE ENTRY DATE: 2002-08-28
atcaccccccagctcatccgacaccgacagtcaccgagtatcacagccatgtcgacagcacccactctatcgcttcaaaagacttcggtcgcactgattcagctgggctcgacatcgttcgacaaggcgttcaacctcaagcgtgcacgcgatgcagtgttacgggcagcagccacgcgtccgggtgcaaccgcctcgatctcggcccccgtgggcatggtggtgctgcccgaatgcttcaactcgccatacggggtgaagtactttgccgagtatgccgagtcctttggtggagcctatcagaagatcaagaagccgcttccttctgcactggcgcgtatgggcaagggcaaagaagagatccgctggaccatcgacgcatccaccgatccgagtgcggaatcccgactggcgcgcgaaaagggggtcggcaaacccgttgacatcgacgagcgtatccagaagctgtcgccgagtctcaaaatgctttccgagacggcgcgcgaggccaaggtggtgctggtgggcggaagcgtgccggagcgcgacgatctgacgggcaacatttacaactcgtcgtgcgtgttcaacgaagagggccagctcatcagcatccaccgcaagctgcatctgttcgacatcgacatcccgggcaagatgacgttccaggagagcgagaccctggcgggtggcgatcgggtcacgcttttcgactgcagcctcggccgcttcggactgggcatctgctacgatttgcgcttccccgagccggcgatgatcgctggtcgtctgggcgcaggatgcatgatctatccgggcgctttcaacaccactacggggcccgtgagctgggaactgctgctgcgcgcgcgcgccacggataaccaggtgtacacgctcggttgcagcccggcacgcccgagccagcaagccatggatggcgagtccaccgacaaggacggctggcgtcagggcgaaaaggcgtaccctgcctggggacattcgaccgtcgtcggcccgctcggcgacgtcaaggcgaaactggcagaggaggaggatacgctcttctttacgctcgatcccgaagaggttgcgcagacgcgacgaaacattcccatcagcacccagcgcagattcgacgtctacccggacatcacctgcggatagtcgagcgcttgcatgtacgtagggcaagctcaagtgtcgcaacagattggtcgtttgaaagg

SEQ ID NO: 10239 - DNA, 1592 bp, Oryza sativa
  ref <308>: DATABASE ACCESSION NUMBER: AK107587
  ref <309>: DATABASE ENTRY DATE: 2002-08-28
atctcctccctccctcgcagtaatcatggtcaagttctctgctcttcaggcggtggctacgctcgctgtggctggcaccgccatggctgccgacgttcacggcatgagccgcaccaaccagcgtgtgcacgcgcgtcagagctccggctccatcatggcgtccgactaccagaacggcgaccctgcacccggtgcacgttcgggcgatgcggcgggccagacggtcgtcatcgactcggacggtggccacgacgacaattcgcagcgcgcgggctgccccaccatctttatcggctccgccgccgtgggaggctcgttcagctccggctggagcgacatgccgcagggctcggcttcgacacgatgcgcgaccttacgctcgccaacaacgtcgtccagccgtacatcatcgagcgcggcaagaccgccagccagatcaagcgcgtcgtcatcacccaaccgggtctgccgcgcgactactggaagtacgccaacctggtgcgcaactcgctgctgtgcgcctcggtcaactcgacgctcggcatcaaccgcgacgagatcctcatcgccgcacccacctggttcagcaccaacgacgcctccgccggctcggcacagtccaacgacctcgtcttcaacggcggcggctgggccaccggtgtcgactcggccgggcccaacggtgcggccatctcgtcgttcgaggcactcgatgcgctcgtctccaagttcttcgacaagtccacctaccccaacctccagcaggtcgtcattgcgggccactcgctcggcggctcgtttacgcagcactatgccatgctgcgcaagcagaaccaggcgcaggacggcatgatgagctactttgtcggcaacccgggcgcctacgtctggcccacctcgcagcgtcccgtccagaaccccggtggcaactgcgccagcacggcagatgagtggggctacggcctgcaggacctgccctcgtacggtcaggggcagggtagcgccagcagcatcgcatcgcgctactacggtcgcaccgtcacctacggcctgggactgcaggacaacgagggcggcgacagccattgcgaggcagcttaccagggcacatcgcacctcacgcgcggtcagaacttccagcgcgccctcgaggctgcgaacggtggcaacgtgcccgccagccacacgttcaactacgtcgcaggcgtcgcccacgaggactacctcatcttcagcgaccccgtgagccagtaccatctcttcgccgccggcaccaactttgctgccagcgcgtccgccacgtcgtccgctgcggcgtcgtcggctaccagcaagaggggctcgtcgtcctcggctcagtccggtgcatcgggttccgctgctgcgccttccgcgtccggctcgtcggcaggctcgtcgtccggcacctccagcggcgcaggcgggctcgctttcgcttcgcccgcagccgtggtctcggccatgcttgcctcgtccgcagccttcctcgccctggctctctagacgcttttttcctcaacgaacactagctcacattgccccttgacgatcatgaaaaagatgctttgatg

SEQ ID NO: 10240 - DNA, 1376 bp, Oryza sativa
  ref <308>: DATABASE ACCESSION NUMBER: AK107588
  ref <309>: DATABASE ENTRY DATE: 2002-08-28
gacatcccgtggagacgggatagtaatccggatcgatcccctcctcctacctcactcttctcccccaaatcgtcggagccagcggccactgtcgtccccgtcgctgtcgccccaccgctcgtcggagccggtggccgccgtcgtccccgtcgccgtcgccccaccgctcgtcggagccggcggccaccgccgcgggggaggcggcgacgacgaggagcttggcgacgggtgaggtgaacaagagggagagcgggagcgggggcgcggaggccgctgccggcgccggggaagccgctgctggctcaggaccccggccgccgaggaggacgacgacggcgcggcctcggcaagggtcgccctcaagctcgcctcccttgccgcgccgctctggctccccgctctcgtcggtcttctcatcggctgccccgcctcgccgaccaccggattcgccgctgcctcctccacgcttcgcctcgccgaccaccggattcgcgcgccacctccttctcctgctccaccacgcggctacctcctcctctctctcctcctccaggccaccaggtactagatatcacgggtacccggtaccagatactaggtactagcctggtaccaggtaccaaaggtatcagtcggtaccaaaggtacctggtaccgactgataccaaggtaccaggtatcaggatggagaggaggtagaggttccagagcatgttgccgccggcgttgcagtgaccgagacaccgagatcgccagattcttctgcttctgtagcggcggaggaggagccacctacgctcaccggcaaggaggcggcgggagcagcgggcaaggacgacggcgaccttggcaaggagcgcgagggaggaggggagaggccccggcgccggcagcgacgagagcgccagtggaagaagcagtgccacagcgcgcggaggcggcgccgcagcgggcggaggacgacgtcgtggaggtgcggcgagatcaccctcgatgccgccccgacctcgccgacgccgtgccgtcgtcatccacggccgccggagacgacgacgaccccttcctcctggccaacttcatctccgcctctcgttttcttctcctgtgtgagagagtttgtggagggaaagggaaggagacaaggtagtggagatcttatcccgtggctgctacgttgcaacggaatctcgtacggtagctgccctcttccaaaaataagcattttctacgtaatttagtaaggatttggtcaaaatttgaatttaaattgcctagatgcatttccgaagattcggattggttgaaaatgtgtggattttcgtgtattaaaattggtgtacacatacatagcaagacggttaccatggcatcaaccg

SEQ ID NO: 10241 - DNA, 2286 bp, Oryza sativa
  ref <308>: DATABASE ACCESSION NUMBER: AK107589
  ref <309>: DATABASE ENTRY DATE: 2002-08-28
cacttcgcccaccaacgacaccgccctccgctcgccgccggcgaccaacgccggtgatctctccccccgcccgcccgcccgtccacaccggccggagcatccgatcgaccggcctcccccccgccccagacaccatcgccttcccaccgctgccgctcgtcccgtctcaccgatccctccatccttggtcgaatcaatcggagataacatgtcttttgaagataaagcaatggctagccgtgtcgcttcaccctcaccaaaatctatggcttcagaatcagacccaagcatgatgttagctatcacttcgaatatggagcattctcaagcaaataaccagtcagtttcagttcttggtccagtggctatcttttgggatattgagaactgccctgttccaagtgatgtacgaccagaagatgttgctggaaatgtccggatggcattacggctacatcctgttgttaagggtgctgtgacaatgctctctgcatacggtgatttcaatgcctccccaagaagactcagagagggatgtcaaagaactggagtcaaacttgttgatgttccaaatggaaggaaagatgctgctgataaggctacactggttgatatgtttctatttgcattggacaatcgtccaccatcatccattatgcttatatccggtgacgtggactttgctcctgcattgcatatacttggtcagcgtggatacactattgtcctggccattccatcctcagttactgtatcttcagcattgagcagtgctgggagtttcgtctgggactggcctagtcttgctcgtggtgaaggtattgtggcccctagatccatagggcgccgctttgccgatcctccaggatatcaacatggtgggaattttgggtcgttccctgacacgcagaatgaagaggaggccattgtctacatgggaacttcaagaaatgaatgcagtggtagaactaccagcaaccagatatattgctataactcttctcaaaccactagagaaccatccaaagctttctatacagttacagatgggaactgtggcacatcatcaaggtcacataatttagcatgtagtttgaatgaaggtccagatgtagaccagggtttgccagatgagcggtcatggtgggttcgtcctggtgatcttcaaggtttgaagggccaattgttgcggttgtttgagttatcaggtggatctgttccacttgtccgtgttccttcagaatatctaaaactctttggaagacacctctatgtatcagaatatggagctgttaaacttattcatctctttgaaaagcttgctgactcttttgtggtcatagggaagggtcatagaaaggtgatttgccttcgaaattctggtgatagtaacctgaagaaatattcaaccacaccaattattttgaaaaaggaaaatagaggtggttctattcttgatgaaagcactataggaacaggtcagcagttgggcagctcatcagatgatttctcagaggatgaacggaacattaacccagatgtagatggagcatatgccttcgatagccatctagacaatttcagacaggagattcaggagcttcttgtctgttactcttgccctgttccactgggtaatttcaagtctctctatgaacaacggtacaagaagactcttatctatgagagctttggtgtcgatggtctggaggagctagttgagaaggtaaaagatgttgtggaactgtgtgaggatcagaccagcaaaaggaagtaccttatagccaattatcgcagttaagccttctgttgtccaaatgtcagtcacttcagttatttagatggacaagtatgctccagaaacactccttccatgccactgtacgccccatccgaattcagtgttctgaaggtgttgagaaggtaaaagatgttgtggaatgacgaaagggatcaagccagcaaaaggtaattcctcatggttcactacatcagtaatttagggcttctgttgtccaaatgtcagtagttcagtaacatcagtattctagatttggtttccttactaagaatgttcaagcactgggccggcgtttgttttttaatcatgtcggttccgtaagtgtgggagcacagaaaatgcttgtaataatttatcattatgctaatctacacagatagatggttgttgatctttgcagaaagatagctgtgaaagaaaccaatgttaaccatttgccagttacctggtagttgcatagagcaaaatctgaactctgatgtagc

SEQ ID NO: 10242 - DNA, 1844 bp, Oryza sativa
  ref <308>: DATABASE ACCESSION NUMBER: AK107590
  ref <309>: DATABASE ENTRY DATE: 2002-08-28
tgtttggtctaaagggcgatggcgatggcctagaagttgatgacagtctttttatcgtctggacatgcgtacctgccatcatcttcgctgctgtcgctgtgttctggactcgaattgatatcgataatcgacgcctagctccgttcttgaaactcacaactgtcaagcatcgttttcaggagtctctgggattgtcctacatgaacgagtttggccttcatacggctggcaaggccatgaagaaccaggattgggcagtcttccttgcaaaatgtacagcgatgctcggttggttaatgccaatttttactgcaggactgtttgctgtttctcaggttgcacaaacggcaaaccttgagcttcgacccgagacaaagtttgcttctacaagcaagtcattgagtaccgccattgatagcgacatcattgacaaggtccttctacaagagacacccaagtacccgagatggacttgggaagacgtggcccttccagaggtttccctagtggaccatcccagcgagtggccacttccaaacactgaacttgtggctaagatctctggcctcaagagcaaactcaaatgcgagaccgtatctcttgaagggggcgagggcgcagactggcaatgcgttccttttggtggatcgaagaagaaacccatatgcggtgcggaccaatctcgcactgcacttgtcgcttccacatgcccacagctttcttcttcgtactcaatcaactatgtttggggaagctgtgctagtgatggcttcatatccgtaatgatgtgcaacgaatcacttgttgaggttgacgttcaaacgacgttccgcactgaggatttgtatatcaatacgaacgagattcctatcacgaacgcatcaagcgagcagccgtcagatgtcaaagcagataccacaagcgtttatgcggcacttgataacattggcgccgatgacaaaaagtttaatggactggacgacttctttcgtactttagtcctttcaaggctgtcaactactttggagcgcatagtgatgcccgagagacagaattccgtttctcaggcaatccgtcaaatgcatgggatactcgctgcgcaagctatcaacagtgagttgatacggcgccccctggctaaaaagctgcgtgttcgtgatgattctcaaccaatcatcccggcacatgtcgactatgttatcccacgtttgacacaaggcaatgtgcaaacatttgttctcattggcctacttgcattcacgcttttgttcggcctattatcccttcgcacggcatctcgtggtacactcccaaagagtcccggaagcatcgccgctcaagcaagtcttcttgcggactcgtccttgtggtggcgcctcccagacggtgcggaatggatggaagacgatgacctggcccgatgcctacgccgaaaaaccttccaccttggatggagtagaggaccctcaggtaaccaaacttatggtatctacatcgtgcaagatgaaggtaaagccgcgagaccagccggcgtatcgcagacgactaccgacaatagcggagaagtaggggacgtccgatatatcagcatggcgcctggcctctactcatacggagatatcaaatcatattaaaaggagaacacaaactcttgtactgtgttatattgcattatattgtcgcattttggttggcatggcgttggaaagaaagcgatttgatctatttgatactatgaacttgctacatatatccagggaacctatcagaggtgaatactactgtgtacttgtcattgaataatgtttcagatacaatctcaaacatgtctttttatctcttct

SEQ ID NO: 10243 - DNA, 1696 bp, Oryza sativa
  ref <308>: DATABASE ACCESSION NUMBER: AK107591
  ref <309>: DATABASE ENTRY DATE: 2002-08-28
gcaaatttccaaatcccaaacccccccaaaaattttgaaaaaaaaaaggaaagtcctcagatcccctcacggccgcactaccacgccggaatctctcccgaatcggaccgacgccgcgcccggccgcactgcgggggcttctcctctcgcggcgcggccggggctacgcggggccctgcgccgccgttcgcggtgaatgcctgagcccgaggtcggcgtcctcggtggccggggcctgcaccgcgacggcctcaaggggtggcctgacctgcggtcgctgtccgggaagaagatgacgacgccgccgccgccgccggtggagaagcagcagcagcaggcgcggcccgcggcggtggcgccgccggaccaaaccctagagttctcggacgggctcctcctccgcgtcctcgcctgcctcccggagccccacctcacgggcgccgcgtcgctggtctgcaggaggtggatgcgcctcgcggggcgcctgcgccgccgcctcgtcgtcagggactgggcctttgtgacccaccgcctacaccaccgcttccccgaactggcggacctcgacctgttcccggcgtccattgtcgttccggccgtgccgtccccgacctcccctctcctcacctgcgccgaggtgtcgctaaccctagacaccggcgcggacccgccgctcgtcgcctgccgtttcctcgcagatgacgtgctcgacaggggccttgttgccgttgccgccagtttccccaacctccgccgcctttcagccacagccgcctcggagtccgggggtctgatggatatcgctggcggctgcgcaactttgcaagagctcgagctccaccgatgcaccgacctcgccctccgcccagtctccgcctttgcgcatcttcagatcctccgccttgtcgcagcctcctctgcgttatatggcaccagtgaagatggtggtgtcaccgacatcggcctctccatccttgctcatggatgcaagagattagtgaagctggagcttgttggttgcgagggaagctatgacggcatcgcggctgtggggcggtgctgtgcgatgcttgaggagctcaccatcgccaaccacaagatggacaatgggtggcttgctgcgctcgctttctgcggcaacctcaaaaccctaaggttgcaaggatgttgcaggattgatgacgatcctgggcctgcggagcatcttggtgcctgcctcacgcttgagagcctgcagcttcagcagtgccagctgcgtgaccgtcgtgccctccatgctctccttttggtttgtgagggtgcccgtgagttattggtccagaattgctggggccttgaagatgacatgtttgccatggcaggactgtgcaggtatagtaatcaccaatctcatttttcaatctaggttgttgatatattacaatgatcgcacaatgtgggcagattgtgtatttgaactttgattgtttagttattcctgctttatatttgatctgtcagactgtgatagtgacttgctgccaattgaagtagtcgtaggtaactgatgattggttgttctgaccctggtttagtgtcaggagatataatgcttgcaaattgcaatgcatggacccctccatgtttggagtcagtatgccactattgcttctgtggtaattaattaaataacagttatcatgggacttgagggcgc

SEQ ID NO: 10244 - DNA, 1377 bp, Oryza sativa
  ref <308>: DATABASE ACCESSION NUMBER: AK107592
  ref <309>: DATABASE ENTRY DATE: 2002-08-28
atctccctgctcctcctcctccaccatcaacacaaacacgcccaaacgagcccatcgccgttcccgcgtgcacctctcagccgtccatcgcatccgcctcgcgtaaccgtgcaaagcctagccaaaccttggcctcccgcatctaaacactcgcgtgtgtttcaggtgaccgcttcccgtctctccatcacctccgttcggtctccccgcgacctcgacgctcctcgaccgtccttgcaagaaagcgcttataagcaagcccgttcgcaaccatggcctcgtacggatcatctccctacgcctcgacgagcaccggctcgcaagccgactcgccactcgacaagatccgcgagtacacttcgaaagtggagggtctgatcgaccagtacacgcagcccatcaagccgcatctgccggcgctcggccgcttcctgatcgtcgtcacgttcctcgaggatgcgctgcgcatcctcacgcagtggagcgaccaaaagtactacctccagcgccatcgcggcttcccctggggcatcagccacattttcctgctcgccaacgtcgtcgtcatgtgtgcggcttcggcagctgtgatcatgcgcaagtaccccgagatgtcggtgggcgcgctgttcggcgtggtggtggtccagggcttcggctacggactgatctttgacctcaacttcttcctgcgcaacctgtcggtggtgggtggcctgctgatggtgctgtcggacagcctgtcggccaagaagaacatctttgccggactgccgagtctgagcgagacggaccgcaagatcttcttccagctggcggggcgtgtgctgctcatcttcctcttcatcggcttcatcatccagggcgagtggacgctggcgcgcgtcatcgtgtcggtgctgggcctcggcgcctgcgtgatggtcgtcgtcggcttcaaggcacgctggagcgcgagcttcctcgtcatgctgctcagcctcttcaacctgttcgtcaacaacttctggacggtgcactcggcgcacccgtcgcgcgacttcctgcgctacgactttttccagacgctctccatcgtcggcggtctgctcctcctcgtcaacatgggtcccggcggtctctcggtcgacgagcgcaagaaggtcacctaaattgcatcctcgcatgctcggagatgggcggtggcttgggcagggcgtggcgtgccgtgcgtggactcgctggcatcaccacgccctgaagagctgccaccatccaaacgaggcgcagtcagctgggtcggttgctttcgcttggcgtttttcgacttcacagcctctccttcttgtctattcgccagctcttgcgcaaaaaagccaacacaaaatgatccacgtt

SEQ ID NO: 10245 - DNA, 1617 bp, Oryza sativa
  ref <308>: DATABASE ACCESSION NUMBER: AK107593
  ref <309>: DATABASE ENTRY DATE: 2002-08-28
cctgcttcattgctcactccggcggcgatggccgacgacgtcgcgccgcgcaccgcctccgcctacctcgacccctcctactgggacgagcggttcgggaaggaggagcactatgagtggttcaaggatttctcccacttccgccacctcctcgccccgctcctctccccttccatctcggttcttgaggttgggtgtggcaactcgcggctcggggaggagctgctgcgggagggcgtcgccggcggcatcacctgcgttgacctctcgcccgtcgccgtccagcggatgcgtgaccgcctcgcggagcagggcaccgagggtgtggaggttgtggtggcggacatgcttgatctgccgttcgatcgtgagagcttcgatctcgtgattgagaaaggcaccatggacgtattatttgtggacagtggtgatccttggaacccaaatcctacaacagtggataatgtgatgaaaatgcttgaaggtatccacaaggttttgaagcctgaaggcatatttgtatcaattacctttggacagccacatttccgtcgtcgattttttgaagcacctgggtttacatggtctgttgagtggagcacctttggtgatggcttccattatttcttctatattcttaaaaagggcaagaggttgttggattccaacggtaaccaacatacacagcctgctgctccaagcattaatatgttccatgaagagcttgagagtgaggactacatattccgaacaaatgttgatgagttgtaactggcaatttaacaagtgcatcatcggcttgggtgggagttttgatgaagctactacacatcaagagagacgtcccgtccagcatcaacttggtagatgaatgatcttggacagatgcatggaaagatcttgcttggtgctgtaccattgccctggctagggatttctgtgccagctgaattgactagaaaacaggtacctttatcattgttcccagatttttagtaaaccttccaaagaagttcccttttgtttccaaacaatgcacttctttgctactccctccgtttcatattataattcgtttgacttttttaaattctatttttttaagtttgaccaagtttgtagaaaaatatagtaacatttttaacccaaaacaaacatattattaaaatatattcaatgttaaatttaatgaaactaatttggtgttgttaatgttgctagtttttttttataaacttggccaaacctaaagaactttgaccaagtaaaaagtcaaacgatttatatgaaacggagggagtactaaagtagcaatgatgttatctgatgctgcaaatatgccttctgacggtgtcaactgtggcctagtttggcacgtccaaaatcctggtctatcccatggggtgagtaatttggttcaatttcctgggcatttgcaagctaggccttcagtttcatgttaggacttgtctggaattcatggaaaattttatgggaaccttgctttgttctatactccccactactaatgacctactttgtggagttcctaaaaaattatgacagatgccttaatcaatgctccatttatttcaaaatataaggcagatgtttcat

SEQ ID NO: 10246 - DNA, 1604 bp, Oryza sativa
  ref <308>: DATABASE ACCESSION NUMBER: AK107594
  ref <309>: DATABASE ENTRY DATE: 2002-08-28
aatcgcacctcttcctcgtagcctcaatcgctcagagatatatcttgtttgtcccactccgtcgaactactcgctcacgccacccgatcgatttacattcgaacacagaccttctaccacaggactaccaccacagatctaccatacagtacaacatggcctctgcagacgtcgagaagccaacggagcctgcgcctgctcctgctgtgcccgactatctcgcctcgccgaacgctgtgtttggtgacgaaggcgtgaaatggcgctatggccgggcgcccgactactccaagacccgcaaagtctgggaagaaggcaagaagatgaaccacgccgccggtagcttgccgcagctggtggagaacctcgtcaagaactgggaggttgaagcctccttcaaaccccgcctggaggactggcgtaccatcgaccacgcgaactacaccttcgctatcaacggaggcccaccgcaaaccgccgagcacatgctcaaggtcggtacctacaatgccatcattgcccccaatgagttctacagcccggagaactcggactttgcttcgagtcacaagactttcaagcgcatgatgcctacgtttgcatgggaggtgctcgaggtctacagtggcccgcccaccgttgcattcaagtggaggcactggggcaccatgaagaacgactatgttggtttcaacgacaagggagagaaagtcacagccaaggctcacggtggtcccattgacatccaaggcgtcactgtcgccaccgtcgacgacaaagtccgtctacaagccgtcgacacctggttcgaccctctggagatgttccgccagatcgctcccggtggcattgtcaacaaagagatcatgaaccgcaaggtcgaccccaccgacgcccttgacaccgtcgtcccgcagaacgacggcgtcaagatcgcccaagagcacaacgacccttcttcagagcacgcaaaggaaccagcaccacaagacatcctccccaagcaagtctcaaacagcaccggcgagccagcagacgctttcgtaccgcaccaaggcgccgacaccgagaaagcagccgagaaggtcacaagtgatccttcagggcccgctcaggaaatcgttgcaagcgcagccgacaacggtgttgacgccgagctctcgaagcctgcgtccaacttcaccgaatcaacatccaacggcgactcaattactaaagaccccgaacaaaccatcaatcaagtcgtcgagacccgcaccacaggcccccaagacgccaacggcacagacgagtctcgcgccaccggtacctttgatgcggtcgacgagcacctcgaaggctcagcagagaaagtgcaccctcacccccacgatatggaagaaactgtcaagcccgtagccggcgaagccgtcgctgcgcctgcagactcgacagagacgaggatgacgcacgaggagatgtcgagattgggtaacgcgggcgagtgccctttcttgatgaaccgcgagtaaggtaaatccacatgggtgattggttgtttgcgtagatggcgtttcttgcgaggatgtcaaaaatcaatgttaacattactgtcctatcctttg

SEQ ID NO: 10247 - DNA, 1957 bp, Oryza sativa
  ref <308>: DATABASE ACCESSION NUMBER: AK107595
  ref <309>: DATABASE ENTRY DATE: 2002-08-28
ccacctcgccaatccctttctcctctccatcttcactcgtgggcctgctgctgtcgtcgttgcgtcatgtgtggcatcacagcactcctcctcgcctcggtcgaccagtcggctgcgcccgagatcaacgaggcgctctcgctcctccagcaccgtggtcaggatgccgccggtatcgtgacgtgcggcaacaagggccgcttctaccagaccaaggcgaacggcatggtgcgcgatgtcttcgacgtcaacgccgtcgcgcgtctccagggaaacatgggcgtcggccacgtccgctaccccaccgccggctcctcggcgcactcggaggcacagcccttctacgtcaactcgccctacggcatcacgttcgcccacaacggcaacctcatcaacaccgacgagctgcgtcgcttcctcgatgccgacgcccaccgtcacatcaacaccgactcggactcggaggtgctcctcaacatctttgccaacaacctgcagaagacgggcaagttccgcatcaacgaggaggacatcttcaccgccatccgcgaccttatgaagcagtgcaagggcggctacacctgcatcgccatgcttgctggtttcggcatcatcgccttccgcgaccccaacggcatccgtccgctcggcatgtgctcgcgcccttcgtcagctgccgacggcgagctgcccctcgagggccacggcaaggactactgcttcacctccgagtcggtcgtctgcgacgcgcttggctttgaggactttgaagatatcaaggccggcgaggcggtcatcatcaccaagtacgctgtgtcgcgtcgcatcctcacgccgcctgccgactcacccgacgcctacgccttctcgcccgacatcttcgagtacgtctactttgcccgtcccgacagcgtcatggacggcgcctcggtctaccgctcgcgcatggccatgggcgacaagctcgccgacgaggtgcgccgccagctgcagaagacgggcgagtcggtcgacgtcgtgatccccgtgcccgacacctcgcgcgttgcggcgctgcagctcgcccagaacctcggcgtgccgtaccgcgagggcttcatcaagaaccgctacgtcggccgcaccttcatcatgcccggccagagcgtgcgccgcaaaaacgtgcgccgcaagctcaacgccatggcgctcgagttcaacaacaagaacgtgctgattgtcgacgactcgatcgtgcgcggcacgacgtccaaggagatcatccagatggcgcgcgatgcgggcgccaaaaaggtgattatggcgtcgtgtgcgccgcccattcgctactcgaacgtgtacggcatcgacatgccgtcgcgccaggagctcgtggcgtacggccgcacggtggagcaggtggccgagtacatccaggcggacatggtgatctaccagacgctcgaggacctcatcgactcggtgcagcagttcaacccggagctcaagcagtttgactgctccgtgttcgacggcaagtacgtcacgggcggcgtggattcggcgtacattgcgcatctcgagcatctgcgcagcgaaaacgcaaaggccaagaaggcggccaccaagatccccgtgatcgccgagagccagaagaagatctatgccagccgcgccagtccggctgcttcgagcgtggcgggcaacgacgataggcttgcggtggacgctgcaccggcgggcgccaacggcagcgctgccaacggcaaccgaaagcgcaggctcaacgaggaagagatggaggaggaggagaagcagcaggacgtcggatgctcgggccccatgaacggcgccgacgacattggcctgttcaacagctggacgcgctaatgtgcgcgccgcgcgccccaaaagcatcatcgctatgcaccgtcttgtggtcgtcgaatcggttcgtataatgtaaaatgttaccctg

SEQ ID NO: 10248 - DNA, 692 bp, Oryza sativa
  ref <308>: DATABASE ACCESSION NUMBER: AK107596
  ref <309>: DATABASE ENTRY DATE: 2002-08-28
atgctcaagcagcagcagcagcagccatcgcccacactcgtcggagggcggcgttgcatggaccgcggcggcggcagtggcggctcgatggggctcatcgccttggctctcgcgtccaccggcatcatcatcatctcctactccctccaccgccgcttcctcgccgacctcaagctctccatcgcgcgagcgcagcagcagcaggagcagcaggagcaggagaagccgcagcggccgcgggagaggacgaggagggtgcggttcgccgccgacgtggtggagccgtcgtctgacggcgacgagtaccgccgccggtacgtcgccggccgcccctcaccggcgatgggcaactcctcctcctcctcaccaccggctaggcctttcgctaggcctcgacgcgtcatgcaatcacacccagctagctagctagcctcggatttgcaggaagaagacgaagcttgcagagtttgcagtggcagtggcagctagatgtgatcactactactagctgtttgtatcttagctttcgttctagctagcagtaagagtttagaatactgcgataataatcaataaaccaataagcaactcccagcttcgaatttgacggttttggttttagttaatttattattacctgtaaggattatgtttcgattcagtttacattagttaattaattacctcgattg

SEQ ID NO: 10249 - DNA, 1298 bp, Oryza sativa
  ref <308>: DATABASE ACCESSION NUMBER: AK107597
  ref <309>: DATABASE ENTRY DATE: 2002-08-28
cgtaaggtacgactgataccaaggaatacgcgagagtggaataagagagcatgggacaaggatttttatactggttcaggccctcaagatcttcccgaggacatggtgaagagcagcaccaagaaggtggtgatagacaagccaagcatggctagagacatcccgacctcgttgtgcgacctgccccaagctgtcagggatgggattgtaaatgcacttgttgaccaccaggaagtcgcggccacaaaagacgtggtggagatggagatagggtcctctaccgccgagaaggtggctaacatggcctctcaacctgggtctagtggtaccgttggatccaagaagaggaaatggggcttcggagtggaccccacgggtggtgtcctgacaaagggtacccattccttgacctcctcacccgataatgcccccactagtggaaggctcaaaccaatgagatttatgtcgaagagcaaggccaaggccgcccctaccatctccaatcagaacatggggaaacatgacgaggctagttcccaaccagccacccacatcatcgtctccccctccacagcccccctcccctccgttgctgcagttgtcttgccgcctccaggaacggcgttcaaccatctagctagtgcctgccaagaggtactcttttcagctaaggcagccagcacagaagtcaaccggctcatcgccgagctcactgctaccaacgagaagttaagcaaactcaaggaggagttgaccacggcgaacaccaacaacgaaagcctgcgccttctcattaaagagaattcggaaatgcaccaagagggtcagaaggccctagcggaggagaagagcaaaagggaggccctttatgccgggctgaaggagaacttctttgccttcaatgaggtggcgaagcaacttggtcgtggggtgcagccgccaccgcacttcgatgatgtctcgctactagcgtccattggcgagctagttggcgagatggagaaggtccccgctgacatcatccagaaagctgactgggacacccgcatcgccctcaagactggagcctgccacacccttgcttgtatctcgtccaagcatccagagctggacctcaacaaggaggtccacgagggtgtggctgaggaggagagggaaaagctcatggatcaacttgagaagactggcgaggcggtggctagcttctatctcgactagtaattttaggcaatcttttaaaagtcgctttctagtgctgtagtgacttaaatataatcagatgcattaatatctccttt

SEQ ID NO: 10250 - DNA, 1584 bp, Oryza sativa
  ref <308>: DATABASE ACCESSION NUMBER: AK107598
  ref <309>: DATABASE ENTRY DATE: 2002-08-28
atccgtcctttgttgtccctctctagggtttccacttccttcctgctcggattcccatggacggcccgtcgggttggttcctggaggtccctccgccgctccacaccgtggatccgccgggctcccctcctcctgcctccatcctcctcgagccatacggctacttcagcgaccgcaccaaccacaccaccgccaggggcctcaccaggggcggcaagaacatcgtcttcaccttctggacggccaccccgccgcgcgcctccttcttcaccctccattcccccgacgacaccaagtgctccgccttcgccgacgcgcccgacgccgtctgctccgaccaccacctcctcctgctccgcatccccatctgccttgaggccacccaaatctacgccatcaacaaccactacttcgtctaccacgcaggcggcgacggcgagcagcggctcacgccggtccccacgcccccgggcctcaccttcgccttccccaacagtgaggtcgtcctcctgcgccgccgccgcccccgcgaagccttcttcctcgccgcgctccatcgccccaccctctgtcgccagtacacccacgagcagttcgatctccacctgtacagctccgagacgggggaatggagcaccaagctgatggtgagcgtcgacgccgatgatgatgatgattcaaccagcttcagattttcctacgctagcaaggcgattgttgtgggaggggagctcggaaccgtgggctgggtcgatctctggcatggcatcctcgtctgcgacatcctcctcgacaaccctcgcctccgcttcatcccactgccgccgccgctggtgcccaggcaactcaagggagacccgatgtttcatcgcaacatcgttgttcttgaagggtacatcaagttctttgaaatgtacaaccacaccaccggatctgcctctgctcaaggttgggtggctgcaacgaagaagatgaagatttcgagcattgcatctgggaacagcagcagcagcagctgggaggacgactgcgctatcaaattctccgagatcccagtggagagcctcacatttgcccagatgctgcggctgcagcctaatctgaagcagggtacgggtacaacgaggctaactttgaagagactccacgctggttatcctgcgctgagcttgcacgacagtgatgttgtctacatcatgcacacacctgatcccgacgaggaggacaaggcgttggtgattgctgttgatatgaggaacaaggctctaaagggtgtggctgattttggctttggaaggcctgtgggctacggtttcacctaccttcaaactgggatctccaagcatctcagcaattgttcttcttcctccagggatggaattttgggagcaggcgagaaagaagttccaggtgagggtgttgcaaccgcagcctgactcttaaggtttgaagcagggcatggccgtcaagcagagtggtggtacttattattatagcaagttgaaacaatgcccttcacacctcacccgtgatggctagtgttgcattatcgatggacttgtattaccttacttcttttgcatt

SEQ ID NO: 10251 - DNA, 1376 bp, Oryza sativa
  ref <308>: DATABASE ACCESSION NUMBER: AK107599
  ref <309>: DATABASE ENTRY DATE: 2002-08-28
atttttttttctccttttattcacccctctccctctctctctctctctctcttcctctcctccgatccaaacgtaggaggggaacgcctcctcccacctctctctccaattcgaaaccctaggccgccgcatcgatccggggtgcgcggcggggtttagtgtgccgttggtggtgggggtggtgtagcgctccttcgggcggaggaggcgacggcggaggaggtggtggtggtggtggtggtggcggcggcggccggccatgtcgacggaggacgagaagctcctcaaggaggcgaagaagctgccgtgggacgagcggctgcagcacaagaactggaaggtgcggaacgacgccaacatcgatctcgccgccctctgcgactcaatcaccgaccccaaggacgcccgcctccgcgagttcgggccgttgtttaagaagactgtggcggattcgaacgcgccggtgcaggagaaggcgttggatgccctgctcgctttccagcgggcggctgatgctgatgcatcgaggtatgctaaggaggtctgtgatgcgattgtcgccaaatgcctcactggccggcctaagacggttgagaaggctcaggctgcattcctcctttgggtggagttggaggcggcggaggttttccttgaatcaatggagaaggctgtaaagaacaaagtggccaaagcagtacctgctattgatgtgatgtttcaggcacttagtgaatttggagctaaggtagtaccacccaaaaaaatattgaagatgcttcctgagctgtttgatcatccagatcagaatgttcgggcttcatccaagggtttgacacttgagctttgtcggtggattggcaaagagcctgtaaaggcaattttatttgagaagatgagagatacaatgaaaaaagaattggaagcagagctagcaaatgtctcaggaatcgctaagccaactcgcaagataagatccgaacaagaaaaggaacttgaggaggaagttgtgccagaggcagcaggcactaacaattctgaagaggcagtgccagaggcccctatggagatcgatgaatacgatcttgttgatcctgttgatatcttaacaccacttgagaagtctggattttgggatggtgtgaaagctaccaagtggtctgaaagaagggatgctgttgccgagctaaccaaacttgcttcaaccaaaaaaattgctcccggtgattttcatgaaatctgccgaacactcaagaagcttattaccgatgtcaatttggctgtttcagtggaagctactcaagcaataggaaatttagctaaaggtttaagaactcatttttctggaaattcacgggttctgcttcctgttttacttg

SEQ ID NO: 10252 - DNA, 1386 bp, Oryza sativa
  ref <308>: DATABASE ACCESSION NUMBER: AK107600
  ref <309>: DATABASE ENTRY DATE: 2002-08-28
atacatccctccctcccccattccaccgcatcttcgcgagcaaggtctcctctcgctcccttccccccctgcagcacccctcccgcctcgtttccggcatactcctcaagatgcaggctttctcgagacagcttcgcacgcctggcgcggccctgctgcgtcacgcctcccgacgcgcctacagcgcctccagcaccccctacgcctcgaccatcgagaacctgcgcatcaacagcgacaccaaggtcctgttccagggctttaccggaaagcagggaactttccacgcccagcaggccatcgaatacggcaccaaggttgtgggtggcacaaaccccaagaaggctggcaccgagcacctcggtctccccgtcttcggcaatgtggaagaggccgtgaagaacacgggcgccactgccaccgccatcttcgtccccccgccgctggccgctgccggtatcgaggaggccattgccgctgagatcccccttgttgtgtgcatcaccgagggtatcccccagcacgacatggtgcggataaccagcatgctcaagtcgcagtccaagacccgtctcgtgggccctaactgccccggtatcatcgcccccggccagtgcaagatcggcatcatgcccggcttcatccacaagcgcggccgcatcggcattgtgtcgcggtcgggcaccctcacgtacgaggccgtcaaccagaccacccaggagggtctgggccagtcgcttgtcgttggcattggtggtgaccccttctcgggcaccaacttcattgactgccttaacgttttcctcaaggacgaggaaacggacggtatcatcatgattggtgagattggtggtgccgctgaggaggacgccgccgacttcctcaaggccaacaacaccagcggagccgacggcaagggcaagcccgtcgtcagcttcattgccggcatcagcgccccgcccggccgccgtatgggccacgccggtgccatcgtcagcggtggcaagggtggtgctgacagcaagatcagcgccctggaggctgctggtgtcgttgtcgagcgcagccccgctggcctcggccgcgccatgcgtgagcagtttgtgaagcgcgatctgctgtaaacggccccaaagctctctctctgagtgtcggtgaatacccgtgtatgtgatgtgatagtgggaaacggaggcaacgtcaggttgccgtggatctgtacttttggcatagcaggctgcatggggatgaacggtcggcctactgtgtcttgggcaaatcgcatcatcaccgcgattttgccttataggctgacgccacgatagacggaggcgaacggaggatagtgaatttcgaccaatctcggtccttacggactctctttcc

SEQ ID NO: 10253 - DNA, 1817 bp, Oryza sativa
  ref <308>: DATABASE ACCESSION NUMBER: AK107601
  ref <309>: DATABASE ENTRY DATE: 2002-08-28
gtacgcgaacccgccgtgccgtgtcaggtccatgccggacgtctcgtcctcggcggagatgcggagcaggccgagcttcttgagcccgtagaagagaggtcccatggtgcagctgacccacccgaagatgaccaggatctggatgacgtgcgcggcgagcagcttgccgccgccgcccatgaacaggccgtacggccggccggcgccgtagatctcctcgacgtacttctgcctcgcgaagagcgcggtgaagaggatcccccacgcgccgcacccgccgtggagctgggcggcctcgagcgggtcgtcgaacttgaggcgcgcggcgagcgcgttgaggccgatgagcacccacgccgagacgaacccgcagatgatcgcggcccacgggtcgacgacgctgcacccggcggtgatggcggcgaacccgccgaggaggccgttgcagacgtcgaccacgttccagtgccccgtctggagccgcttcccgaacagcgtggtgagcgccgccacgctgccggccagggtcgtcgtcacggcggtgcggccgactccggaccactgcccgttgatgccgccggccgggccgtacgtcttgaggatggtggtgaacgacccggggttgaatccgtaccagccgaaccacagcaggaaggtgccaagcacgacgagcgacgcgctgtggcccttgagcgccaccgatcggccggcgtggtcgaacctcccgatgcgggggccctcgatgagcgcgccccagagcccggcgacaccgccgaccatgtggacgacgccggagccggcgaagtcgatgacaccggagccgaacagcagaggtccggacgtgcgggaggcagaggcccacccatcggcggaccagatccagtgggacaccaccgggtagacgaacccggtgaggaaggcggagtagatgaggtaggcgacgaactgcgtcctctcggcgatggagcccgacgtgatcccggcggcggcgatggcgaaggcccactggaagaggaagaagtcgtagtcgaacccggtctgcggcatgtgcttgaggccgaagaactgcttcccgatgaagccgttggacggcgtgccgaaggcgaaggcgaagccgaagaggtagtagaagagcgccccggccgcggcgtcgagcacgttggtgagcatgatgttcatcgtgttcttggcccgcaccgacccggcgcagagcatcgcgaacccgagctgcatggcgaacacgaggtacgccgagaagagcaggtacgtcgcgtccaccgccgacgtcgtgtcggcgaaccggttgcacaggtagtccgtcgcgttcgccgccaccggccccagcagcggcgccaggtccgccgcgcacgtcgccatcttcctccctccctcaccaaaccctcctctctacgatccctcgttcaaactagagctgctgaaacggcggcaggattgggcgtgggaggttggggagaaacgctggcgccggatttataggaggaggaggtcaggtcgctcgctcgctcgctcgccgtgcgggagagatgacgcggaatggtttcgtcgttttggtttttggcggcggggcccaccgcgcagtgaatcttccgtggtggagggggatctcctttggctgggtcggcttgcggcggttgcggggtgggagccgtttcggggatcccgggagaatctggatgtgtagctgtaggccgcgattaatgatgtggttttcgctccctgtgtcatgtcctgtgagacaaacgacgagatgtggatgatgatgtgtatggtttcgaattaatctcgccttcattttt

SEQ ID NO: 10254 - DNA, 1180 bp, Oryza sativa
  ref <308>: DATABASE ACCESSION NUMBER: AK107602
  ref <309>: DATABASE ENTRY DATE: 2002-08-28
aactttgttgccctggcactaaagaattttcttgaaggagaagatgaccaagatggaaaaatggcacttggtttacattttctttccctgttagacaaatttcagtgtcttcagggtcattaattaggtggacaaaaggattttccatcagagacacggttggcagagatgttgctcagtgcttaaatgaagcgcttgccaattgtgggctaaatgtgcgggtcactgcattggtgaatgatacagtggggacattagctctagggcattactatgatgaagacacagtggctgctgtgataattgggtctggcaccaacgcttgctacattgaacgcactgatgcaattatcaagtgccagggtcttctaacgaactctggaggcatggtagtaaacatggagtgggggaatttctggtcatcacatttgccaaggacgccatatgacatcttgctggatgatgaaacacacaatcgcaatgatcagggctttgagaaaatgatatcaggaatgtatcttggggaaattgcaagattggtatttcatagaatggcccaggaatcagatgtttttggtgatgctgctgatagtctatccaaccctttcattttgagcacaccgtttctggccgcaattcgcgaggacgattcaccagatctgagcgaagtcagagggatacttcgagaacatctgaagattcccgatgctcctctgaaaactcgacggctggtcgtgaaagtctgcgacattgtgactcgcagagccgcccgtctagccgctgcaggcatcgtggggatactgaagaagctggggagggatgggagcggcgcggcgtcgagcgggagaggtagagggcagccgaggaggacggtggtggcgatcgagggcgggctgtaccagggttacccggtgttcagggagtacctggacgaggccctggtggagatcctgggggaggaggtggcgcggaacgtgacgctgagggtgacggaggatgggtcgggggtcggggctgccctcctcgccgccgtacattcgtcgaatagacagcaacaagggggtcccatatagtgagagagacaatgaagatacagctagcccctcttgttcaaatgtaaaaaagggacattgtttgatatctatattcatatatataaaaatctgggtcttgtgcagag

SEQ ID NO: 10255 - DNA, 1479 bp, Oryza sativa
  ref <308>: DATABASE ACCESSION NUMBER: AK107603
  ref <309>: DATABASE ENTRY DATE: 2002-08-28
gtgcgcgcgtcagcagtgtcgaggaggttgcgtgaggcgtggatggggatggaggcctacgagctggatgcatccaccatccctgatcatcacctcctcgacctcgactccacctttgccgccatcgtcgaccgcgtcgtcttcaaccactccggccccggcatcaagtccatgtcgctggcgcacacgcgctacgacaccgacggcgaccggagggtgacggcctggctggaccgcctggcgtcccgcgagcaccaccgcctggagaggctcgacgtcaacattggcgccgccctgcacacgccggcgtcgctgttccggtgcgagacgctggtggagctgcggctggtggtgcacgccgccgctcgtgggttgcggctggacgtggacggcgccgtccatctcccgcagctgaggcggttgtgcctggagcacgcggggttccgcagctcgacccaattccagaacctcatcgacgggtgcccgttgctggagttgctgcacctgaggttcacggcggtggcgcggagggaggacacggtgagcatcgagatccgcagcccgtcggtccggcgggtggtgttggaagggtgcggcgggtacggcatggtgccgttcgaggtgtcggcgcccaacgtggaggagttggtgttgtccgggcggaacatggtcgccgtcgagaagggcggcgtgaggaggctgtcggcgcggaaggtgagcctgctcatggacgacaagctgtggtggtacaacgtctttgcacccttccaccacttcacggccttcctcaacgtcgggaccaacatgagtcgcatcatggctggcttccatggcgtcctcgagctcgccatctccggctggtgcatcgagtacctgtcgaagatcgtggacagcatgaatctgccggactggggaatagaggttctgagagtggagggaatgtggccaaaccaaggccaagcaggcgtcgtcctgcatctccttcgcagctcgccatgtctcaggaaccttttcatcaccaacgagttggagcatcccagggagatctcgatcgatgagaatcgggagcagtatcctgcaacgccggagttcctgttcgacgccgtgcccggccggctgacccatctgaggcgcttcttcatgttcaacttcagcggcaaccgcaacgagatcagcatcatcaagttcgtcttaggaagctcatccatttccatcaacccggaccagttcggtgtcactgattacctcggcaacgactggagttccacccagcttatcctagcctcgctctagttgattcgctagctctctcctgtgtgtgtcttcatcgacattttatcatcgatagatctggctagtagatgatgccagatgttattgcagatatatggtgcaactgcacacagacaatccatgcagtggttcatgcaatgcaagtatgcaacagactgttttaaaggagaagaagcttcgtttagc

SEQ ID NO: 10256 - DNA, 1366 bp, Oryza sativa
  ref <308>: DATABASE ACCESSION NUMBER: AK107604
  ref <309>: DATABASE ENTRY DATE: 2002-08-28
tttaattaaaacaaagcattgcgatggtcctcgcggatgctgacgcaatgtgatttctgcccagtgctctgaatgtcaaagtgaagaaattcaaccaagcgcgggtaaacggcgggagtaactatgactctcttaaggtagccaaatgcctcgtcatctaattagtgacgcgcatgaatggattaacgagattcccactgtccctgtctactatccagcgaaaccacagccaagggaacgggcttggcggaatcagcggggaaagaagaccctgttgagcttgactctagtccgactttgtgaaatgacttgagaggtgtaggataagtgggagccctcgggcgcaagtgaaataccactacttttaacgttattttacttattccgtgagtcggaagcggggcctggcccctccttttggctctaaggcccgagtccctcgggccgatccgggcggaagacattgtcaggtggggagtttggctggggcggcacatctgttaaaagcatcgacctgctgctgcccaagctcaaggacgaggtgatgaagatcatgcccgtccagaagcagacgcgtgccggtcagcgcacccgcttcaaggccttcgttgccgtcggtgactcggacggccaccttggtctcggtgtcaagtgcgccaaggaggtcgccaccgccatccgcggtgccatcattgtggccaagctctccaccatccccgttcgccgtggctactggggtaacgctcttggtgagccccacactgtgcccatgaaggtttcgggcaagaccgcctcggtcatgtgccgtctcgtgcccgctccccgcggtaccggtatcgttgccgcccctgcttccaagcgcatgctcgagctcgccggtatcgaggactgctacacccagtcggccggtcagaccgccaccatgggcaacttcctcaaggctaccttcgaggccgtctccaagacctacgctttccttacccccaacctgtggcgcgacattgctccccccgccaccccctacgtcgagttcgcctcgcacctcgcccgcacccagaagaagtcgctctactaaatgtagtggctcggcttgttcggtgtacggtctggtggaggtgctagcgatgtcttagcgggcatcgttggctgtctcgactctggcacagggtcgtcagtctcttcgtcacttttttgaaggactgcgacctgatctttcccccttctctcgccctctctattcccagcttccccgttccccccacctttttctcttctgcccattcttcgctctctcgcagcgacttgtattttgcatacagccaaccccccaaaaatctgaagcatgctcctatgcgtcttgaccatc

SEQ ID NO: 10257 - DNA, 1415 bp, Oryza sativa
  ref <308>: DATABASE ACCESSION NUMBER: AK107605
  ref <309>: DATABASE ENTRY DATE: 2002-08-28
tggcctggaacctctccactcccctcaacgaccacctttcctacaccctagacactcgctctccatcccccttcccctttccccttcccaacccctgcttgccactgcctcactttccctttgaacctgctctgctctgctctgctttgacctgctcagtctcaagatcgtctctacacattctttgcccgccgtcgcgtctttctatctgcatatcccacacgccgcatccatctcacattccaagcagcatacagcaacgtcctcgcagactgtctcgacggatcctcgaacagcatcctccagtctttgcccccccccaacacccgcatacactctcagcacacgccagcattagaacgccatgtcgttcgcgtcgtttgcgccgctgcccgcgccgtcgtcgggcgcatcgtccatctgggcacgccgcatgatcaccaagtcggtccccacgagcgaggccgaggtggagctcaacgtgctctcgctgctgctcgatgtgccgcttgcggcgctcgacgagcacgaccccacctcgcccgtggcgctgccctcgcccaactctgcctgggctcccagccctgtcgctgatatgggctttgcggacgtctcgccgctgtcgctcgagatgcacgcggcacagacggcggtcaaggcggcactcgacgttctcgaagagccgagcctcagccgcgggctgcgcatctcgacagacatccccacggcagctggaggacgcgggtgcttgacggcgcctctgtcgcctgcgctgtcgtcgcccgtttcgccggcagagtcgtgcttcagcaccgccgacgacgggctcaagaagaagggccgcgcgcgcatgtcgcaggagaagcgcaagcggctcgcacgccgacgcgagcgcgaggccctcgtagccacactcacgccttcggagctccacttcctcccgcactcgagccacagcgcacccgtcacgcccgtccactcgtcgttcgcaccgcacgcctttggcggcttcccctttggcgccgcctacgactcggcgccgcgcgacgcgttcgcgtacgacatgccgtcgcccgcactcaccaccgcctcgctcgctgcttccagtgcagcctgctcgacaccaggcagctcgccgaccgctcttgcggcggtgggagacgccaactcgagcccacccacgctcgtggtccagccgccctctccgcagcgacaccgcctccacggcctcggccgccccaaacacgcctggaccggattcgcccccacccacctcgcctccgtcttttgacgagtcctggcttgcttcttcctgcgggatgtatacccacgtagcttttgtaccgcccccaactcaatgtagccctagacacacacagctctgcacacacgccaaccattggattttgtttttt

SEQ ID NO: 10258 - DNA, 1630 bp, Oryza sativa
  ref <308>: DATABASE ACCESSION NUMBER: AK107606
  ref <309>: DATABASE ENTRY DATE: 2002-08-28
aatccatcccaggggttgctaaggctccgccgccgccgttgttactgctgccttcttcaattccggtgtagatctggggagacccatcatcagccttgcagatcagctttccatcaaacttgctcgacgatcggccgccggtaatctgcatcctgattgtcctagattgacaaaggcatatctgcgatcctagattgagagcacaccccaccctagtgctggtgctgaatttgctcttgctctttccattgcattgcatttcgtttcgtttcgttttgttttgttttccctagatgtatctctctttgagcaataatcaatcctatgctggccttaagttgtagtagtagttgttgttgttgttgagaagggatgggcatggcccgacgatttctgaacctggtggtggagagcaatcgcgatggcctgtattcgctgcggcgcgtgcctgcgaatcgcctcttgtacccatcaagaagagcagcagaggcagcaacggccaagtcggaagaagaagtgaaggcgtacaaggagcatgagggtaggaggcatccaggcctgcactttatggagcgattcgggcagtttccgagtccgatgatcaacttccaggcgtccccgacatacgagcacagcagcaggaatctggagttggccaccctcctcggcgacgatgagaacaagatcctcaccgtggataacagcgggcacaccctgctattcgacaccgtctcctactccgtggtgaagttcccctccctcaaatccaacaagggccgcggcgccatctccctccctgtcgaccgtgccgctccccaagaacctgacggcctctacgtcatgagccccaccgccgatcctctcaccagcgattgctgcttcgaggtgctcaactacggctctaggggcttccatgagagggccccttccaggctccctctgccgccgctcccctctgccagctacacccacgccaaccttgtctcctgtacggtggttggctccaccatctttgtttcttccaccgcccccgaatgcggcactcatgccttcaacacactcaccggtgaatggcaccatgttggctactggacgatgccgttttatggcagagctcagtatgtgcccgacctcaatctctggtttggactctctgcccgacacccttacaacctctgtgctattgatctctccaacgcccatctgcacccacccgatgtcctgcaaacttggcttgacctcgacatacctaaatcctggtcgccctccaagctcaacctcatcagcctcggctctggcagattttgtgctgccaagatctttcgttccaatatgcctgctgctgctgctttcctagatgattccgatgacgacgacgactatactgttgactctcatgtcatccctacggattttgctgtcttcactggcctgcatatggtgcgccgcaatggtaaggatggtcaagagcagatccaaatgatcaagcacaagtccatcttctacaccttcaacagctataatattgaatgggttatctgaatctaacctagcattgttccatagaagcaggatgtgtaaaaaatgcacagatatggtaagggattataacactacgctaattttaatc

SEQ ID NO: 10259 - DNA, 1614 bp, Oryza sativa
  ref <308>: DATABASE ACCESSION NUMBER: AK107607
  ref <309>: DATABASE ENTRY DATE: 2002-08-28
atctcctctccctcctctctctcaacccccaacaccaacagcccattccccctttacctagacttcaagctggccttggcatctagtgattcctctgttcacctctctactgctccacctccgcgttctgcaacatcaccttattccctgtctgtcatttgttttgatcgccgtgatccgccctgcgactctctttcctttccccacccagtatcctcagctcgacgtctcccctgaccacttgtgctgctaccatcgtctcttccctccgaccttccatcaaccaccaactttcgactcagaatgaagtcattcgccacctcgctcgcgctcgccgcgcttgtcgccagcaccgccatggtctcggcatccaccatggaccagcctgacgtgcccgacgtcgttcgacgacacgctcacaagcgcgcggctcacaagagctgctcggcatcaggccaggccaagcacaagagcaagaagccagctgctgccgcagcccaaaactacaagtcatccggctccaagtccaactccaactcgcactcgcagtccaagtccgactctgactctgactcgtcctcgtcctcgtcctcgtcatcttcctcgagctccacctcggcaaacggcaacacctcgggtggcaagatgggtctgtgctgggccaaccgcgacggcatgcccatcgacaactttgactttggctccgtctcgtggttctactcgtgggactcgacgcccggatgggacaacgcgcccgtcgacaagctcatgtactgcccaatgctctggggctggaagaacgccgactcgttcaagaagaacgtcctcgacaacctcgacgccaagtccaaccaacacaagtgcgccatggccatgaacgaggtcaaccagaagggccagtccgacatgagcccgcaggacggatgcaagctcatcgaggagtacctgatcccactcaagaacaagggctggtacctcatgggtccctccactaccaacgcccccgatggaaagacctggtaccagaacttcaagaaggcctgccccgacaccttcaacaagctcgactccatcgccatccactactacggcacctcgagcgacgacttcaagcagtacctccaggactggcatcagacgttcggaaaggacatctgggttaccgaatatgcgtgcacgaactttaatggcggaagccaatgcgacaagaacaagaccaacgcttttgctaccgagatggccaacttcatgaactcgcaggactggatcaagggatgggctccttttgccgttattcagaacctccagggagtcagcgagacccagagattgagcaacggcaacaaccccactgccctcttccgcacctacgccaacgccaactaaggcatggctcggggcttctgattcgccttctcctttcccactgtgccgcagccaggtgctgctcggcatcggcttcgtcttcatcttcacatgcccttccgcttgccgcgggcttgttcgtttgcattctcatgttccgcatgttccggtctccgacatatcacaaacagtccctcaaatgccaagcatactgtcggggctgctgagcagccctcgtcttgtctcctt

SEQ ID NO: 10260 - DNA, 1876 bp, Oryza sativa
  ref <308>: DATABASE ACCESSION NUMBER: AK107608
  ref <309>: DATABASE ENTRY DATE: 2002-08-28
atcgcaactctctttgcaccactgctccaacacccactaccaacacaaacactctcgtccgtgctcctcgcacgcgctcaatcgccaacactttcatcgcatccccacctgctcacaaccgctgcagcttctccgagcgctttgttctgtccgccagcatccccagcctcggcgcttctgatcaaccaccgcaccctgtcgccatctacttgggcatcgatcgagacaccgttgtttttatgtctctcctctcctccaccatacctcgtccatccgtcaactcgcctttcgcccgcagacaaaaaccgcccttttcggtgatgcatcgtagctgtacctgatacaactacttgcccatttctccattcgactttttgcatatctcgaccttcccatcgtcgagactgaccccccaacttctcactcaagcttcagcttcagctccagctctaagctcgatccatcgccatcatgtccgttgtcaacatccgtcgcgacgtcgacgacaagttctaccgctaccgcatgcccctcctccagaccaagatcgagggcaagggcaacggcatcaagaccgtcatccccaacatgtccgacatcgcccgttccctcagccgccctcccgcctacccgaccaagttcttcggctgtgagctcggcgcacaggtctccgccgacgacaagaccgaccgctacatcgtcaacggcgcacacgacgccgaccgtctgcgcgagctcctcgacggcttcatcgacaagttcgtcctctgcggcgactgcaagaaccccgaaaccgacctcaagatcctcaaggacggcgacatcctccgcaactgcaaggcgtgcggaaagcgcaccggcgtcgacatgaagcacaagctcaccaccttcatcgtcaagcacccgccccccaagcgtgtcaagggcgccaagggcgccggcaagtccgccggccaggatgccggcgacggcggctccgacgacgagctcaccaagcgcatcaaggcagaggccgccgagatccccaccgccgagcagcgcggcaacgtcgacgacgactggtccgtcgacacctccgaggccgccgtcgccgcacgcgtaaaggcgctcgagggcagcgtcaagtcgtcgctcgtgctcggcgacgacgaggaggacgaggacgaggacagcccgtacgcccagttcggccgctggctcgtcgccaaccgcaagggcggcgaagagggccgcgagtgctccgccgccgaggtgtacaagaaggcgcaggagttcggcatcgagaagaagcacaagaccgtccaggtgctcgcacagtcgctcttcaccgacgacgcgcccaaggagatcgaaaggtacggcgccgtgctcgccaagatggtcggcgactcggagaagcaccagaaggccatgctcggcggctttgagcgtctcgccggcgtccagtacccggcgctcgtgcccaacggcgtgcccaagatcctcatggcgctctaccagatcgatgtgctcgacgaggagtttgtcaagaactggggcacccacgtgtccaagaaatacgttgacaaggacacctccaagaaggtgcgccgcgccgccgcgcccttcctccagtggctcgacgaggccgattcggactcggactcggacgacgacgacgacagcgacgacgacgccaagcccaacggcaacggcgcaaagaagtcgtccgaggaagaggacgacgactcggacctcgacaacctttgagttgttttcgtccgcccgcaacatgttcccggcaccgtttcgtattctcgtttcgaatcgaatcctcaccgctcctgtcactgttttctcttacaactcatcgaaattggcacgcgtttgttcctgg

SEQ ID NO: 10261 - DNA, 1600 bp, Oryza sativa
  ref <308>: DATABASE ACCESSION NUMBER: AK107609
  ref <309>: DATABASE ENTRY DATE: 2002-08-28
aaatccagctcgatcgctgctcacctcgcacgcatccttttcttctcatccatggcaacctcctcaacccagcattaattccagcacaaatcctctcatggatatgtgctaaccaaccttgcacaaacaaggcagatcgagctagctcatccctgcagcttagcttagctagctaacctttaccttgccatggattgatcgatcattaattcttcttcttcttgctcgatcgtcgccatgagagccagctccttctcctccttgatgctgccttgctcgcatggccatggcggcggcagggccaccgcctcgacgtgcgccgcggcggcggcggcgtgccttgcgcttgtggccttggtgatcttggtggtttcaatggatccgagggcacaagcttcttcttggttcttcctttcttcttcttcttcgtcatcgtcttcgtcttcgtctaccttggttcgtcctgcagctagctctcacgctgcctccttgcgtaagccgagttcttggggcggcggcaatggcggcggcggcggcggcgagcacctcctggtcacctctagtagctttggtagtggtggtggcgctcgtggaagctggagccggaacagcacgagcaaggaggtgctgtttcagggaggaggcggcggcggcggtgatgagatgacgtcgacggcggcggcgccaacgccggcgttgatcatcggttctagctccggcgatggcgtgtcgccgtctcgcgtggccgtcacggcggcggcagctgaacctacaccggcactggctccggctcctgctccggaatggggtgttggtgatgctgctagtggagatgatattattcaagtaatgccgcaagcgcaaaggcgaggggatgtgaaattggagctattagaactcggtcttgctaaagctcgggcgacgataagggaagccatccaaaacaaggataacaagcccccattgacagacaaagattatgtgccagttgggccagtgtacagaaatgcctatgcatttcacaggagctacttggaaatggagaaggttttcaaggtcttcgtctacgaagaaggcgagccaccggtgttccacgatgggccgtgtcgcagcatatactcgacggaaggcaggttcatatatgccatggagatggagaaccggatgcgcacgagagacccggaccaggcccatgtcttcttccttccattcagcgtcgtcaagatggtgaagatgatctacgagccgaactcgcacgacatggatccgttgcggcggaccatctcggactacatcaacgtggtgtcgaccaagtatccacactggaaccggagccttggggctgaccacttcatgctctcatgccatgattgggtaagcaactacaggactaaattgttagtacgaatctggacagataccatctggacagggggcctgtccaaattaatggtcggtacagatgaaccatgtctagattcgtggtactaggatatgtgttattcatcatttgttactatattactatattttgaaatggaggtagtatcaatcaacttctgtgatacttcaaaagtaattgggatcaatcagttgagtt

SEQ ID NO: 10262 - DNA, 2445 bp, Oryza sativa
  ref <308>: DATABASE ACCESSION NUMBER: AK107610
  ref <309>: DATABASE ENTRY DATE: 2002-08-28
acaagctcgctcacacacccatcaacaatggcgtccacgacctccaaacccttgcagtgcttggcattgttcctcctcctcgcgcagctcgcccactcagccttcatccccaagcccaagaaccgcaccgagcacaagcctgatcagctgtcgaacacctacatcgtccatgccaaccacctcctcaagccgtcccgcttcgccaccctcgagcactggtacatctccatggtggccacgcactcccctcgcgccgccaccaacgccaccgccgccgccgccgcggtggccggccgcatcctgtacacctacgacaccgtcatgcacggcttcgccgtgcgcctcgccgccgacgaggcccggagcttgtcccgcggcgcccccggcgtgaccgcggtgcaccaggccaggatgtactacccgtagaccacgaggtcgccggggttcatcggcctcgacccggagtacggcctgtggcgcgacacggagttcggcgacggcgtcatcatcggcgtcatcgactccggcatctggccggagaacccgagcttcaacgacagcgggctcgccgccgtccgccgcagctggaagggcgggtgcgtgggtctcggcgccaggctgtgcaacaacaagctggtcggcgccaaggacttctccgccgccgagtacggcggcgcctcctccccgagggacgacgtagggcacggcacgcacgtggcgtcgacggccgccggctccgaggtccacggcgccggcctcttcatgttcgcgcgggggacggcgaggggggtggcgcccaaggcgaggatcgccatgtacaagtgcggcggcaactggggctgcagcgacgccgccatcatcgccgggatcgacgccgcggtgaaggacggcgtggacatcatctccatctccctcggcggtttcccgatcccgttctacgaggacagcctcgcgatcgccacgttcggcgcccagcgggagggcgtgttcgtcgccctcgccggcggcaacagcggccctcggccgtacaccgtgaccaacgtggcgccgtggatgaccaccgtcggcgccggcgccgtggaccggctgttcccggctaacctcacgctcggcaacggtgaggtgctcgtcggccagtccctgtacaccaagatggccacgggcaccaccatggcgccgctggtgttgctggactcctgtgacgagtggagtctctcgcccgacgtcgtcatgggcaagatcgtcgtgtgcctcgccggcgtctacgagggcatgctgctgcagaacgccggtggcgccgggctagtctccatgcaaggtgaggaatggcacggcgacggagtggtagccgacgccttcaccctcccggctctcactctcagctactccaaggccgagaagctcatggactacttcgagtcggcggcgagcccggtggcgtcgttcagcttcgcctgcgagacggtcaccggcgagaaccgtgcgccgacggcggtgggcttctcgtcgaggggccccaaccgcgtcgtccccgagctcctcaagcccgacgttctcgcgccggggctgaacatcctcgcggcctggccgcgcgacatcccggtgtcgatgttgaacatggacacgaggagatccgaattcaacatcctctcggggacatccatggcgtgcccgcacgccgccggcgtcgcggcgctgatcaagaagaggcacggcgactggacgccggccatgatacgctccgcgatgatgacgaccgcggcgacgctcgacaacaccggccgcgacatcaccgacgagggcgttcaggaggccgccaacgccaccttcacgagcgcgacgccgctggcggccggcgcggggcacgtccgcccgcagctcgccgtggacccggggctcgtctacgacgccggcgtggaggactacgtcgacttcctctgcagcctcaactacaccgtcgagcagctgcgggtgttcgtcccggacacggccgggtgcgcgccggcgctccccggcggcggcccggccaacctcaactacccgtcgttcgtcgtcgcgttcaacggcagcacacgcgtccgcacgctaacgcggacggtgaccaaggtgtacgagaagccggagacgtacagcgtggccgtgtcggcgccggccggcgtgaaggtgaccgtgaggccggcgacgctggagttcaaggagaagaacgaggagaagagctacacggtggagttcacgagcgtggcgggaggacacgtcaaccagagctgggatttcgggcacatctcgtgggagaatcggaagcatcaggtcaggagccctgtggtgttcatgtggaactaactgatgaaatgttgatgggttgatctgtcgtgagagatgaagaataatatacttgtgggagatgaattaatgaattatcaatgggaattctaaatgttggcagct

SEQ ID NO: 10263 - DNA, 1587 bp, Oryza sativa
  ref <308>: DATABASE ACCESSION NUMBER: AK107611
  ref <309>: DATABASE ENTRY DATE: 2002-08-28
aggcaaagctcgacgacactcgcccattgcaccctcacacctcgccattgagagcccgccgtcaccatgctctcgcgtaccgccctccgcaccacacagcgcgccgcccgcagcgcctggcagcaacagaaccgcggcctcgccgccccggcctccggctcctttacctacgagtccggtgatgcgcagggcatcaagttcgccagcagagacatccctggtcccgtcgccagcgtggccattgtcgcaaaggccggtaccaggtaccagccgttccctggcctcaccgaggctctggagcactacgcattcaagaacaccgagaggaggtctactttgaggatacagcgcgagtctgagctcttgggctctgctctcgagtcctaccactcccgcgagaacttggttgttggagccaagttcctccgcgatgacctgccttactttgtcgagctcctcgctgaggtcgcccagcagaccaagtacacaccccacgttctccacgaggagatctaccctctgatgcagctgcaccagaaggcacttctcgccgacactacccgcatggcccagaactccgcctacgctctcgccttccaccgcggcctcggcgagtcgctcaacatggcttcctccgtccctatcaacaagtacgtcgacgccgactccgtcgctgagttcgccgcctccgtctacgccaagccctcatttgccattgtcggtaacggcgttgcacacaacgagctcaacaagtgggtcaacgagttcttcaccgacatccccagccagcccgcttccaagctcgagtcccaggctagcaagtactatggtggcgaggagcgcatctcccacggctccggcaactctctggtcattgccttccctggctcaagcagccctactggctcttcctacaagcctgaggctgccgtcctcgctgctattcttggtggcccctctagcatcaagtggtccgccggctccagcaagctcctccaggccactcagaacgctcccaacctcaagatccagaccaagagcgacatcttctccgacgctggtctcctcagcgtcaccctttctggctccgccgacgacgttgcctccaacgccaagtccgtcgttgagaccctcaaggcgatcgccagcggtgtcagcagcgaggacctcgccaaggccaaggctcttgccaagttcaaggagctcgagtacggccagtctacccaggctgccattgagcttactggtgctggtcttgtccagggtggcaaggcctaccagatcgacgaggtcggcaaggctgtcgacaccgtcaccgccgagaaggtgcagcagcttgccaaggaggcgcttgagaacagggcgtccgtgagcgccgttggtgacctttacgtcctgccgtacgcggaggagatcggtcttagggtgtaaataatctgaagtgtcagtttcatagaggagggtttccgtttgtcttgtgcaaaaaggtagaagatgtaccattagcgtgtacttttggtgagaagacgtcaagagtgatgctgtgatttattttgtatatactcagtgaatctgtactatgatcat

SEQ ID NO: 10264 - DNA, 1246 bp, Oryza sativa
  ref <308>: DATABASE ACCESSION NUMBER: AK107612
  ref <309>: DATABASE ENTRY DATE: 2002-08-28
acctattcattcgatcagtcaacctgtcaagatgaggtcgatgctcagcacagctctgcgtttggagcgtcttcagcgtctgccagcagcgtcgttgtcgcgcgtctacgctcggcctcttcaccaggcatcgtcttgcctcgcccaggtctcgcctccactccccttctcctggtctcacgtcaagcccaacgacgcttcgcgcaacgcagaggacgcccaggcgaaggccgccacctcgacccctcttcctgaccaccgcctttccgtccaccaaaagcgcgaacgcaagctgcgcgagtatgaagccaagatcaaggtcaaggccatgcacgagggcctctcgccagaagagttgcaccgtcgcgctctagagtcggccaaaccctcgaagcccgccagctccccttcgaccgaagcaaagacgctctccgaagtggagaagcgcgaccagcagctcgccgaggccatgcgacagcgctccaaagacgaggcggccaagaaactcgcctcgggacaggtgcactccacgcccaccggcgcgcaggaaggccccatcaagtcgctcaacaagatcctcgacgtcgagaaactcaagacgcaggatcaagagaccatcaccaagctctgggcaggctaccacaccatcaaaaacaagctctccgccgtcatccccacgggaaagtacctcgagatgctcgccaacgcacgcaagtatccgcagtttgtcctgccactcccgcgtcaggtgatcgacgaagagtcggacagtctcaacggcgcatccaaggaggcgttcgagatgcagttcctcgaatgggccgtggttcccaaccctgcgcaccccacgctgcctccggcggcaaccatgctctttacgccgctggcagagtacaagctgaaacaggactttagccagcctgtgctcatcctcaccttttacacggatctgtgcgagagcaacggcgtggtgctcatgcgcggcgaggtcaccggtctcaacgaaaagacgggcaagggcggtcgcatcgaccaggcgcacgctcagctgctcgccctcaccctccagcgcttctacctcccctcggcatccacaagctcagataaacaggctgaccagtccaaatgcgctcagctgctccacgactttcacaagcgcccagaacaattcgacgtagagcagctcgtcaacgtcgccttccgcctctaatctagatcaccaccaattgtatttttaccctcatcc

SEQ ID NO: 10265 - DNA, 2110 bp, Oryza sativa
  ref <308>: DATABASE ACCESSION NUMBER: AK107613
  ref <309>: DATABASE ENTRY DATE: 2002-08-28
cgctcgagcaggtgcatatagaccatccccactgcgcaatcacactcgctcggagatgcacgcgatgctcaagacaagtctcagctcgtcgatgcgggccgcctcgctgccccgctcccgcgtcgccggcttcgcggccacacgcactttggccaccgtctccgactcgcctgtccggcatgctgcctctggctccggcagccacaaggtggtgatcatcggcggtggatctgccggcatggctgtgagccaccagctcatccgatccggcggcttcgcacaagacgacatcgccatcgtcgacccgtccgaatggcaccactaccagcccggctggacgctcgtcggcggtggtctcaaggacaagcgtgatcttcgcaggcctctcgcttcgcttctcgaccccaagctcaagcactacgctgctgccgtccaggagttcgtccctacccagaaccagatcaccctctcgaacggcgacaagatcgcctacgaccagctcgtcgtcgtgcccggcctcagcatcaactacgacaccatcaagggcctgccggaagctcttgccgacccttcttcgcttgtctccaccatctacggctacaacacctgcgacaaggtgttcgacaccatctccaagctcaagtcgggcaatgccattttcacgcagcccgccggtgtgatcaagtgcgccggtgcgccgcagaaggccatgtggcttgcactcgaccactggaagaaggctggcctctacaaccccgccgatcccgccagctctcccatctcgatcgactttgctaccggcctgcctgtcatgttcggcgtgcccaagtacagcgagcgcctcaacgagctgcgccagcagcgcggcgtcaacggtctctttgagcacgaccttgtcgccatcgagggcaacaccgccgtctttggccgccctggaggcaaggagcaggtgcgaaagcagttcgacctgctccacgtcactcccaagatgggaccgctcgccgtggtcaagaacagcccgctggcggatggcgctggattcgttgatgtcgaccagggaagcacgcgacacaagcgcttcgacaatgtgtggagtatcggcgatgcgtcgtcgctgcctacgtccaagactgccgctgcaatcacggccgaggcgcccgtgctggtgcgcaatctcggccaggcgctcgagggcaaggattccgatgccgagtacgacggctacacctcgtgcccgctgctcaccgagtacggcaaggtgatgctcgccgagttcaagtacggcggccagcccaaggagacgttcggcagcttgttcggcatcgaccagggcgtgccacgctccgcattctaccacctcaagaagagcttcttcccttgggtgtactacaactcgtacgtcaagggtacctgggccggacccaagggtttctcgttcggttcggcacccatcagtcctgcagctgtcgcagccaagcgtagcttctcctcgagctcccgcagcgtcacaatgcctgggtcgaggaggggattcgcgacctcgagtgtcgggctgcgcaacacgcccgcgcgtcgaccgcgtgaccctctggacgcctcgcccgacgccgtccgccacacgcttccctcgggagagacattcattgtccgaccaccgccgaccgccagcacaccgcgttcgacgatctaccagccgcaaccgcttctctcagcagagcctcttgcggaaggtgccgaggcgtcgctccctcctgcgctgcgcccgcgctctcgcaaggcggccagcgacgaggccatcacgccgcagcagatcgcgatgatccagcgcctgcgtgccgaggaccccatcctcaacaccaagtcgaagctcgcgaaggaatttggctgcagcccgcttttcatctcgatcgtcgcgccgctgcccaaggaggtcaaggcggccaagaagcagcaggatgagctcaagaagcagtcctggggtctcaacaagcgcgtcgcccgtgcagagcgagaagagcgccgccttctctggtaggctcacttcctctgctaggccttgggtcgccccgttgcacatccgatgtcctagcttgtaatttagtaatctgac

SEQ ID NO: 10266 - DNA, 2252 bp, Oryza sativa
  ref <308>: DATABASE ACCESSION NUMBER: AK107614
  ref <309>: DATABASE ENTRY DATE: 2002-08-28
atattgtatcagtcactcatattttaatacttgtttccttttactctcactagaatatcgcaacactcgctcaaggtatatacacctacaagaacaacttacaagtcgtcgcctcgcttagacacttgaccaccaccggatatacgcattagacatacacacatacacaatcgcagcaatgctttcaaaagctttcactacagccgctatggctctggcctatgctggcatggcctctgcccaaacattcacagaatgcaaccccctcgagaagacttgtcctcctaaccctgctttcggagaccaaaagattgactgtgacttcgccaagggagagtgcagtgctttccacaacatgatcgccacagaaatcaagtacaacgagcaaggtgctctcttccagatcaactcggagactgaggctcctacaatccgatcagacaactacctcatgttcggccgacttgatgtcgtcgttcaagctgccaagggtgctggtatagtcaccagtgttgttcttcagtctgacgatctcgacgagattgactgggaatggactggtggtgatgatgctcgtgtccagtccaactacttcgccaagggtgacaccacctcctacgaccgagctatccaccaccccgtcagcacccctcttgacaccacccacaagtactccgttgagtggacatccaagaagatcgactggctcattgacgatgtcgttgtccgaaccctgaacgctgctgaggtagctaaccgtaagggttatgagatgccccagacccctatgcaagtcaagcttggaacttgggttgctggtggcaagaacagcaacgagggaacccgagagtgggctggtggctacaccgatttcaagcaggctccttttgatgcttactaccgcagtgtcaccatcatcgactacgctggtaaggacgctcctggcaagagcggtgctaaggagtacgtctggaccgacaagaccggttcttgggagagcattgaggtcaagaagactctgtctgagggcaacgacgaggagaccagcgccagcaccactgtttccaagcccacccggactgctcaacctatcaagaccaagactgaggctcacaccactattgttgaggagaccaccagtgttgttctgaccaagactgagactgcccagcatgagtctaagacccacgagtccaagacccttgagaccaaggttgtcgagactaagactgagtctgccaaggagaccaaggagactaagatcaccgaggttgctactaccttctccactgctaaggccactgccaccgctgttgccagcactgtgactactgaggaggctgctaccacacctactgagggctccagctccggatctggatctgactccgacaagtccgagtctgagtctggtgccgactctggattcaagcctgaggtcaaccctggtaccaactccggtgccgctgttgatcccgccactcccagcggcactgccaccgaagctgcccccagcgataccacccccatcgccgtcaactctggctctcgcatgactggcagcatcgttaccgcctttgccggtctcatgattgcccagatcctcatctaagcaacttcgattcttgattttggattacttcttactttggggtccctgtgagcaacgtggagttatgtctctatgtagattgctcgagagcagatcattctaatcacaccttacttcgagtcgatccttacaatgcttgccaaagcaaaacatacgaagcctctttatcactcggactgtttcatttggaaggaccttgatgaaaaagaaagagacaggaaaaaacgccagaaaaaacacagggtacatgggagggggcttggcaagcaaacattacgcatgttttttcgaacctaacgtttttaatgaggacctgctttcttgagttcccggactcctatctaagccaaggcgactacctggcgcaaagcatttgcttttgagccacggacgccgccaaggtctttgactggttgttcgcgggcggatgacgggatgagttttctgtacgagaaagaactagagatggacatgattgaagtggaagatttatgtatggcttggatgaattacaacttttggattacggggttttggattatgggtgcatcacattggatgtcaactttttacagcgagatacctttttagaatttttgaatggaagcaattgatttgctgcatgcagttttgtcttttt

SEQ ID NO: 10267 - DNA, 1454 bp, Oryza sativa
  ref <308>: DATABASE ACCESSION NUMBER: AK107615
  ref <309>: DATABASE ENTRY DATE: 2002-08-28
atcccaaaccctaccgcctccagatcccaccctctcgccaccgcgacgcttgccggaggttcggttccagccatgcggatccggaggaacgcctccagggtgctcgggtcagcctacttcaccacacagtcggaagcatcacgcgcatatatgagcaacctcccaccgacatcgtccgcgcctgcgcctgttgcatatggcggcggcggcggcgatcttggtggtcctatggtcactccagacgatgcttgccagctaagcctgtcgccatgggatctgccatatgagctcgaagatcctgatcccctggaggctccgttcgacaggtacatggcgtgcatcccttttagggcaagctttgtgtccgacagcgacaacaacgatgatgatcagatggaggtggacgaagacaagagttggaatcaggtggagaatgaggaggtgaatgatcagcagcaaccagctgaccacaaggtggaccaaagtggtgatccggcagccagaaagatgaaggggaagatgaacgagagcagcatggtggtgatggagatgcaagatgctgacaagcaggctggtgtttggtactgcaacaagaatgatggcaagaaatggcactgccgaaacatcgtcgacgggcccaagaccctgtgtgactaccacctagcaaagagccgctcttactacacccgcactggtgaggcaggtgctgcagctagttccaagtcaggccgagcaaaggcaccagctattgccaagccaaagtccagttccaaacgaactccagcaggtgagtcaagtgctcaaaacaactctattgcagcagcagcagcagcagcagtgagtgtgctgccaaccatctcctcccagccatccaagaggaaggcaagcaatggcttattaggtggtgatgcctactatttctatgatatgttcgtcccataccgcaagaaggatcgtggtggtagcagcagcaaacagcaagccggtgctgaggagaaggagatcctgccacaagataatgccgtcgccatggaagagaaaatggacggcaagaaactgtacgatggtgtttacaactcgtctgattactcctcggacactgctagcgacgacgagagcgacgaagactataccgttggtggtgccagcaagcgccgtaccaagaaaaggaaaatgaagctttcagtgaagaaggtgcagttctcgaagatgacgaagaagcgtgtgaaagaacggtcgcttaagtccctgctctaagagttctaattcgatcggttgtctgtgggacagtttcagtttagccgtgttgtcgcttaatggcatatcatgtatggatttaagacgtgtaccgtttaaataaatgtttgaaccttgtgatgtttatcagacataatttcgggttgttaaatttagtgatggtggtcaaggaaataatacaatcaaacttttgatat

SEQ ID NO: 10268 - DNA, 1535 bp, Oryza sativa
  ref <308>: DATABASE ACCESSION NUMBER: AK107616
  ref <309>: DATABASE ENTRY DATE: 2002-08-28
aagggcaaacccagtcaagatgaccgccgtacctcccgagaatggcatggccaatctcgacatttctggcaaggatgcgccagccaaaaccaacggcgcaaatggcaacaacgacgtagagaacgacaactccgacgacgacgaggcagaggagggcggcgagggcgctggcgaaggcgctgctaagaaaaagaagaagagaaagccgcgcaagaagaaaaaggccggcggaggagctgctgcacaatcgagcccgccgcgcacagaggtctcgaagctcttccctaatggctcgtacccgatcggagaggaggtcgactacctcaatgacaactcataccgtaccaccaacgaagagaagagggcgatggaccgcgacaacatggagttcctcaccgagtaccgccaggccgccgaggtgcacagggaagtccgcaagtacgcgcagcagaacatcaagcctggcatgagcttgactgagatcgcggagatgatcgagaacggcacccgcgctctcactggccaccagggtctcgaggagggcgacaacctcttgggaggtgttgcgttccccactggtctcagcatcaatcactgcgctgcgcactacacgcccaacgcgggtaacaagatgaccctcaagcaagaagacgtcatgaaggtcgatttcggcgtccacgtcaacggccgtatcgtcgacagcgctttcaccgtcgctttcgagcccagatacgaccctctgctcgctgccgtcaaggacgccaccaacaccggtattcgcctggcaggtattgacgcccgcctcggggaaatcggcgagggcattcaagaagccatggagtcctacgaagtcgagctcgacggcaaggtgcaccccgtcaagtgtatccgcaacctcaatggccataccatctcgcagtacagcattcacggcggcagtgcaggaaagagcgtgccgatcgtcaagagtgctactacagagaagatggaggagggcgaagtctacgccatcgagaccttcggcagcacgggcaagggctacgtccacgaggacatggggtgctcgcactacgccaagatcgacgacgcgcccaaggtcgccctgcgcgtgcagagcgcaaagaccctgctgcgcacgatcgagaagaacttcggcaccctgcctttctgccgtcgttacttggaccgtttgggacacgacaagtacctcctcggcttgaacaacctcgtgcagagcggaatcgtgcaggactacccgccgcttgtggacgtcaagggcagctacacggcacagtacgagcacactattctgctgaggccgaacgtgaaggaggttgtttcacgtggcgacgactactagaaatgaaaatagggtttgactcgcatataagatagcttctcgtgctcggacgcaatgaggtctgtcgattaaaaaattgaataacgataccatgatcggacgcagccatttgctagctagcatctctgtggttgggcagcagtggaatctagagtctgtatttactgacaccaac

SEQ ID NO: 10269 - DNA, 1887 bp, Oryza sativa
  ref <308>: DATABASE ACCESSION NUMBER: AK107617
  ref <309>: DATABASE ENTRY DATE: 2002-08-28
acatacccatctccgcccatccttccatagacgtctcgcctgccatgtcgtcccatcaaatgacggagcccgcttcgtcggcgacgccctcgttggcacaatctcaggatctcgaaaagaagctttcatccagcgctgacgatggtgccaccgcagtcggccatgccgacaactccatgtccgaaaaggaagagacaaggcccgcacccaagaccaccgcatctgtcggctttgctcctcagaccgctcccaactacattcccgccgatggcgccgatccggcggcgacacggccgacgcgtaccttctcgcgtcgcgaccgcagcgagaacctcgacacaacacatcccttcggtggtgacctggaacgcgcagagaccgagaaccacctcgagcgattccagtcgcaggccggcaaggacgtcgtgatcgtccactgggagggcgagaacgacagcgagaacccattcacctggacgcgcacctaccgatggtacctcaccatgctcgccggtctgcttgttctcaactcgaccttcacctcgtccgcaccctcgggcgtcatcccgcagctcgaggcgcaattcggattcggccgcgaggtggctgtcctcagtctctccatctttgttgcaggatactgtcttggtcccttgctctggggccctctgtccgagcagtacggccgtcgacccgtgttcatcggcgccatgcttgtctacacctgcttcaacatcggctgtgcgctctccaagaacaccggctccatcctcgtcttccgattccttgctggaactttcgccgcttcgccgcttaccaactcgggtggtgtgattgcggatctgtgggacgccaagacccgaggcattgcactttcgctcttctcgctcgctccctttgccggtcctgcgctcggacccatcgtgtcgggcttcatcgccgtcagcggcacgtcgtggaggtggctcttttgggtctgcaccatcttctcgggtgtctgcctcgtgctcgtcatctttacgctgcccgagacgtacgcacccatcatcctgctcaagaaggcgcgcaggatccgcaaggagaccaacgacgagcgctacaaggcgcccatcgagctcgtctcgatcgaatggaaggatcgcctcaacaagaccctcctcaagcctttcatcatgctgggacaagagcccatgctcctcgtcatgactttctacttgtctttcgtgtatggagtggtctatctgctcttcgaggcattccctatcgtcttctccgtcggccatggcttcaacgccggaatttcgggcgtcatgttcgttccgttcttccttggtggttgtgcggccgtggcgctctacgtcgcctacttcaaccccaagtacgcacgccttgccgacaagctcaaggaggagggcgtgaaccgcgtgcctcccgaggagcgtctgtacccgatcatgctcgccggaccgtgtctggtgatcgccttcttctggttcggctggacctcgtatccgtccatcagcttctggtcgccgatgatggccggcagcttgatcggcttcggcgtgctcttctgcttcctcggcgtcttcaactacctcatcgacgtatacttggcaaatgctgccacggcgctcgccgccaacaccgtctgtcgttccgctgccggattcggatttccattgttcgccacccaaatgttcgaggcacttaaccctcgatgggcctcgacactgctgggctttgttgcgctcgtcatggtgccagtaccattcctgctctacaaatggggacccaagatccggggcatgtccaaacacgctttttaatgtttccgcttaatttgctgtcatgcagccgtccatcgcattcatttcatttagctgg

SEQ ID NO: 10270 - DNA, 1273 bp, Oryza sativa
  ref <308>: DATABASE ACCESSION NUMBER: AK107618
  ref <309>: DATABASE ENTRY DATE: 2002-08-28
acccattttcatcgatccatcgcggccggcagccatgtctccgatgaggccgcgctcctccagcgcgagctcgacgtcgccggtggcggggaagaaggagaagacggcgacgaagccagctggtggtggtgctcgcgatccgcccaagggaaggtcgtcgtcgttcgcgtgcagggtgtgcggcaagaggttcccgtcgcagcaagccatggccggccacgaggatcactgccgccgccacgaggatcacgtccgcgaggcagctgctgccaccgccgccgcagtcgtcgttgtcgccaccgccaccgcttccggtggttgctctaaccgtgcaacttgcggtgctcttctggcgtcttacacctgtgcgactcagcttcttgccgctgccgccgtcgcagattggtcacaggtggccgccgggatccctctttccaaagagcagcttgttgtcgccgtcgccatcgtcctcgccgacgacgggtgagccggcgagtgccacggttgatgtgacgctccggctgggctccggtggcaagcgcgggaacgagaagcctctggtcgagtcactgatggtgccggcggcaagcctacacggtcaccgaggagagcagggccgcgaaggcacgagggcgagggggatggacggctgtgatcatggtaggaagaaggggaaagcccagatggacggattggatctagagctgcatcttcaccgctagtttagtaaagggtttattaccgggagcagattacaaaattagggatttgttagacagctgcctgctgttttttttttttttgcgcttttgtcagctggatttgtggccatgggatttttcttcaagatttgtgcacaagccagcccaaggcgtgtcctcccttcagccacaaacgagcccaagctacagttcaaaaacataaatcctcatcttccaatttctcctgcatgaatgggaggaaagcaagagaggctgtcggtgagagagagatcgagagaggatgcggcgaagcaagaagcagcgacctcgatgttgtcggcgtcttctccgccggttggagctcctggttgtgggcttgtggcgcagccagggccaggcagcagaggtgtttctgttggatctcgccgctgaagagttgaatcttggaccatcaatgaacaacgaggccacatcgatccccaaggtgagtattccccatggagatttatgcgttgaaatttatcacatctgttcatgtgggggctgccggattaatgaaaaatccattaagc

SEQ ID NO: 10271 - DNA, 1581 bp, Oryza sativa
  ref <308>: DATABASE ACCESSION NUMBER: AK107619
  ref <309>: DATABASE ENTRY DATE: 2002-08-28
atgatcacatcataccttcttcctaaccttgcaaaattagggaacaattaattcagctactagtagctgaatttggagctagctaattaacaggatgttcagagctgcgcagctcctcctcagggagacgaacagagctcttggggcagcaacttcgcctgcaggcttcgtcagtggcttctccacggcttccaactctgcgcagaggttggccggcaaggtggctgtcataaccggtggagctagcggcatcggcaaagcgacagccaaggagttcatcgagaatggcgccaaggtcatcatggccgatgtccaggatgacctcggccactccaccgcagcggagctcggcccggacgcctcgtacacgcgctgcgacgtcaccgacgaggcacaggtcgcggcggccgtcgacctcgccgtgaagcggcacggccacctcgacatcctctacaacaacgccggtgtcatgggcgccatgccgcaggacgacatggcgtccgtcgacctcgccaacttcgaccgcatgatggcgatcaacgcccgggcggcgcttgtcggcatcaagcacgccgcgcgcgtcatgtcgccccgccgcagcggcgtcatcctctgcacggccagcgacacgggcgtcatgcccatgcccaacatcgccttgtacgccgtctccaaggcaaccaccatcgccatcgtgcgcgccgcggcggagccgctgtcgcgccacggcctgcgggtgaacgccatctcgccgcacggcaccaggacgccgatggcgatgcacgtgttatctcagatgtaccccggcgtaagcaaagatgatttggagaagatggcggacgccgccatggacgccggagaggtgatggaacctaagtacgtcgctagggcggcgctgtatttggcttcggacgaggctaagtatgtcaacgggcacaacctcgtcgttgacggcggcttcacgtcgcacaaaggatccgacacacgtttgaattagcgatgtgtccaactatagatggacaaatggaccgctcggcccgggcacgaccagacacggaccaatatgaattagtcacatgtgctcctcattggaataagtctgttgtacctccctcatctgtttgggttgtcttatatggctggattaagtcaattttgcatccctcgtctccttgggccatgccttatgtgactagaagaagtctatattgcatcccaaatcgttggatcgggtcgtgccaggccggcatgtcgtgccaaggaaaaggtccaagcacggcccaacaatcgggctgtgctggcacgggcctaacaacaatcgggttgtgccgtgtctaggccgggccaaaaccccgtgctgtgggttgagccgtcgggccctaagccttttggccatctatacgtccaactaacatatattgaacagacaccactacttgtcttggtagtctcgttagaataagataaggttgtcacatatgtgttgtcggaattagaaaaatatcattgatatgatggtagagttattgctgcatgactctagtcatataatttaaattctggttttctaaaagaaatgtt

SEQ ID NO: 10272 - DNA, 1592 bp, Oryza sativa
  ref <308>: DATABASE ACCESSION NUMBER: AK107620
  ref <309>: DATABASE ENTRY DATE: 2002-08-28
tttgatgccgcactctttcttgtccggaggaagaatttcatggaatagaatttcttgaattagctagctatcatagttttctttaccccaaaaccaacactgactggggttgttcaatcttaagtggagtgagttaaatgacttggcttgctcaattccttcccggtgtaatttcataaaaggaatagcactcgttctgcggcgcattgaaccttagaatgagcactttgaccagacaaagctctagtgcgtggagtatcctttcctactagtcttgatctgtctactttaataccggggattcccctgatttccttcctctacaccccgagtagtgatttatacgaatgaattgcctgagcataagattgattacctcctcgtagtgagtagatttgtgtagatggattttccacactcattgtcattcctttctttgtttagcttttcgttgtctagaatatcctaatttcgtgtactgaatttactacctttttgttcccgcggacaagagaatctcatagaaattcagtacacgaaagctgtcagccccagacatggaagtctcccttgcatccttaactgaaaaggagcccgagtagtgagttgaactctgaccagctcagacttctacataaattcctagctttttagctagttgatttgtttgacataatatcatatgtgatttgagtgtggtaccttttcacgaattccactttagagatttgccccgcccgaccgaacgaacgagtccatctattcgggctagtcaagaaattccaatgcgaaatgcaagcagagattgccccggcgcacaaccactccaatccgcctgggtcttctcgaatgtgtagaacctactttaaaacccgcgtcctcgctgaggagtgcctacgtactttcttcatagaagaaagatcagggttgctttcgtagttctttcgaaatgatttacggtcattcttctttattttattgaatacattacagctagtaccggatttttccaattttttagaaaggtttatcagtccctgtaaggtatactctttacccttattgaggattccatgagcgactaagtggtccttttgctcattccagaatccatcccggtccgggtctaattgggccatgcgatcgataatatctttcttaataaaaatgattgagtctatctcatcgtcgcttacttccctttggggagttcaagtttcaagtctgcttcttataacatcatgttgaatttggtggtttgatggcccggcattttcttctccaagttgaggttcagggttcggcggggtgtggcttgtggatggctctccccgatctggaacagccccgaatacgtgttccaggggaacttccggaattgaataagggtcaaaacggggctgttccccttgcggcacctcttccccgggggaatccggtgcgggtatctggcccgaaagcccattgaaaaaagaggacgacggagtagaggcttcagctgacttgcccgcagcggatccggaaggacccgcttcactaggcccaggccctggtgggttctccatagcggaagcaacctctgggccttccac

SEQ ID NO: 10273 - DNA, 1646 bp, Oryza sativa
  ref <308>: DATABASE ACCESSION NUMBER: AK107621
  ref <309>: DATABASE ENTRY DATE: 2002-08-28
tctgcctccatcatcccctcgacctcgtagagtgctgagcatgtctcgacacggcatgcaggtgctggtccgtcgagcgcttcagagcgcttctagctcgcgaagcgcctccgtgaccggatcgcttcccaagcactttctccaagcgaggcattcgtccgccaaacccgccgcgcagggcgccgccagtcaggatgcttctgcgagcagtacggcagatcaccgggcgatcggcaaggcgcagtcgctctttctcacgcacgactcttcgccggggacgccgttcgtccttccgcacggcatgcggctggcgcgcaaggtggagcgcgtggtgcgcgatctgtacgacgtgtacggctacgacgaggtgcagtcgccgcagctgtacaagacgtcgctgtggaaacgcagtggacattgggacaactatcgcgacgacatgtttgcggccgaagggtacaaggagcgtcttgcgcgcacgtcggttccggcgagtagtgtggacgatcgcagtgcgtgctgctcgatccatgccgagacggaggtggaggacgagacgtttggactcaagccaatgaactgtcctggacattgcgtgatctttgcatcgcaggagaggtcgtatcgcgatctgccgattcgatacgccgagttttcgccgctgcatcgcaacgaggcgtccggggcattgacgggcctgacgcgcgtgcgccgcttccaccaagacgatgcgcacgtcttttgcaccccggaccaggtcgaggccgagatcgatgcaatgctgcagatgctcacctcggcatacgatacgtttggattcgcagcgttcgagctcgtgctgtcgacgcggccgcacgatgcatttatcgggagcgtgcaggagtgggagcgtgccgaggcgggactgcgcgaggcgctcgacaagagcggccgcaagtgggagctcaacgagggcgacgttgcgttctacggccccaagatcgatatccgtctggtggacggccagggacgccggcatcagactgcaacgattcagttggatttccagctgccccgacggtttgaactgtcgtatgcggatcccaatgccacgcaaacgggggagcgaagcacgcccgtcatgatccaccgtgccatcctgggcagcgtggagcggttcatggcgattctgatcgaacagacggcgggttggtggccgttctggctgtctcccaggcaggcgattgtgctgccggccaagacgggctcggctgaactcgatgcgtatgcggctaggattgccaaatacctctcgctgggcatccatcctgatgcggaagcgtcgcagtcgtccgaacgacatctgcagcgcttctacgtggatgtggaagcgaatccgcagggagagaagctgggcaagctcgtgagaaaggctcagctggcaaggtacaactacatcctcgtcgtgggcgagcgagagatgcagacgcagacagtcaccgtgcgcaaacgagacgactccaacgcacccaaaaacctcaccgcatccaccacccccgccgctgctgatgcgatcgcgaacaatgcgcagatccccatcacggaactgcgtcgaatcttttgtcaactcgattcctcgcatgcctaaaatacacactcatgacaag

SEQ ID NO: 10274 - DNA, 802 bp, Oryza sativa
  ref <308>: DATABASE ACCESSION NUMBER: AK107622
  ref <309>: DATABASE ENTRY DATE: 2002-08-28
atcaagcacgagccacaatgattgcagcctcggcacgaacggcttcggccaaggtggtagcaggcgtttcggtcatggtcgcgggcacttcgattgccaagcccgtgtacagcgaagaagcaccctcgagctcgaccaaacttccgatctatccgctgccggatgccaaggttgaggtggtgccggtgcagaccgagctggagcgtcagattggctctgcacgacgagccgtctccagcgtgactgccgagacgcgcggatcggttcgatcgctcgtagaccgatggatctctctcgagcgctccgtcgagggcgaggtcaagtcgctcatccccgacaccgaaccgctcaccccgggtctgctctacgtcggagtcgccacgctggcaggaagcatctttacccgataccgcgcctttcccattcgaatgctcacgccacccctcgctgccatcgttgcggtcaacaccaccaacccgcaactcgccgccaacctcggagcgtactacacccagaccgaacgaaagtacctcccggcgctcacggagcagcgacaaaagtggcaggcccaggcaagagatctggttagcggagccaaggatggattcgaaaaggtcaaggagaacacagagtcgtcggttaggaaggggctcgagagtgtagagagccagacggggctgagggtcaaggatgtcgtcgccgcaaaggatgaggccaagacggcgatcaaggaccagatgaaggccgtctagacacgcacatgcctgtgggcgcaatcgcattcctgccaaactttcagtgg

SEQ ID NO: 10275 - DNA, 1387 bp, Oryza sativa
  ref <308>: DATABASE ACCESSION NUMBER: AK107623
  ref <309>: DATABASE ENTRY DATE: 2002-08-28
atccttcttttgcatcgcgacttgatattgcgtgtgagaaccatgcttgctcctgccaccatccgaactgccgtgcgagcgtcgcaggcttcgcgcctcggcttcgtctcgctgcccgccgtgcgccagtacaagagcacctgggcgcacgtcaaggccggcccgcccgacgccattctcggtgtcaccgaggccttcaagcgcgaccaggatcctcgcaagatcaacctcggcgtcggcgcctaccgtgacgagaacggcaagccatacgtgcttccttcggtgcgtcaggccgaggagctcgtcatcacctccaagggcgacaaggagtacctgcccatcaccggtctcgccgacttcaccaagaacgccgccatcctcgcgtacggcaaggacagcgcacccgtcaaggagaaccgcatcgccatcacccagtccatctcgggtaccggtgcgctccgcatcggcggcgccttcctgcagcgccactaccccgaggccaagtcgatctacctgcccacgccgtcgtggggcaaccacacgcccatcttccgcgacagcggcctcgaggtcaagcagtaccgctactacgacaagaagaccgtcggtctcgacttcaagggcatgatcgacgacatcaaggcggcgcctgccggctcgatcgtgctgctgcacgcgtgcgcgcacaaccccaccggtgtcgaccccaccgttgagcagtggaaggagatcagcaacgtcgtcaaggagaagggccacttccccttcttcgacatggcctaccagggcttcgccagcggtgacaccgacaaggacgcctttgccgtgcgccactttgtcagcgagggccaccagatcgcgctctcgcagtcgtttgccaagaacatgggtctctacggcgagcgcgtgggtgcgttcagcgtcgtgtgcgccgaccccgacgagcgcgcgcgcgtggacagccagatcaagatcatcgtgcgcccgctctactcgaacccgcccatgcacggcgccaagatcgcagccaccatcctggctgaccagcagctgtaccagcagtggctgggcgaggtcaagggcatggcggaccgcatcaacggcatgcgctccacgctcaagaacctgctcgtcgaggacctcaactcgaagctcaactgggaccacatcaccaaccagatcggcatgtttgccttcctcggcatctcgccagagcaggtcgccaagctcgtcaacgagcaccacgtctacctgacgggcgacggccgtatctcggtcgccggcatcaccaaccacaacgtcaagcacctcgccgagtcgctccacaaggtcaccagctaagctagtcggctgtgctgaagccaagtcgcaaaatgtcttaccttag

SEQ ID NO: 10276 - DNA, 1420 bp, Oryza sativa
  ref <308>: DATABASE ACCESSION NUMBER: AK107624
  ref <309>: DATABASE ENTRY DATE: 2002-08-28
tttctcgaaccttcgtcccctttcccctctcccatccccatggcggacaacgccgccgccgccgccgacagcgcggcgcggacgaggtacgcgaggggccagctcgaggcgctgagggccgccccgtcggaggaggcgcaggcgcggctatgggccgaggtgtccgccgccctcgccgccgccggcttctccggcgagtacgacgggctgatggacgcagaggatccgtcgattaggaagccggggaggaaggggaagaaggccgccgggggcgggtggaagaggcacgacgcggcggcggcgacccaattcctggaaacggatgaggttggtgcctggaggaatggggattcaggggtccgctacgagcattacgtggatgagcctcgttccgtgcttcaagtgattgaggagccatttgttcagggtggaaatgcggagtacgaagatgctgacagcgatgatgattatgatggaattttgaagcccgccttcgcagttgatggggatcccgatttcgagtcgggtgagccgctcgatagctttgagtaccttcggcgtgtcaggtgggaagctaaccaaattcccagagtgaaggtggcgaagatagatttgaatacggctagaaatgaacagacgccttacatgccagaaattcctgatatagcaaagtgttctcctgatttgtgtgcatcaaagccctgggaagatacatttattacttatttctctgagacaagactggcattttcagagcttgacagctcagatggaccatcggtttctggtggaacaaaaaacttgttgaaaccaagcaacagatctgagccacagactgacccaacactgaccatgattcgcaacatggatgctgtctcaagagctgcaacactacggaactacatcgatatgattcaaagcttggataagctatcaaggaatgactgcctgtggctgttttcactgtgtgtcgccgtggacactcccttggacgccgagacatgtgcttcgctgaggtcgctgctgcgcaagtgcgcaaatgtccttgccgccaagttggagatggatgatgaagtcgctatgctgaacatactgatcacaatctctggacggttctttggacagtatgataatcattaggatagcaaaggtaccccatcttgtgatatctcccttttgttagtatgcctagacgaagttttgtctccttactccttagactgcctatatagtgatggaatgtgcacaatcagttctctgaaattctggatgccttcatcactataatggctaatatagcgaggcaccttgagatgggcgtcgtaagttcaaagttcacgcctacggtatggttttcgaaacctaacattatcttctgtagtgactatgaattttgaaattaaacaactgacttcctgct

SEQ ID NO: 10277 - DNA, 946 bp, Oryza sativa
  ref <308>: DATABASE ACCESSION NUMBER: AK107625
  ref <309>: DATABASE ENTRY DATE: 2002-08-28
gtagtgcaaagcgaagcgaacagcaacatctgctcactcgcttgcgcttgaccaccaacaaacatcaaatatcacaacgcagtcaacaacaccacgaaacatcaccatgactcgcatcaatatcggctacctgctagctctcggcctgctgggcacaacagcagtcgcaacacctgcgccgcgccctcttccccaaagccaacaggaaatcgacccaaatccctccctcacctacagcctgcgcgatcccgaagtcaccgactaccagacccaaaacgggaccggcagcgcagtgcccaccaccacctctgcccgcagcagcgccgagcaaaccggaaacgcctcgcccaccctcaccgagatcgcagccttcaccgcgcccaatggcggcaagtacaccgcgaccgccgtcgacggcaccctgcgcatcgccggctaccagctcacagagggcggcccagatgcgctcgtcggcggcatcagagtcagcgtggccagcgaggggctgatcttcggcggcaacacggcggcttaccagacggtaacgggcgtgtctacttccgaggtcaccagcacgagtacggacgcctcgggcaacacgcaggtggtgagttcgtctgccactgtggcggtgacggctgagagctcggggtcgactactgcgagtggaagtgagagcgcgagcggaagtaccgctgcggcgagctcgtctgctgctgcatcgactggaggtgctgctgctggagccacggccgagtcgagaggcgctgttgttgcgcttggagggattgctgcgctgctttgcatattcgcgtgatgagatgagcttgcatgacttgatgaatgaaagtgattgacgttgagagaattggtaatggcatttgatggaactgaacgggctaggacatgataatagcgagaaagtaggagatcagcgtttccacct

SEQ ID NO: 10278 - DNA, 1413 bp, Oryza sativa
  ref <308>: DATABASE ACCESSION NUMBER: AK107626
  ref <309>: DATABASE ENTRY DATE: 2002-08-28
atcatcggagctcggtctgcccatggagatgacctagctagctagctagctagctatagcctctctctagacatctctctcttgtgtgtgggtggtttggtttcttgattggagcatggcgttggaggcggtggtgttctcggaaggatactacttcggatgcggcggtgccatggcggcggaagcagctgcaggaggagcttggagctggagccacgggtatggcggtggcgttgatcaggggaagggggcgatggagttagtggtggacgacggggtggtgaacgccttctgggacggcggcggaggcggcgcaagctcttccccggtgatggccgccgtctcggggtttattgaggagccggacggcggtaattcctccgtcgcagacgcagcgccgccgccggagcacggaggtgcgtctgtcgtcggacgggatggctccgcggcggcgccggcggcggccgcagggaggaggaagcggcggagggcgaggaccgtcaagaacagggaggaggtggagagccagcgcatgacccacatcgccgtcgagcgcaaccgccggaagcagatgaacgagtacctcgccgtgctccgctccctcatgccggcctcctacgtgcaaaggggcgaccaggcgtccataattggcggagcaatcaactacgtcaaggagatggagcagcttctccaatccctggaggcgcacagacacgcccgccgcgcacgcaccgacgccgccgccgcgttgccattcgcgggcttcttcacgttcccgcagtactccatgagcgccgtgcccacgacaaccaccaccactgtagcagcagcagcaacggaaaacggcaatgccgtcgccggcgccggcgcgggcgacgacgcggacgcggacgtgtcggggtcgaagccgtcctcggtggcggacatcgaggtgacgatggtggagagccacgccaacctgaaggtgctgtcgcggcggcggccgaggcagctgctgaggatggtggcagggctgcaacaccaccgcctcgccgtgctccacctcaacgtcgccagcgccggccacatggctctctactcccttagccttaaggtggaagaagactgccagctcacgtcggtggacgacatcgcggcggcggtacacgggatcgtcgagacgatcgagcaagagcagcagcagcagcagaagcagagctgtagctagatcagctagagtattttcttagaacatttagcaatggcaaaaatggtcaatattaatatgcgccaaccgtgtgtaatgtgtgcactttcgattcttctagaactctgtacgctggatgcacatgtaccgcagttactacacccacgtacatttctgtagttcatcttcacttcaattaatgcatcatggtctaccactctgtactt

SEQ ID NO: 10279 - DNA, 3477 bp, Oryza sativa
  ref <308>: DATABASE ACCESSION NUMBER: AK107627
  ref <309>: DATABASE ENTRY DATE: 2002-08-28
atgcctccctcccttcatctcggctcgagcctcccctgcgccgcatcatcatcccgcttcccgaccaccctccgcaattctcctcgccggtaacgaggcacatcgcgagacacatcgcatcggatcgtccctctcaacctcgcctcgacggcctcgacgtttcaccttcgcatcgacaacctcaggcgctggcgcacgacctcttcacgttatcccaaacagccagccacgtgctcttctgtcaggcaacaccacgcttcctagccgcacatagacgccaagctcgctcggtgccatccatcttgtgcaccatcgccgcacgcccatcaaccatgatgcccatgcaacccccgccccaaccaccacaccagcacttcaaccccaaccctgccgccgccatgaaccaacgacagcaacaccaacagcagcagcgctacaaccaagcctccgcttcctccatgggcggcttctatcctcccaacgccgtcaatgcgcacgactcctaccaagcctccctcccgcccgcgtcgccgcaacgcgtatactcttccccacacgctgcgccctccatccagctccacgatgttccgcccacaaatccgccatcgtcgtccaacaccactcacgacgcctccttcgcctcctccacctcctcctcacatcctccctcctcctccaggcttcgccgcgtacgtccagacacagaggagatcaagcgcgtcggtcgctcccactacgtagagctcctcggcttcctccgcacccacctcgccaaagtcgaacagaccgcaccacgctccaacgcacgcgaaaaactcacgcgtctcagcaagcagcagttcacagagctctccacagacgtctacgacgagctcatgcgccgccaaaacagcgcaaaggactccaccacacagcccttcctcgccgtccgcgacgaattccatccaaaacgcaaccaggcacgccaaaagctcgccaccttgcccaagaatcgcttcaaggacctcgcatcggacgtcttcttcgagctcgaacgccgcttccccgagctcaagcacgagtttcgtccagaggccatcgcacgcgaacgagcacgtgaacagcagatgcgcgacgaggcggaagcagccctgcaacgcaaggactcggtgggccaaccacaaccctccacctcggaccgcatcgtgcccgccaagagcacgctcgtcgaggaagacatcgcggtgccgtactcggctaacgcatccaagtcgggcctgcgcagcgccgacaccgacgccgcctccgagagggtgtcgtcgccgctgcgcggctcgatcggctccaatggcctcaacggcatccccgacaaccgcagcaccatgtacagccaggcgagcagcgtaggcaccggcttcttcaacggctacaccggctccactgtcgcaggcagcatcgccagccccaacctcggccgctccagcgcattcgagtcgtccgacgcctcgtcggccatgctcgaaaagatgcgctccgactacgaactgcgcatcgccaagctgcaacagcaggtcagctcactcgaggcgcaggtggccgaggcgggcacgcgcgtgcgcaacgcagacgagctcgccggccgcaacgaagagctcgaccgccagctgagccagctgcgcaaagagctcgacgaagccaagcagaagcacgacgaccaacgcgaccaacaccgcgagctggcatcgcaaaaggactcggagctcgagtcggtgaggagggagctcgccgaacgcgccaacatcggcgggcccgccgactttgaggcgctgcagaaggagcatgcgcagcaagccgaggtggtgggcgaactcaagcaagaggtgagcacgctgctcgaggagcttcgcgagctttcggcacgccacgacgaggtgcaggcggatcgcgacaacgacgtgacggtgatcaaggacctcaacgcgcagatggccaactacaagcggctctacgagacggccaagacggagctgcgcaatctcaaagccacctcgcagctgtacgtgcagccacccaaggcggacgacttcctggccgcgtcggagcgaggcgcgatcgccgacgtcaacctcacggcgttccagagctcgatcgacgaactgctcgcagcggcgcgatccaagacgccgggcaacgtgctgctctcgatgaagacggtggtgctcgccacgacgctcgtcacggacgacgtggccaagtacgagcaggtgcctgccaacgcggcggagctgtcgagcgacgagcaggagcagctgatggcgctcaagtccaagtgctcggccacgctcaacaacctcatgacggcgtgtcgcaaccatgcttcgtcgcatggcctgtcgcccgtgagtctgctggatgcggcggcgagccacgtgtcggcgacgattgtggatctggtgaagctgctcaaggtgcgcaaggcgagcaagagcgaggccgacgagttccaggcgaggttgggcgaggacgcggcggcggcggggcggctcaagccgctgcacatcaatgcgcaggcggcgagtcgcgatgcaagcgccacgctgtcgcccaacacggccaacacgtttagctttgcgagcctcaacccgagcgacgatcgcttctcgccgcgcatccgcaacagccccaccatggggcgctactcacccatcggatacaaggccgagaccatccgcaaggagtccgggggcgacagccagtggcgcagccgtgccacctcgttctcgtccacgggcagcgccggtgccaacctcagcacgcccagcatggctgcaatgcccgagatgcccaacctggacggagccaagcgatacatggcggacgtttccacgtcgtcctcgtcggggaccgcggcagcagcagcagccgtaagtggcagcaaggatgtgggtggcggcatcaacggtggcgcagcggtgacggggtcgccgcagacgagcgatagccaggtgcagcgatccgagacgtacgacagcctgcacacgacgacttctgcgagcggcagcgggttcggcagccactcgggcgaggagaattggacggagctgcgcaactacatcgaggtgcagaccgaggcgattgtgcattcgatccaggcgctgctgtctgcgatccgcgaaggggcgcagggtgtgcagctgagcgagaacctcacgcagatcacgacgatcgtgtcgtcgattgtggcgatctccaagggcaacctgcctgccaagagtcgtgccgagggcgagcgcatcctggacgagctgacggacaactgcgaccagctgagcgagatgcagagccatccgacgttcgacaagagcaccaagtcgagtatggcgagtgcgtcgtatggggttgccaagggcctcaaggcgctcaatgtgctgttcaacgaggcggatgcgtcgcagtagtcgcccctcgctagcattggtctgcaatgataccccccgc

SEQ ID NO: 10280 - DNA, 2405 bp, Oryza sativa
  ref <308>: DATABASE ACCESSION NUMBER: AK107628
  ref <309>: DATABASE ENTRY DATE: 2002-08-28
aacctctgccaacttctcgccgcaacatccacccgcccgtagacaacgtcctcctttatcgagatggccccgggtctcatgtccgccgacgcgaaaggcgtcttcaatgcccaggctgtcgaggccaagtccgctgccaaagacgatggcggcgccaacgaaggcctcggtggcggcaagacgttcgagggccagtccaagctgccccaccttcccatccccaagctcgaagacacatgccagcgatacctctcgagtctgctcccgctccagtcgcccgagcagcacgccgtaacccaacgcatcgtcgacgactttctccagaaccaaggccccacgctccagaagcagctgcaggagtatgccagcacgcgcgccagctatattgaagagttctgggacgagagctacctccaggcctcggactcggtcgtgctcaacctcaaccccttcttcatcctcgaggatgaccccaccccgacgcgcggcaaccagctcatgaggaccgccaacctcatcctcgccagtctggcgttcatccacgatctgcgcacaggcgttctcgagccagacaacgtgcgcggcactccgttggacatgtaccaatatacacgcctctttgctacctcgcgcatccccaccgccaacggatgcaggatggaggtcgagcccgagtcgaggcatatcgtcgtcatgcgccgcggtcagatctactggttcgaggcgctcgacgaggagcaccgtccgctcctgaccgagcgcgccatgctgggcaacctgcaggctatcgtgcgcgacgccgacaagatccagatcgacgacgttgccaaaggatcggtgggcatcctcaccacggagaagcgtcccatctggtccatgtaccgcgagcacctgcgcgaggactcgcacaaccgcaagtgtctcgaggtcgtcgacacggcgctctttgtcgtgtgcatggacgactctgaacccgccgatgcggccgagctgagcaacaacatgctctgcggaacctacaagctgcagcgcggcatccaggcgggcacgtgcaccaaccgatggtacgacaagctccagatcatcgtctgtgccaatggtgctgccggcatcaactttgagcacacgggcgtcgacggccataccgtgctgcgctatgcggccgacgtgtacaccgagctcatcatgcgcttcgccaaatccatcaactcggccaccaagagtctcttcaaggccaagaccagtccgtacgccaaaggcgccggcaagaaggccaacggttcgttcagcgaggccgatgcgcagaaggcccaggacgtcaaccaagcaacggcacccaagaagctcgagtggaacctcaccaaaaagctcacagacggcatcaagtacggcgagacgaggctgtcggacctcatctgccagaacgagtgccaggtgctcgagttcgaccgctacggcaagaacttcatcacaaggcacaggttctcgccagacgcgtatgtgcagatggccttccaggcggcatactacacgctctacggaaggtgcgagacgacgtacgagccggccatgaccaaggccttcttacacggacgcaccgaggccatccgaacggttcagccgcactcggccaggttcgtcgagacgtacatgtcggatgccaagaccgacgccaagctggacgcgctcaaaaaggcgtgcgagggccatgcgaagctctccaaagcgtgtgctaccggtcagggtcacgaccgacacctgtacgcgctgcacaatctgtggaagaagatgcaggctgagcgatcggacgatcaaccagcacccaagatcttcacagatgcaggctatgccaagctcaaccacacggtggtgtccacctcgaactgtggcaatcccgcactgcgcatgtttgggtttggtccggttgtgccagacggttttggcatcggatacatcatcaaggacgatgggatcacggtatgtgcgtcgagcaagcatctgcagaccaagaggttcctggacacgctcgaggcgtacctgctcgacacgcagcgcatgatcatcgagacgtacaaggcggccaatgtgcgttcgcagtcgacgtacatcgaccatgctggtgtggaatgcgatgtgcgaacaggtctgcccatcggatccaagaacaacggctattcactcgattacgaccaggtgcccgcacagcatttcggccagtccgggtactcgttcttcggagatgaaaaagccgccgccaaaaaggacgaacaacacaaggaagactcggcacagagcaggaggagaagcagactcgccagtgtcggcaagaccatcctctacgacgattattgatcgaggactggcaaacggaatgtgctcagctcgcaatgcaatgtgccaaagtg

SEQ ID NO: 10281 - DNA, 1555 bp, Oryza sativa
  ref <308>: DATABASE ACCESSION NUMBER: AK107629
  ref <309>: DATABASE ENTRY DATE: 2002-08-28
acccacactcgacgatccgacttgcccctcgccctcctccctttgagtgtactgcttgtccgtcgaccttgccattccccttctgttctcaccaccaccaacctcgtctcgacacatcctccctaccctcatatcgacttgacgtggtcgctgcctaccatcatgcagttcaagtcctccgtccttctcatgggcctggccgctgcaggcctcgcctcggctgcccccgccgttgccgacgctgccgcacctgcagttgagcgatccgagcccgttgctaccaccaacaacgttcagcgcgacaccaccgacgccgcaccttcggccgactacggcattggccctcccatggaccagtggagttacaagcgtgatggccagcccgccggtgactttggtgttggccgtgccgacaggtggagctacaagcgcgatggccagcctgctggtgactttggtgttggccgcgccgacaggtggagctacaagcgtgatggcgagcctgctggcgactttggcgttggccgcgctgacaggtggagctacaagcgcgacggcgagcctgctggtgactttggtgttggccgcgctgacaggtggagctacaagcgcgatggcgagcctgctggcgactttggcgttggccgcgctgacagatggagctacaagcgcgacggcgagcctgctggtgactttggtgttggccgcgccgacaggtggagctacaagcgctcgggtgagcccgccgctgactacggcatcggtccccctgaccgccagtggagctggaagcgctcgggtgagcctgccgctgactacggtatcggccctcctgaccgccagtggagctggaagcgcgacgacgctcccgctgctgacttcggtgttggccgcgccgacaggtggagctacaagcgcgatggcgagcccgccgctgactacggtatcggcccccctgaccgccagtggagctggaagcgcggcgacgctcctgctgccgactttggtgttggccgcgccgacaggtggagctacaagcgcgatggcgagcccgccgctgactacggcatcggtccccccgaccgtcagtggagctggaagcgcgagtcggagagcgctgagtcgcagtaaagagcccatcgtcctgcctacatcagattctagtgctttcactctagcaactacgccactcatagacgcacctacgatgagggcttctcgacctgcatctggccacttggacgtaccattacgctagtgcattgtcgagtctcccgctaccgcgcggcggtacccagccttgaccgaacgggcccggtgccttgtagcaaggctgtgcaccgccacacgcaccttatccgcttgcgtgcttgcctgtcagttcttcccccacactccttttggtcaccctccccctatcgaactttgcagtcgggtcgagcgcatgcatacaatcgttgcgaccccaatcttgtcatcgtcctgtccgtgaccactctgtcgatcggcacgtttccatcttgtactttgcagcaatcaagtcctgtctctctgg

SEQ ID NO: 10282 - DNA, 1077 bp, Oryza sativa
  ref <308>: DATABASE ACCESSION NUMBER: AK107630
  ref <309>: DATABASE ENTRY DATE: 2002-08-28
ggctttggtttcttcttctcccattccattctcttctcccccacccacctccacctccaccttcctctacggtcgccggggtcgggggattcgtcggcgagcgcgcgatggattgtgcgggggacgacgacgcggtggcggcgggcatcatctgctcgctgcggggggcggacctggcagggtggacgccgccgtggtggtgcagcagcagcagcaagggggcggcgcgggaggagctgatctggccgccggtgacgcgggggaagcggtcgcgccgccggtctccgtcggcggtggcggcggcggcggggaagaaggggaggtgggcccgggctagcccggcctcgccgctggactacagcggcggctccggctccgggtctggctctggctccgggtcggccgcgtccaccagcggcggcgaggacggcgccttctgctcgcctcccggacaccgccccgcgccggcgacgaccaaggttagcgccatgggtcggcagcaacaactgccattctcagcgccgtcgcctctacggccggccggtcagcgtccacggaagaaaatggggctaccggacgtacagcagctggtgcgatctcttgcagtggagaacgacagcctccgtgaggagatgcgtactttgcagagagcttgcgctgcgctttcaaaagaaaacgacaagcttgagataagattacagatctcgagctcacggaacaaaccgatgattacagaggatctaaaaggaaagcaacagattgatcagcagtcagccacgcagtccatcggaggcggcttcgctcttccagatctcaacattcctgtgcaggacgctgctgatggatcagtccattgagctctccagattagtgcagctttgctgacagaatagcaagtgtacatagaggaattgcaggctagatggggggcacacgtccatgcgtgaagagaatgacacatttgattaagttgttagattacagggtctagtaccactatagtcccaagtgataagccaagttgtaggcttgtagccaaacaaaattgactaatttaacttcaactgatattgtttc

SEQ ID NO: 10283 - DNA, 2308 bp, Oryza sativa
  ref <308>: DATABASE ACCESSION NUMBER: AK107631
  ref <309>: DATABASE ENTRY DATE: 2002-08-28
atcgccatcaccacccaccctcacgcataccatcgtgccatcaagaacaactcgttttccatcgagcccggctcagtaagtcagacacctgccggtaaccgcaccgcgcgcgcacccgcgagcaagcaacgagggcgagacatagggagcatcaggaggcgctgggagcacgtgcagaaagaaagacaagaagaagaagaaagacgaggtcgagacaggcgctggggagcagtagttggccgcgcagactgacccacagattgtccctattgtcccagacagagactcctgaattgaaaagacgagccttgtttcttgcaggcatttgagacttccgtgcgcttttggctgcctcctcaatacaaaggcctcagagctctcgctgtacattacttgctctcccccgtataatattatccctacttgcactgaggatatctgaacccgcgcgcactctgattacacataccacgacaatcaccgctcagctcatcttggcagctgaaccacaggacatctgaggacgtaaggcagaccggttcttcggtgtactttctcgccagaacagccgccaccctcgccgcacaacaatgtcttcctctattttcttcaagttcaagtcgcagaaagaaccctctcagataacatttgatggcaccagtctgtctgtgtttgaagtgaagcgcgacattatcgccctctccaagctcggtgatggcaccgactttgatcttgaaatcaacacctccgacacaaatgaacgctacgacgatgacacagttcagatccctcggtcgaccaccgttatcgcccgccgattgcccgcgaccaaaccaggtgccggtagagccgcacgctacgtctccggcaagatgcctgtgaacgctaagaagcctgaggctgtggacgagaatggcaaaatcgatgtctctcaattgccggccggtgccatgtacacagctaatggcgagtgggtcattgcaaagccagacgaggcttcgtgggacaaatttcagcagacacaaaaggtagcggctgatcaagccaaagaactcgaagcagacaaagaagtcatgcgtgctcgtggtcttgaatgctctttagatcataagatgttctccgatcctgtcaagacgccttgctgtggtcagatctactgccgcacttgcatcgaaaatgcattgatcgattctgacttcgtgtgtccgaattgtggcgaacagtgtctgcttgagagtcttgaatctgacgtcgagactttggataaggtgaaagctttccaagaggaaatgaaatctgaaaagcaaaagaagcaagccgaagaggcgaacaagaagagcccatctgctgcgcctaactctcctggcaagtcgccccaaccttcagactcgcgccctggttctgccaacggcaagaaacgtgctgccgacgaggaacttgagaacacccacaagcctaccggacccgccgagatgaagcgagctggatcaaaggaggccactcctgttcagcctgcccagcccaacgcagccaaaaacaacgcggcacctgtcatgcccatggcgaacaacttgcaggatttcgccatgcagatggacatgatgtctcgtatgtccggcatgcctggaatgcctccaggtggcatgatgaatcccatgatgatgggcatgaatccgatgatgatgggcggacccggcgccggcggcatgaacccgatgatgaacccgatgatgggtcaaatgggtatgggcggcatgaacggcatgaacggcatgaacggcaacatgaacggaggcttcggctttggtcctcagggacagcaaggcttcggaggccacaacggtggtggaccgcccgcaggcccgagagcttggcagcagcaacagaatcagcaccaccagcaacagcaatggggcatgcacaacggccagaacggcgcgcctcaagggcccgcggccaacggcgcctacttccgccagccagtcaacccgggcagggctcagaacagaggtcgcggacaaaggagcgtggactacaagcagcttggccagtgatgaagatattggtgggcatcagcatggtgagagatttcaagcatgggcttgctggaagccggcagcatgggaggatgttttagcgatggcgttggtggtttgctgatcccatgatggattggctgtgttttgcatcttgcagcggaggactcatgatgtcgttgaatatgcatgggacttttgcttttagtggtccaggactgttctttatcttaaccctactctcgtatacaaccacaataaatcatccaaac

SEQ ID NO: 10284 - DNA, 1796 bp, Oryza sativa
  ref <308>: DATABASE ACCESSION NUMBER: AK107632
  ref <309>: DATABASE ENTRY DATE: 2002-08-28
cgaatcgacaccgagccccggtacgactccgatggcatcgttcccgccgccgccgccgcctccgcacgttcgccccgcgcccgctactccatcactagcgccgccgccgccgccgcagcagcagcagcagcagccgcctggatctgctccgccggcagcgacgctcctggtgcggcaccttccaggggccatcccgcaggagatgctctcccgcctcttctcccactacggcgccacatccgtccgcccctgcgccggtggaaagttgaggaattgcgcattcgtagattttagggacgaggtagtggccagtcaggcacagtctctgctgaacaggttgaggttccttgggaaagtgctgatagtcgagagagcgaaccagccaaattcaaagaatgctaacgagaagcaacaggagcatgaagcacaaggggcattgcaagtgccaagtatgaattccttaaaccagaagaatcccatatcttctgctgaaccaattgcgcctaggcttggggtggattatccatttcctccgcacctcgagtacgcgtatcctccaccagatggaaacatattgacaaatatagtcaatgctctaattgctgttccccgattttacacccaggtgttgcatttgatgaataagatgaatcttccagctccatttcggatggcgttgcctactccacctctaccatcacaagtgcctgctccaccgccaccaccaccacctccacagccgtctgcagcaaataaacctcatttgacagatctgtctagtgatgagtctgagttggaatcttctgatgaggatgttgataaaaggaaagttaagcgcacaaagcatgaagctattgttggtcctgcagttgataaaagtattgctcatgaagcagtcggggtgaaacctgctgcattagtttctagtgagcttcaagtgataaaaaagaaaaatccagttctgcagattaatattgccccaaaggctgcacagaaggagcttactgttcaaagtactactgacaaagaattggtgccaacagctgaacaacttcaaggaaaacattttgtcacacctcaggatatagaaaaagagaaattggcgccagaggagattttgtcccttcctatgttcaagaattacacaccagggaatcctgccagtgtgttatacataaaaaacttggcaaaggatgtcattcaggatgacttctactatgtctttgggtctgtttttgaaaacatggacattgcacgatctagtctgagcatcaaactaatgcaggaggggcggatgcggggccaagcttttgtgacatttccatcggttgaacttgctcaacgcgcactgaatcttgtacatggttttgtgttcaaaggcaaaccaatgattatacagtttggcagaaaccctgcggctaacaaatcttcctaggagggttgcattctttcagatactgaatgcacttttaagtcaatagggactagcaaatggagaccaaaactcctgagtatttcttcaggaactgggcgcatgtacactgtacagaagagtgaagattgtagattgtgggctgaagagcatcctcgttcaatatggtgcaagataaacttgtacagaaccttgtagcggttctgttctgcggtctgaaaatgttgggtttggaaacaattgaggcctatgtaatgtggcatttatttactgaattcggtgggaactgaactgattcatacattaagagattcctgcgcgaggtgtgaactactcgaatttattaagagtagcaatctagtcg

SEQ ID NO: 10285 - DNA, 729 bp, Oryza sativa
  ref <308>: DATABASE ACCESSION NUMBER: AK107633
  ref <309>: DATABASE ENTRY DATE: 2002-08-28
aaaaattaaattttctaaattacaagcaaatcaaagctcatcgaagtatagctatggcattggcatcagacaagttcgtcctctccgccatcgtgctcgccgtcctcaccgtcgcggcagcggcggcgggctacggcggctacggcgacgtcggcgagtactgccgcgtggggaaggcggtgtcccggaacccggtcccatcgtgccggaactacatcgcgcggtggtgcgccgtcgccgggggccgcctggactccggcaagcagccgccgcggcagctcctggagccgtgctgccgggagctcgccgcagtgccgatgcagtgccggtgcgacgcgttgagcgtgctggtgcgtggcgtggtcacggaggagggcgaccgcgtcgccgggatgatctcgcagcacgcggcgcccgggtgcgacgccgcgacgatcgccgggatggcgagcgcgctgacggactacggccggtgcaacctgcagcacactggtttctttggctgccccatgtttgggggtggcatggattaacttccttagtaattaattaattaggcctttgcttaattaattatttaattagttatccgggttactggataattaattatcgatatttgctagtagcatctatcatgtttggatgctgctttctccgtgaatgtgatgataataataatcagaagaaataaataagaagagttggattcatcagctttccagtatc

SEQ ID NO: 10286 - DNA, 1973 bp, Oryza sativa
  ref <308>: DATABASE ACCESSION NUMBER: AK107634
  ref <309>: DATABASE ENTRY DATE: 2002-08-28
tgggataccaccacctataaatcaacaccagcgccgcctgtttcaccatggcgcccactcaatccgagcgcacgcctttgctgggcacgcagcagcgacagccgtccgtctcgcgtcaccgtccaagcttcgccgccagtatcggtcgccctgaccttaccgccgaggaggaggatgccatcgcacaggagtcggccttcagcgccatccagggcgctgcgcacggtgttgatcccaactcgtccgccttcgtcccgctcgatcagagccacttctccgtgtccggtatcggaggtgctatcgccgaggagcctgaagagcctcccctccgtgcggacatctgggtcatcatgggcgccatgtggatcggcagtttcctcgccgcgctcgacggcaccatcgtggccaccatcatgaactcggtcggctccgaattccgcgtgagcaaggaggtcggctggctcggaaccagctatctgctcacccagaccgccttccagccgctctacggtcgtgcctcggacatttttggtcgcaaggccgccacgctcttcgcctcggtcgtcttcctcatcggttcgctcctctgcggtctcagccagaccttctggcagctgtgtgccgcacgtgctatcgccggtatcggtggtggcggtcttaccaccatggctacgctcgtcacgagcgatctggtgagccttaaggctcgtggcacttggcagggactcggcaatttggtctacgccaccggcgctgcactcggaggacccctcggtggtgcgctcgccgatgccggcctcggatggaggtgggcgttcctcgtccaggtgcctctgtgtgccgttcacttcgccgttgtctcgtggaagatcgacatccccgccggtcccggtagcatgatcgagaagatcaagcgcatcgatgcactcggctcgctctcgctcgtcacctcggtcacgctgattctcgtcggtctcagcctgggcggcaacgagcgcgagtggtcggacaagcttgtgcttggctcgctcatcggtggtggcgctgtgctggtgctgttcgtgttgatcgagcgctacgtagcgcgcgagcctctgatgcccatgtcggtgctgttcaaccgcacgcccggctttgtcgccatcgcatgctggttcatcaccatgtcgcagttcggcatcatcttcaacgtgccgacgtacttccagtcggtcgagcagacggcgtcgtcgtatgcaggtctccacctcatccccaacgccatcattgcttcgagctgcagtctgggcagtggactcatcatggcgcgcacgggtcgataccgcaagatgctgctgctcggcggtctgtttggcttcctcggcccgctcatgatgtgcttctggcaccgcggcacctcggaggtattttactgggccaccatgccctttggtggtgcggcatacggttcgatcctcaccatcacgcttgtggctctgattgcctcggtggaccccaaggatatggcggcggctacgggtgtgacgtacctcttccgtgcgactggttcggtgctgggtatctcgctttcgagcgccatcctgcagaacagcctgcagaagaacctggaaaagaccgaaatcccgcgcaaggtcatccagctcatccgccaggatgcaggtgcgatcaaggagctcagcaagccgctgcgccaggctgccattggagcgtacgagcagtcgatgcacaccgtctttatcgccatcgccgccgcaggtttcttcgccttcctggctctcttctttatcgaggagcgtgatctgcctggcaagaagcccgccgctcctgccgctgcccccgcccgtgcccagcgctagacactagaaccctagactccgacccggcccgtgcctcggcgtgctgccgtttcgttgcttcatctttctacctttacaactttcacctgcttctacaatgacaaatcaactgatggg

SEQ ID NO: 10287 - DNA, 1971 bp, Oryza sativa
  ref <308>: DATABASE ACCESSION NUMBER: AK107635
  ref <309>: DATABASE ENTRY DATE: 2002-08-28
aagatatgtatatgtgcacgcagctagcttagcgctagagctaggccggccactacacatcatatcgatcgatcacaaattaatattgtgcatacatactcatatgtatagaaatagaacaggcgggtcatcagctcctgggcggtcaaatccaagtcgaagggcgcccggggaactgatcgatcatatcgattaattgatcatatatactgtactcctgtatatcgatatattcgatcggctggtacgttgatcaattaattaatttaagtaagatcgatcaagctaggcaggtcggtccggatgatgagcggcgggttggcatgggcatggcgggcagtgcggtgcggggtggtgttgccgacgctgcagctggccgtctacgtctgcgtcgccatgtcgatcatgctcttcctcgagcgactctacatggcgctcgtcgtcgccgccctgtggctgattcgccgccgccgccgccgcagcaacaggagggagcaggacgacgatggcgctgaaaacgaccagctgctgcaggacccggaggcggccaacagccccatggtcctggtgcagatccccatgttcaatgagaaacaggtttaccggctttctatcggtgccgcgtgtgggatgacatggccatctgacaagctggtgattcaggtgctggatgactctacagatccagccataagggagatggtggagggagagtgcgggcgatgggcggggaagggcgtgagcataaggtacgagaacaggcggaacaggagcgggtacaaggcgggggcgatgcgggaggggctgcggaaggcgtacgcgagggagtgtgagttggttgccatcttcgacgcagacttccagccggacgccgacttcctcctgcgcacagtgccggtgctggtggcggacccgggggtggcgctggtgcaggcgaggtggcggttcgtgaacgcggacgagtgccttctgacccgcatccaggagatgtcgctggactaccacttccgcgtggagcaggaggtggggtcggcgtgccacggcttcttcgggttcaacggcacggcgggcgtgtggcgggtgcgagccctggaggaggcgggcgggtggaaggagcggacgacggtggaggacatggacctggcggtgcgagcgagcctgagggggtggcggttcgtgtacgtggggcacgtcggggtgcggaacgagctgcccagcacgctgcgcgcgtaccggtaccagcagcaccggtggtcgtgcggccccgccaacctgttccgcaagattttcctcgaggccccaccgcccgcgtgtccccctggaagaagctccacctcctctacgatttcttcttcctccgcaagctcgtcgcccacctcctcaccttctccttctactgcgtcgtcatccccgcctgcgtcctcgccggctccgaccacgtccgcctccccaagtacgtcgccctctacgtccccgccgccatcaccctcctcaacgccgcctgcaccccgcgctcctgccatctcctcatcttctggatcctcttcgagaacgtcatgtccatgcaccggaccaaggccacgctcatcggcctgctcgaggccacccgcgccaacgagtgggtcgtcaccgacaagcgaggcaacgccaaccccaagcaccagcagccagctaataccaccaccaggcctgggaggaagaccaccaccagctccagccgcacaagcttcttcaataatgacgtccatgtcgccgagatcctcctgggggcctgcctgctctactgcgccctctacgacatcgcctacggccgcgacagcttctacatctacctgctcctccagtcggccgccgccttcatcgtcggcttcggctacgtcgggacctagcagctactactactcttactctacatgcatccatgtataattccatccattatattcctgcatacaaacctcaattatatcc

SEQ ID NO: 10288 - DNA, 1428 bp, Oryza sativa
  ref <308>: DATABASE ACCESSION NUMBER: AK107636
  ref <309>: DATABASE ENTRY DATE: 2002-08-28
atcagagttgcgcagcggaagcgtggtgggccctggtaacatcgtttatgagaagaatccacggcggacagataacctgcttcttcttggagctatttactatcaggtgaatattgacctgaatacttgatgccatctgacgcatatgtttttgcctttcgcacggattttctggcaagcttgtgattccttgtcttttgcagatacgtaattatgatatgtgtattgcaaagaatgaggaggctcttgctattgatccaaactttgcagagtgctatggtaacatggccaatgcatggaaggtagtttggcgatataaatcatgaaaaataataatcttatttgccaatgagtatattgttttgaaagtcaatacttatcattctaaaatagatgcgatatattttgctattcaggagaagggtgatgttgatcttgcaatccgttactatctaaccgccattcaggtttgcttctgctgtgcattacatttccttgttttgtttttgtcacttatttcgtttttcaacctaagttaatttttggaattttgttcattgaatttggttcaagtttattgtataaattgcttttggttccctcaatgcttgtcacatttttgtcaaattgttgggctcttgggcatggtcttacaatgtcatacattaaaaattgagttggcaccttctatcgatatgattccagtgtccattgcattgtttagaacttacatttttgaaatcaagctttaccaatttttgtttgaaacaacaacttcaattatttcaaactttatcaaatttttttgaacaacaaccaactcttgttttctgctcatataattttagggttgaggttttcagaattaaattttaaaatatacattatttttcttccgtttgcatatatatgcatgttattgaaaattttacagaaatatatgtttcccgcgggttggtgccacgggaccatgttgtcggcagtggtggtgcagcgccaacacgtgcaaccgagttgatctcgcggaccagcggcccgggtagcggatgcacggtagcaacccgcgaaaccggaagcgcgcgaccgcaacggtgccgctccacgggcgcgcgggaccattcccctgttgaccggcgcccgacagccgacgctcccacggagtggaaacgcggaaggcgagcggtggcgcgtaacctccaggcaccattggtcctgagacatctaactgacaacttaagcctacagtcataccaatatgggttaattagcaaaagtaaacagcaggtgcaaattgttacaaaggattcaaaaccatgacgaggtcaaataatggccttttgtaacacaaatgtcatcatttggagacatcaggtaggtaggtaccacttgcaatagtacagtgctacattcatgcatatgattgaattg

SEQ ID NO: 10289 - DNA, 1378 bp, Oryza sativa
  ref <308>: DATABASE ACCESSION NUMBER: AK107637
  ref <309>: DATABASE ENTRY DATE: 2002-08-28
agctcagctcagctcaaggagagctcgatcgctgcaccaatacttcactggagatcgcctagctgcagctagctagcttatcctgcgtgtcttgagcttctctcatggaggagatctcccaccacttcggggtcgtcggagccagcggcgtccatggcggccaccagcatcagcatcaccaccacccgtggggttcttccctgagcgccatcgtcgcgccgccgccgccgccgcagctgcagcagcagcagacgcaggccggcggtatggcgcacacgccgctcacgctacctcgactgccagaaggttggggcgccgccggaggtggcggcgaggctgacggcgatggcgcaggacctggagcttcgccagcgcacggcgctcggcgtcctcggcgccgccacggagccggagctggaccagttcatggaggcgtaccacgagatactggtgaagtacagggaggagctgacgaggccgctgcaggaggccatggagttcttgaggagggtggagacgcagctcaacacgctctccatctccggcagatcgcttcgcaatatcctttcctccggctcttctgaggaggaccaagaaggtagcggaggagagacagagctacctgagattgatgcacatggtgtggatcaggagctcaagcaccatttgctgaagaagtacagtggatacctgagctccctgaagcaagaactgtcaaagaagaagaaaaaagggaagctccccaaggatgctcgtcaacagctcctcaactggtgggagctgcactacaaatggccttacccctcggagagtcagaaggtggcactggcggagtcgacggggctggacctgaagcagatcaacaactggttcatcaaccagaggaagcggcactggaagccctccgacgagatgcagttcgtgatgatggacggctaccacccgaccaacgccgccgccttctacatggacggccacttcatcaacgacggcggcctctacaggctcggctagctagctagcctactccttatccccagctaccatgacctagatcgatctcgaccccaaatcaatggtcgctaagctactgaaaagtttgtgatgagaattgaagaacctaggttagtcttcctggtaatttgatgctcgcacgtacgcacgccatggatggctgcgtgcttattttgtttcttgccgcaatatgtaatgcaattgccttagctaatgcatcaactcgggtcggttttagctgctgctgctgcgccacaatgaggtggttgtggttatgcttttgtgtggtttaatacgccaagacgtacacattgcttcgaaatgtcgctactcttgctgctgctaattaagtgcgtgtttgaat

SEQ ID NO: 10290 - DNA, 1950 bp, Oryza sativa
  ref <308>: DATABASE ACCESSION NUMBER: AK107638
  ref <309>: DATABASE ENTRY DATE: 2002-08-28
ccctttgcagtttgcagccggcgaagcgccgccgccatcggaaaaaaaatgccgcccaagccagagcggctgctgttccagtacgtgagcaagccgcgcaggccggcgcgggagcctgcgccggcgcccgaggtctgcggcggcggcggcgaagaggtggtcgcgtccgacgcggatgccgacgccgtgtaccggatggtcacggcggcgcccacgccgtcggcgatggagtccgcgctgtccgcgtcgggcgtcgcgatctccgcgccgctcctcgacctcgtgctgcggaggttccggttcgcgcacggggacccgctccgcgcgctgtcgctcctctccctcgcgctcgaccgccacggcgtcgccccgtcccccttcgcgctcgacaccgcgctctacgtgctcggccgggcgcgccggttcgcgcacatgtgggacctgctgcgatcctcccgccgcctcgtcccggacgccgacacgccgcgcaccgccatggtcgtcctcggccgcgtcgccaaggtctgctccgtccgcgagaccgtcgactccttccgccgcctctcgcggatgttgaggggccgcggggacgaccaggagggccaactcttcaacgcgctgctccgcacgctgtgccaggagaagagcatgtccgacgcgcgcaacgtctaccacgcgctcaagtacgagttcaaggtgaaccgccagacattcaacatcctgctctccgggtggaagtcagccgaggacgcggaggcgttcgtcgccgagatgcgggagctcggcgtggagccagacctggtgacttacaacagtttgattgattgtcactgcaagaaccggggcgtggagaatgcctacaagctgctcgacgaaatgcgggagaaggacatttctcccgatgtgatcacttacacgagcttgatcggcgggctggggttgattggccagccagacaaggcaaagcacttgctgaaggagatgcatgagcttggatgctaccccgatgtacctgcatacaacacggcgatacggaactttgtgatagcaaagaggcttggtgatgcgtttgcattgatggaagaaatggcctcgaagggactcatgccaaatgccacaacctataaccttttcttccgttgctattattgggcatacgacattggcagtgcttggcagttgtatgagcggatgcgttctgaaggatgcttcccgaacacccagtcttgcatgtttattgtgaggttatgtcataggcatgggagggttgcacaagcactagagctgtggagtgatatggtcaataatgggtttgggtcattcaccttggtgtctgatgtgttgtttgatctgttatgtgatgaagggaagctggatgaggctgagaggtgcttccatcaaatgattgagttagggcagaagccgagcaatgttgcatttagaaggataaagatactcatgcagcttgccaaccgtgaagaatctattgccagattaactgctcaaatggcacagtttggacggttggcgcctgaggattgccgaagagttgatcataccttgcagagcacacatcaaagtagtgatagaactgacactgacactatagtgaaacacagcaacacatttgaatcacgacgatgataaattggggaagataacttggttggacagggaaataactgaaaaagagagttctgtacttcgatatgttgttcaaggtatgaagttctgcatgtgatctatagatggccaaccatattattttcaatatcaatagaatatgtttctgcaagttctactgtggaagaccattctagcattgccttctgtgctgagagaaatgctattccagcatcattgttatctgcaagctgaatgcctggatgtaaaatcacaactactgtgtagagacacttcaacatttttgtaacctgtggtgtttgtgtg

SEQ ID NO: 10291 - DNA, 1745 bp, Oryza sativa
  ref <308>: DATABASE ACCESSION NUMBER: AK107639
  ref <309>: DATABASE ENTRY DATE: 2002-08-28
actctaccatccggctaccgacgacactcagacgcaggacagctcaccgtagctcgatacccgtcgctcgtccacgccgtcttagcttgcggccaacaccagtctgaatcgaacgcagttccttggcacggcaggttccgtccaaggacagccgagcacgatggccaacctggcgtcgcatatgacgccgcgcatggacgatcgccccgcattcgttgcgcggccgggcgagcccgaggacgtgcaagaattccccgacgtttcgggcatctcgaccaagatctaccaccatcttggcgtcgacacgcccttcgacccgcagcaccgtctggtcacctcgtacatcctccccatccctgcgctgtcgatcttccgcattgtggtgacgatctacatgctctttaccgcgtttgtcactgcggtgcaggaggggatcgggaccatcacgtacttcaccagtctgagctactggggtgactgcgcgtactttttcgtgtcggcgatccacacgtgtacgttctggtactcgctatcgcgatggaacaaggcaaggctcgccagccgtggacagggggcggggcggatcgagatgctcgaaaaggcgtatccgcgcaacggcgtggggcgcatcgatgtagcgcgcagcaaggcggccatcgacgcctttggcacccagctgcaccacagcatcgagtcggaactcgcctactcgcgacgcaccgagttcgagatcggtagcaggtacccaaggtcgtggctcagcaagtcgttctcgaggccgcttcaggtttgtcatacgctgctcgtgtcgacggtctcgtcgtacccgctcgttgtcatggtcatcttctggaccgtactcaagggtcctgccccgctcggagactcgtactcggcttttgcgaatatcggcaagcatacgctcaactgggcactgacgatgctcgatctggtcgtgctctcgcgcacgcccctgcggccctggtggcatctcgtgcccatcctcgccttcctcggcctctacctgggcatcgtcgatatcaccttcaagaggtatggcgtgtgggtgtacggcttcttcaacgtgcagcagtttggtgtgccgttggtggtgttcttctgcctcctgctcgccgtgtttgcagtcgtgtcgctgctcatcacgcagctgctgatgctcttgcgcgaagtcgtggctgcaaaggtgcagaagagtggcgggtggggaagtgccaaggctgtgggtgtgcccgatgatgcctgcatccccacccgtcgtggtccaggacccctgggtggaggcggaaagaggaccaagcccggccacgatatcatccacctccgtggcagattcccctcaaacgctctcgtgggagataggtctagcggtatcgtggtcgacgatgtccagatccacgctctctcgatggtgggctcggaactcaatgtggacgaagtcaagacgcccatttcgcgctccacgcgcccgtcgattcggttcgagggcgatgatcacgccctggcaccttcgcgcagcagaagccgccaggccgacctgcccaatgcagacgcctcgtcgagcgaagctcacctcttccgactgatcaactggcgcgccgaggaaaacccctttgcctccaacgatcgcatcctctaaacacgctcctcctcagctttttagtcacccccctttgtgcatgtcttttgctgttcccatttgtgcaaaatttgataccattcctcct

SEQ ID NO: 10292 - DNA, 1805 bp, Oryza sativa
  ref <308>: DATABASE ACCESSION NUMBER: AK107640
  ref <309>: DATABASE ENTRY DATE: 2002-08-28
gattgggcctgcacgctacaccgacgctccagtcaccgtccaggagatggccgaggacacggagaaaggcggcaagaatgcttggcccgacctcctcgtcctctcgcacaaccactacgaccacaccgattacaacaccatctccaagcttctcaacccgccggcatccgctcgcgtcaagcgcccacacgtcttctgcacgctcggcaccaagtcctggttccagtccaactttggccttacggacgccgaggtgaccgagtgcgactggtgggagcagagcaccgtctcgctcggtagcgaagctgtgctcaagctcacctgcgtaccggcgcagcacttctcgggccgcgggctcatggaccgcgaccgcacgctgtgggccggctggaccttccacgccgtctccgaggcgtcctccaaggcgagcgtgtactttgccggcgacaccggctaccgaaccgtgccgcgcggcatgcctagggaggaagaggatacgctgccaacctgtcccgcgttcaaggagatcggcgaggcgctcggacccttcgacgcggcgctcatcccaatcggcgcgtacgagccgcgcttcttcatgtcgacggtgcatctggcgccgcaggactcggtgctcgtgcatcgcgacgtacgcagcaggcgctcgtacggcatccactggggcagcttccgcctcacgcccgaagacgtcaacgagcctcccaagcgtctcattgaggaggcgcagcgtcagggcatcgacccggccgagtttgccacaatcgagattggccagagcgtcgccatccccattgccgcgtcggcaccgagcacgacccagggcgcgaaggagacgacggccgcggtggaagggggtgaggcactgcccgagtccaaattgggaaccaagcagcactgggacgaggtgtacgcgcgcgaggtgtcggtgttcaacgagattggcgaggagggcgaggtttggtttggcgaggacgcggtgatgcgcatgatccgcttcctcgagacgtactacaccgacactgtcgctggcgagttctcgtccgaagaagaaggcaaggcgccggctgtgctggatctgggcacgggcaacggtcatctgctattcgagatgctcgagtcgagtgctgatctggaggaggttgttgcgccgagccggcttgtgggtgtagactactcggcggcgtcgatcgagctggcgcggtccatcgccaccaagcgcggcggcacgtgcgaggaggtgcgcttcgaaaccgccgacatccttgacccggccaatgtgcagcacctcgtcgacatgcccaggagccagctcggatgcagcgaggtcggatgggacctcgtctgcgacaagggcacactcgacgccattgcgctctcgtcccagcccatcgacggcaccctgcccatcgataggtacaccgaggccgtggcaaggctcacaaagaaaggcgcggtattcctcatcacctcgtgcaactttaccgaggccgaactcgtcgcgcgcttcaccgcgcacgggttcgccgtgcagcaggtggttcccacccccgcattcacctttggcggcgcaaagggttccaccaccaccaccatcgcgtttgagcgtgcgtaatctcactggccgtttcgcttccccgattgtcctcacgttacttgtcgcagctgcgcttggagacctgtgcggtctcgtgtcgtcacgctgcgaatcaccccaccagagcttgatggcgacatcgacattacattcacacgatccattgacaaagtaagcaaaaacattacaggtg

SEQ ID NO: 10293 - DNA, 1812 bp, Oryza sativa
  ref <308>: DATABASE ACCESSION NUMBER: AK107641
  ref <309>: DATABASE ENTRY DATE: 2002-08-28
actttacaccaccactgccatcttctttcgcgcggtcgtcttgcaaacatgcactccgccaacctcctccgcgcctcgtccaaggccatcaacaccccctcggtccgatgcctctccacttcctccaccgctaggctcgcccagcctgctgccgccgccgccgcctcgtcgggcgccgccaaggcgcagctcagcccgctcgcgctctcgcgcgccaaggatgtagggtccaagtggcagggcacctcgatgctcggcggcaccacaaagaactacgtcgacggcaagtttgtcgactcctccacctcgtcctggctcgacgtcaacgacccctccacccaggcgcttctctccaaggtgccgctcaccacgccctcggagttcgacgctgccgtcgccaacgcacacgccgccttccccgcctggagggagaccagtctgctcagccgtcagcaggtaatgttcaagctccaggcgctcctccgcgaccacatggacgacatcgccaacgccatcgtgctcgagcaaggcaagacgtttgccgacgccaagggtgacgtcctgcgcggtctccaggtggtcgaggtggcgtgcggtatcacgagcacgctcatggaggagcgcgtcgaggtgtccaaggacatggacacgtacgcgcgtcgcgagccgctcggcgtcaccgccgccattgcgcccttcaacttccccgccatgatcccgctctggtccatccccatggccacggtgacgggcaacacgctggtgctcaagccctcggagcgcgtgcccggcgcgtcgatgatcatcgccgagctgtgcgagcgcgcaggcatgcccaagggcgtgctcaacgtcgtcaacggcgccgtcgacgtggtcaatggcatctgcgacgacccgcgcatcaaggccatctccttcgtcggttccgacagggccggcgcacacatctaccaccgcggcaccgccaacggcaagcgcgtccaggccaacctcggcgccaagaaccacgccatcctcatgcccgacgccaacaagaactttgcgctcaactcaatcgccggtgcggcgtttggtgcggccggtcagcgatgcatggcgctttcggtggtggtcgccgtgggagaggcgcagtcctgggtgcctgagctcgtcgagcgtgccaagcagctcaaggtttccggtggctttgaggagggtgcggacctgggtccgctcatctcgccccaggcgcgcgagcgcgtacgcagcctcacgggcagcgtcgaacaggagggcggacgcatcctcctggacggccgcgactttgtatgcgccgactatccaaacggcaactttgtcgggccttcggtggtcgaggctggtcccggcatgaaggcgtacgaccaggagatctttggccccacgctcgtcgtggtcaaggccgactcgctcgaccaggcggtcgactacatcaacaagaacaagtacggcaacggcgcggcgatcttcaccaccaacggcgccaccgcgcgcaagtttgagaagaacgtcaatgccggtcagctgggcgtgaatgttcccgtgcccgtgccgctgccgatgttcgcctggtccggcaacaagggttccgtcctgggcgacattggcttctacggcaaatcggcgctcaacttttacacctccttcaagacgtccacttcgctctggaggtccgacgatgcacagatgtccgaacgcgcctcggtcaacatgcccaccatgtcctagccttttccacttttggctcgacatacgccgtgtaatcttggtagaaaatagtgtatgacagtg

SEQ ID NO: 10294 - DNA, 2074 bp, Oryza sativa
  ref <308>: DATABASE ACCESSION NUMBER: AK107642
  ref <309>: DATABASE ENTRY DATE: 2002-08-28
gtgcttgtccgtctcaaacttcagtctcccaagctgccgagacactctattcatcatgtctgacaagctttccgccgaaatcgacaacgatgtccaccacaatgagaagcatcaggtttccgagaagcaggaagtcgacctgagcgagacagcaggtcgtcgcgcgtccgttgcgctgaacatcgtcgagaatccgttgcagcgcaaatccccacagcaggtggttgccgatgcccgtcaattcgcagaagagaatggcatggccgagcatgcagagctgttcggcaatgctgcacccgttgcacgcgatcagtcgcgcttcgaagagcttggaagtctttctgagcctgagcgcgctgccttgatctacgagcgcgatcacaaatggcatggacccaagatgctatggtactcgatcgcactgtgcgctgttggagctgccacacaaggttgggaccagactggatcgaatggcgccaacttgtctttcccgcaagagtttggaatcgatggcggtggccgtgacagctggattgtcggtcttgtcaactcgatcattttcttgacagccggtttgattggcgccttcattgtcgatcccctcaaccattaccttggtcgtcgcggcgagattttcgtgaccgctctctgcctcaccgccaccccaatcggctccggattcgcacaatcatggcaacaactcttcgcggcacgtttcgtcatgggaataggaattggagcaaagaacgccaccgtccctatttactccgccgagatggcacccgctcgtattcgcggtgcactcgtcatgttctggcagctttgggtcgtcgccggtatcttcttgggcttctgcgccaacgttatcgtcaaggacaccggacgcatcgcgtggcgcctccagcttggatctgcctttattccatcattcatcctcggagtcggtatctacttctgcccagagtctcctcgttggctcatgaaacatggaaagtttgcccaaggtttcaagtcgatgcagattctgcgtgcgcaccctatcatcgctgctcgcgactactactactcgtatgtcatctacgtcgaagagatgaaaattgccggcggttcaacctacttcacccccatgcgtgactgcttcacagtgccgagaatcaggagagccaactacggcgcatcaactgtcatgcttgctcagcagatgtgcggtatcaacatcatctcgttctacagttcaacaatcttcgacaacgtgctcaaagactccaacaaagcactattcgcatccttgggttacggtgccgtccaggtcgtcttcaccattcctaccttgttcttgatcgacaccaagggtcgccgaactctaactcttatcaccttccccatcatggctgtcttcttgttggctgccggtttggcgactctgatgcccgagaccgccagtgctggtgcacgtcttggaccagttgtactcttcatctacttcttcacgatcgcctactcgcttggagaaggaccggttgccttccaatactccgctgaagtcttccctacgatccagcgtgagcagggtatggcttgggctgtctgcatcaacaacacctttgctggtatcctcagtttgactttcccagccatggtcgatgctatgacacaagtcggtgctttcggcttctacgctggcctgaacctcattgcctggttcatgatcttctgcttcgtccgcgagaccaagcaactcactctcgaagaaatcgaccaggtcttccaagtccccaccaagaagttcatcggccacgagctcaccgtctggctaccctggttcatcaaggccaagattctccgccagaagatccagaagccgcccgccatcattggcaccgaggaaagcgtcgcggatgctctcaagcactagctgctgctctcttgagtcgcggcaaatcaagactcgtacaatatacatcgcgtctctgcggtatatatatacacgtggcaacgctttaatgaataccctctagtcgatgtgttggtgtatagttccgtaattgggataattaatcaacctctttatctg

SEQ ID NO: 10295 - DNA, 2051 bp, Oryza sativa
  ref <308>: DATABASE ACCESSION NUMBER: AK107643
  ref <309>: DATABASE ENTRY DATE: 2002-08-28
acgcgctccgacgacggcggtgaccgtggttgctccaccgccgccggtgcccacacctgctgcaggtgcagcagccccgacgctggcgcctgcatcagcagctgcacatgcacctgcgctgtcggtggagccggatgctctcgtttctccagcgtcaatcgcgcccgcttatgctgcgccggcgccggctccagcaccggcggctcttgaagcgctcgcgccgccgccacctgctgcacctgcatccctctccgcaagcggcggagagcgcggatgtgttgccatcgcgaacgctgcggtcgccggccgcggccgtgggcgtgggagcggagccaaacgcgctccgacggcggtgaccgtgggtgctccaccgccgcaggcgcgcacacctgctgcagctccggcgaaggcgttcgtatcagcacctgcacctgcaccgagttctgtgatctcgccggtactcgcagccagcgcctctgctgcagctgcatttgcaccggcgccagcgccggcggcagctgaagtgatcccgccgccgccattgcctgctgcggcaagcacagctgctgcacctgcagctgaaaggaaaaggaagctcctgactgcctcaagcctctcctcaagcggtggagagcgcggacgtggacgtgcacgcggccgcggacgtgttgccgatgccgccattgccggtggcagccgtgggcgtgggcgcggatgcggactaactccagcggtggtgaccgtgggtgctccaccgccgccttctgcagctccagcaccggcgcctgcatcagcaccatcactggagccgaatgacattattgcgccggtcgtgtcatccacactcgcgccaggcgcctctgctgcagctgcagctgcaccggcggtggcaccgccggcggcggcgcttgaagcgatcttgatcccgatgccgccgcctgcagccgcagccgcagctgctgcacctgtacccaagaagaggaaggtccggacagcctcaaccctctccggaagtggtggaccaggacgaggacgcgggcgtgttgccgaggcaacctttgtcggtcgtggccgtggagtttggagtgtgcgcgggcgcggacgcggacgcattccgactgaggtgaccgtgggtactccatcgccgtcggcgcccacacctgcaccagcatcagcaactgcaccgttaatacagtcaaatgttgtgatttcaccggtgccgcccacacttgctgcctctggcgtagctgcatggccaccggcgccggcgatacctgagttcacaaccgcagcagcggcgcctttatcggaaaagccggtgctgacagcccatgacgttgtcatggcaacactcttccccaacggtgtcttctcctacactgccgggtcatcacatgcgccgccaccgccggtggctagcggttccttcttccaggaggtgatccctcccggcggtgtgccgacaaactacgccatacatgaggctccggactttgacccaaacgtcttcttcgccgatgtgcccgacggggagcaggacgagctcgtgttgctgagcttgacatcgacgctccttgacattgacaactcattgactctggttgccgacgatgcagcctcgtcggctcaggcagccgttgacgtcgcatcatcgtcagctcaggctgccatcgatgtcccttcctcgtcggttctggctgtcgtcgacatcccctcctcatcggctcaggctgccattgacgttcccgcctcattggctcaggctgccactggtgttgcatcctcgtcgacccaaggtgctgctgggaatgagaggccgataatgttcgacttcgacctcaacgaaccagcatccaatttcgaatgaagacgatgattcaaagaaagcaccagcttcgggtgatctgcaatgtatccgataatttactaagtcgattgtatccatcttgtaatgacgttggtttaatttacctgtgttatcatgtaatttagcaaacatgtttatctagtttcttatgatcgaacaaaaactattgaaacctattctggtc

SEQ ID NO: 10296 - DNA, 1492 bp, Oryza sativa
  ref <308>: DATABASE ACCESSION NUMBER: AK107644
  ref <309>: DATABASE ENTRY DATE: 2002-08-28
acacccccacatcttccggcgccgtcccctccttcatctcacacgcacccccgctagaatcaaaatgaagctgtcaggtaccgccttggcagcctccggccttctggtcgcttcggcatcctcggcgctcgccgctcccgccgcttcgtcatcgtcttccgcgtccactgccaaggctgccggtgccgcaagcaagcgatcggccccgatccacatccccatccgcaagcgcgagatggtcaagcgttcgggcaacgagctgcttgactgggccaacgaacagaaagctatcctgcagaacaagtacggactcccttcggccgatgcatccagcaaggcacgtcgagcacaggggaccgccctcaccaacgtccagtacgacagcacctgggtcgccaccgtcacgggcggcacaccatcgaaggactacgaggtggtgctcgataccggctcagccgacttctggatcgcctcggactactaccagcccagctcgagcagcactttccagaaccgttccaccgcattcaacgtacaatatggctcgggacaggtggccggttatgaggcatccgacacgttctcgctcgcaggcactactgtgcaggacacccgcttcgccgtggcagaccaggtgtcgtccggtctagtgagcggcaacatggagggcatcatgggcatgggcttccagaagctcgcagcatcgggcgagccgccgctctgggttgcagccaacgtcgacaccttctccttctacttagagagggcgtcgctcacatcaaacaaccaggagcaggcaggcggcttctttacgctcggcggcaccaactcgagtctgtaccagggcaacatcagctacaactcgctcatcgaggagctctactggatggtgcgtctgggtggtatcggtgcgcgcggtagcgacgtgagcctcgacggtcttacgcgtgccgccatcgacacaggcaccacgctcgtcggcggacccaactcggtggtgcagtcgttttacgccaacatcccaggctcgcagtcgcagggcaacggctactactcgttcccgtgccgacagacgatcgacgccacgctgacgtttggcaatcagcagtacaccatcccggactcggactttgttgcgggcacgctcgatcagtcgggctcgcagtgcctgggtgcgttctttgggctgggttcgtcgtcgcagactgacctgcagtggattgtgggcgacgccttcctcaagaacgtctactcggtcttcactacctcgggcagcaacggcgccgcggtgggctttgccagcctcgcctcggggctcaactcgggcaccaactccaagacggtctcgacgtcgagcacgggcgcgacgagtgcggcgtcgaccaccgcgcagcgctcgggcatgctctcgctggctgcggtgctcgccgtgcctctgatcgccgctctggctctgtaaacttcagacaagaatggacaacaatggccgtgt

SEQ ID NO: 10297 - DNA, 2047 bp, Oryza sativa
  ref <308>: DATABASE ACCESSION NUMBER: AK107645
  ref <309>: DATABASE ENTRY DATE: 2002-08-28
atccaaccattcaccttcgctttccaaccaacactcgctacagtgcaatcacaaaagcctcataataattaatcccaactcaacaaccttcggaactatcgtaaaaagatcgaatcaagaacactatcaagatgcgttactcttacgttgctgctactctcgtcggctcggccctggccatgcctcaatacggctactcagctgttgttcctactggataccagcctgccccaacttcatcaaagccatacgaagcatcaactcccagtgcctaccacgcctcgactccggcctcctccaaggtgtacgaagcatccacccccagctctcaggtccactacccagctagcacgccagtctacgaggcgtcgacccctcctgcctacagcgcatccactcccgcagcaagctcttccgtctaccatgcgtctacccctgcagcgagctcatccgcttaccacgcttccactcctgtctacagcgcgtccactcctatctacagtgcttccaagcctgctgagagctcctcagcttaccatgcctcgactcctgtctacagcgcatctactcctgcagtgagctcatcggcataccacgcctcgactcccgtctacagcgcgtctacccccatctacagtgcttccaagccccccgaaagctcctcggtttaccacgcttcaaccccagcctacagtgcttccactcccgtctaccacgtctcttcttatggaactggttacgtcaagcctaccccctcttcttacggaactggctatgtcaagcctacccccaagccttcatcggcttccgagtacccccactccgactacaccactacgcttacatccacccacacatcttgggtgccatgcagcacttcagttggtcagggagagcactccagtgtcatctactcaacatacttgaccccaacctactccactgtcaccgtgacctcgactgttcacggctcgaagcctacatctgacgtgcccgtctacccagcggagactcctgagggacacaagccaacttacccagcgggaactcctgaggctcccaagccgacctaccctgctggcacccccgaggctcctaagccaacctaccctgccggtactcctgaggctcctaagccgacttactccgctggcactcctgaggcccctgcaccaacataccccgctggtactcctggcggtcctcagtgccctgccccagtgactgttaccaagactgtacatgaggttgagaccaagaccgtcaccgttggtgctggtggtgcttacactcctggcccagccccctctgttgtctaccccgagggtactaagccatcctcctccgtggagcactactcggagggccccaagccatcctccgtcaagccctaccctgttggtcccaagccttcttccgaggtcaagcccccttacccatcctccggtagctcgatccactacactgcttcgtcggcgccctacccgattcacaccccttcctcatctaaggcctaccccactgagtaccctaccccttcgtcttccaccaaggaatacccagcatccacaccttcttcctctactaagggatacccggcctctaccccttcttcctctactaagggataccccgccgccactccctcttcttcgactaaggagtaccctgctgccaccccttctagctccgctgtaccctacccggtgaacactccttcatcctcgaaggttgcccctcaacccactggctacgtcgcctacccccactactaagctactcaggtagcttgagcactttcacttcttatctcaagcaacaattacgagcggcagaggtgtcgaaacagtaacgtaggaactgtggccttgctttcctcaccttgcattgctcaagcgtttctgtccaaatttggttgttttcatgcgtttggaatttcttctcatacttcaactgtttatattcaacgaacaactggtatagaatggttacgataggtacgagtttagtagtagacacatcttatgacccaactttttgtcactcc

SEQ ID NO: 10298 - DNA, 1856 bp, Oryza sativa
  ref <308>: DATABASE ACCESSION NUMBER: AK107646
  ref <309>: DATABASE ENTRY DATE: 2002-08-28
aagcgacgggagctgcgtcctctcgcgaggcgacggcgacgacccgtgctccgaggcggaagaggcaagctcagcaccgttgtacgagctcgtcgtcccgaggcgacggcgcggcaggatctcgcgcggagagcgcgcgtgcgggaaatttccccgcaaaatccaggtaggaagaagaagggaggcacacctgaggcctcagatgcggcggcggcagccccagcccgtaccctaggttgtggtgttgggtcggcgacggcggctctccccttcagtcgtggcggccgcggtgtcgggttagtaccgccgccccgctctctcggccgtggtggcgggccagcagtggcagcaatccctccaggcggcttccccagttattcagcgtccatggatggatttcccttccctccaccttttgatggatcctacagaggtggattccccagctcttcagcttggttggatgcgtccggtggtgatgaatcttctcctggatcatgggataaagatgtacatccacgtggtggtttcatgagctattttggaaatcatgcacaaaactctcatttggttggtgcgcctatttacattgctgatgctagttcaccaccagaggtggaaattttacaaggcaatgatgatggaaatggcaatggcaatgttaggactgagatgaggatactgtggacagaggaagaggatatcatattgatgagtgcttggatagagcattcaactgactctacatgtggagcagataagggaggtggccaatattggggtgaagttgttgaatcgtacaacaagactaccccacctctcagaaaaagaaatctgaagcaatgcaaggatagatggcacaagattaataggtggacggatctctttgagtgtgcttatgtaaaggctcgtagaatttttacaagtggatattctaatcaaatgtggattgatgcagcacacaagttttatgtggatgacaataaagaggcaaagctaggaccctttgtgctgatggaggtttggaaaatatgccgagaagtctcaaagtggaaaacatacaatgataacctgaggaatgcacgtaaaaggaaatcatttcacttggaaggagactctgaggaagctgatgacacttttgatgagatgccaaagcgaccaatgggtcagaaggccgctaaaaaggcagctctagatgcaaaaatcaagtcaaatggtttgggcagtagtgatgatggtcactcaaaggagtctcctattcagttagacaaatttgatagatatagcaaattccaggaggaaaacaatgacaagcgcatgaaactattggacagacaggaaaaaatatcttctgagaagctagaggccacaaagattgcccaccttacagcacaagagtacaaagaaggaaggaagcttgagaaagagtcaaagatgatggagacttataacagcctcatctcacaagatacaagttcaatgtctgctgaggaaaaggcgcagcgagttagtatgatgaagtgtcttatgaaaactcttttccctgaatctgattgaacagatatgtcaattttgcaagtggaggctactatctttggctatctggtgaatgccaaattatcttgctgttttttctatcctaaaccaacttttccactttttctatcctaaactctggctattggcaagttatgtttaatctttcagcaggttcagtgtatgtctcagtttatataacttttgttcatgctcaatccactaagcctattttggtgcttgttcagtgatacactatactactaatatggagtatatataatctagggaaaaagatgggcatattagccttttattgc

SEQ ID NO: 10299 - DNA, 1769 bp, Oryza sativa
  ref <308>: DATABASE ACCESSION NUMBER: AK107647
  ref <309>: DATABASE ENTRY DATE: 2002-08-28
cttaccaggtccagacatagcaaggattacctatcctcgacctctacccgtcctcgactccacgactgtacccttttcggccgtacatcgggtctcgagactttgcgtcgccatgatgaaccgcgccgctgctctgtgcaggacaagaccgccgagctcgtcaaccgtgccaaggcggccgctgaaagggccgagtccaaggtgcgtggcgaggcggccgatgccaagaaggacggtcgcaacgtcatccagcgcgccgtcgacagcgtccaggtcatgaccgacatcggtgccaacaccaaggccgctccgtccaagagcgccaccgccggcaagggtcccaaggaggcggtcaaggagacctacacgggcgagctgccgctcaaccacgagcctcccgcgggctacgcagctcctcgtcgcgaccgaggtctccaggctcccgaccacccgacggctcgtctgcgccctgaccccgaggcgcccaagctgcctctgctcgcgccatcgatcaagagcctttccggatcggagcccatgatcgcccagctcgctggcaccatcgacgagctcacgacgttcctcaaggagacgccttcgtcgggcgccaaggccaagggagtgctcgagaatgcgcaggtggacctggagaagctgagccagcgtctggagacgatcaagcgcgaggaggcgaagcgcgtcgagaacagcctggctgcgcaggccaagcgatacgaggcgcagatctccaagcagtcggaggaggcggccaacaagctgtcgagccgcgagacggactggcaaaagtcgtttgaggaggagcgttccaagcagatgcagcagttcaaggagaagctggagaaggagcttgccacgcagagccagatcatcaacgagcgactcaaggaggaggtgatcgcgcagggcatcgagctgcagcgtcgatggatgaaggacatcaaggccaaggtggaggaggagcgcggcggacgtctggccaagctggacgagctggcgacggagctcaagagcctcgagaaggtgagcctggacaacagcagcgtgctggacgagaatgtgtcggtgcatacgctgtggacggcggtgcgtgcggtgcagcatgcgctcgacgacgcttcggccaccaaggtgccgtttgccgagcagctgcgcgtgctcaagggcacatccaaggctcgcgacgacccggtgcttgcggcggccatcgaggcgctcgatgcgagcggcgctgccgacacgggtgtcgagtcgttgaccacgctcaagcagtggttcgacgacaaggtgggtcctcgcgttcgccaggtttcgctcgtgcccgcacccgagacggcgggcgtgctgtcgcacctggcgagcgcggcgctgtcgcccatcctgttccacaagaagggactggtgcagggcgaggatgtgccgtcggtgctcgcccgggccgagtactacctcgaccgcaaggacctcgactcggccacgcgcgagctcaaccagctcaagggctggccaaaattgctcgcctcggactggctcgccgcgtcgcgcaaacgcctcgaggtgcagcaggcgctcgaggtggtgcagacagaagccagcctcgcctcgctcatggtgtcggcctaaacctgccaccccacaagatccttccccttctgaacccagtcgtctgtccgaagcaatcggtgtgcgtcaggcagatccactgtgtcttagatgcgtccctcctgtcaaaaaaactatctcttggcctg

SEQ ID NO: 10300 - DNA, 2225 bp, Oryza sativa
  ref <308>: DATABASE ACCESSION NUMBER: AK107648
  ref <309>: DATABASE ENTRY DATE: 2002-08-28
tgtttttttggttatgctattttcaaaaagaaaatatttgcttgtattggaccttgtggcttttttttgtccctcgaggtttcatttcccgtcctcgtttaaactttatgtttttatttgaatttatatatcttcgaacgttcttctctattaatggttttgatctgctatttggactttaaaactttaatctggttctttagatacctgttgttttttcttccttgagtttcaactaggtatttttagttcgatttcttcaattaccaaactctctttttggaacttccctttggacattaaagctttatttttcttctgaaatcacattttccgtaattttctatgaagttatgcttactagcttgtgaaaagaaaatatttgtttacatttcaaccctgtggctttttttccctcgacgctccattttccgttgtcatttaactttatgtttttaattggatttcttcttctgtattaatggttttgatctgctatttggacttaatttggttcctcacttaccgtttccttgagtttcaacttggtattttctgtttgatttcttcaattaccaactctctttctagaacttccctttggactttaaagctttattttacttttgaattataattttacgtaattttctatgaagttatgcttactaatttgtgaaaagaaaatatttgctcacatttcaaccttgtggcttgtttgtttctcgacgcttcgttttccgtccttgtttaaactttttgtttttagttggatttatttatcttagaatgtttttctcttttaatggttttgatatgctatattgacttcaaaaaaattaatttggttcctcactttccggtcgttttttcacccttgagtttcaacttgtttttttttttagtttgatttcttcaattacaaactctctttttggaacttccttttggactttaaagctttattttatttctgaaatgccaatttccgtaagcttgtttgaacttatggttactaggttgtgaaaaggaaatatttgcttacatttcagtcttgcggctttttttttttttgtccctcgaccttcattttccatcctcgtttaatctttatgtttttagttggatttatttatattcgaacgttttactcaatggttttgatttgttatttggactttaaaactttaatttggttcctcacttaccggttgttttttcacccttgagtttcaacttgcttttttccagtttgatttattcaattacaaacttttctcttcgatttcttgattttgaaaggttcttcatgcatcgattcttcaaatatcactgccatgctcgcctcgggctccggggcgaactcgtcaaggaaggacgccgacgacttcacttggacggtctggcccgcattctcggccacgatgcagcggtggtggctatggcttcggcgacgctggggaaggacgcctcaaaggtctaggaccacgccctcgcatctagttttttttctttcccttggagggcctatataggtggagcgtagctcggcagtagtatgtacttaggtttattttaatgaaaagctcagcttttgccactctgtgctcccggtcgttccggcccgttctgaacgcaggttccagcttcctcctccgctctagctctcgctccgaaggtcggtcggagggaattgctgccgacgatcgctgtcgtgatggccgtgactccgaacgcgaccagcccttcattgcctgcacccggagttgctcagcctggcatccggagcggagcgagctcctccaactccttccactaggagacctccgacgaggactcggacttcgatgcggaggggtggtcgcctcttccccttggcgaagacgatttagacttcagcgtttttgacgcgccgcagccgggctccagtatacggtccgctgtggaggcgctagggcttggttaccatccttctcacgggatctaaccccgtcgacgccctaccaagcgctccgcaggtcgcgtccggggtgagagttcgcaggtgcctcctcgggaggctcatcgcggatccggaggcggaggcgggggcgttcccaacgagatggtctactgtcgcgggatgcccttttggctaggtcttcgcaagcgacctcgttaggacgcccttgtttctttttgttgtatagtcggaatgtacgttgtaaatgttagcctaccttact

SEQ ID NO: 10301 - DNA, 1475 bp, Oryza sativa
  ref <308>: DATABASE ACCESSION NUMBER: AK107649
  ref <309>: DATABASE ENTRY DATE: 2002-08-28
ttctacttcgacgccgatggcaccaagtcacccgacgtcgagatcgagcttgagcagccgacgatgatccacgacttcgccatcaccgagaacttcgtggtggtacccgaccaccaggtggtgttcaagctcggcgagatgttccgcggcggctcgccggtggtgctcgacagggagaagacgtcgcggttcggcgtgctccccaagcacgcgacgagctcgttggagatggtgtgggtcgacgtccccgactgcttctgcttccacctgtggaatgcgtgggaggaggccgagtccggcgaggtggtggtggtgggatcctgcatgacgcccgccgactccatcttcaacgagtcggacgaacacctcgagagcgtgctcaccgagatccgcctcaacacgcgcaccggcgagtccacccgccgcgccgtgctgccgccggcggcgcaggtgaacctcgaggtcggcatggtgaaccgcgccatgctcggccggaagacgaggtacgcctacctcgccgtcgccgagccgtggcccaaggtgtccggcttcgccaaggtggacctcgccaccggcgagctcaccaagttcgagtacggcgagggccggttcggcggcgagccgtgcttcgtgcccatgggcggcgccggcgccgccgcgtccccggcgcgcggcgaggacgacggctacatcctctccttcgtccgcgacgaggccgcgggcacatccgagctcctcgtcgtgaacgccgccgacatgaggctggaggccaccgtccagctgccgtcgcgcgtcccctacggcttccacggcaccttcatcaacgccggcgagctcgccacgcaggcctaggcaccggccatccatggattcttgattccttggttcattccaaaacaccttccaatcttcttggagaggagaagaagatgaaaagaaaatttggagggaaaaggctttaccagagggcgccataggcatacataggaggtccccggagcctgaccccaactcatacacaaacacatcatcatcatcatcaaccttaatctcttggttcttttcttgattttaatcactgcattaatcacactagtaagtatagcacattagtagtagtagtagagtgattagggagagactgaggggtggggcccagcttgaagcttttgctttgcttgtacagacagccaaggagagctcagctggtttctgctttgtccctcagtgatagggatagttgcagtgttgtgtatacacagctgctctgcttctgttctgtttctgctctgtaaaactctcttgttatttactgaaggtaaaaccacccagttttctgcaaactgtggtgatgtttggtcactaatcatgtatgcctcaatctccaatttccttcactgtgtatatatatattatatactcttcattcatcactgtatgataatgataataataatgatgatgatgattggtcc

SEQ ID NO: 10302 - DNA, 2766 bp, Oryza sativa
  ref <308>: DATABASE ACCESSION NUMBER: AK107650
  ref <309>: DATABASE ENTRY DATE: 2002-08-28
attctcactctcggccttccttccacggcagcgccacccactgcgccttcgccggcggcggaggaggagggaggtgcggccatgggtcacggtgtcagctgcgcccgcaccggcgacgagcacgacttcttccgggcggcgcagctcggcgacctcgacgccctggccgccctcctcgccgccgacccttccctcgctcgccgcgccaccctctacgaccgcctctccgtcctccacatcgccgccgccaatggccgcatcgaggtgctctccatgttcttggatcgcggggcgccgccggacgcggtgaatcggcacaagcagacgccgctgatgctcgcggccatgcacggcaagatcgactgcgtgctcaagctcctccaggccgacgcaaatatcttgatgttcgactcggtgcacgcgaggacctgcctccaccacgcggcgtactacggccacgtcgactgcctgcaggccatcctcgccgccgcgcagaccacgccggtggccgactcatggggtttcgcccggttcgtcaacgtcagggacgaccacggcgccactccgctgcatctcgcggccaggcaggggcggccggggtgcgtgcaggtgttgctggagaacggcgccattgtgtcggctttgacaggatcatatggcttccctggaagcacgtcgcttcatttggctgctcgtagcgggaacttggattgcatcaggaagctgcttgcctggggagctgatcggctccaaagggattcggctgggagaattccctattctgttgcgctgaaacggaaccatggagcatgtgcagctttgctgaaccctacatcagcagagcccatggtgtggccatccccacttaagttcatcagtgagcttgaaccagaagctaaggctctcctggaagcagctctgatggaagccaacagggagagggagaagaaaatcctgaatggcacaaagtactccctgccatccccttcgcccggtgatgacagtgccgatgacgatgcatgctcagaggtgagcgacacggagctttgctgcatctgcttcgaccaggcttgcaccattgaggtgcaagactgtggacatcaaatgtgtgcaccgtgcacgctggcactgtgctgtcacaacaaacccaatccgacgaccctgacaccgccctcaccggcctgcccattctgccggggcagcatctcacggctggtggtggcccaaacaaggtctgcttgtgatcctgacaagccgtcatccctgcagctcacccggaagcggtcgcgtcgatctcacaacctcagtgagggcagcagcagcttcaaagggctaccttcggccatgggctccttctcaaagcttggccgtggctcgagccgcatggcggacagtgacagcagcaacctggacaagcctgagcacgatctatgaaagcagaacaacgcacggacaatcgccgcatcatcctcaaaacatccgttggtatcagaaacccagatgaaaatccaatggctaatttggagcaactttgatccatggaaagttaaatagatagggactaaataagtagaaccctccactccccattgtctgtgtgcccaccctatttttcggcttgccgggttaagcttagcatatgcataggagctctgaaagaccagagagagagtgagtgagtgagtgagagcaattcatcatcaatcacacagtgagtgttggtgtggttaagggatgcatgcagcagagatgtgaaacggggttcatgttcgtcacctctaaagttagcctgccatggcatgtgagctctgcgccggcctgacccctcctcctctgtgtgatgaatcatgcccccatttttggcccttgtctcgtgttataatggtgcgagttcatgtcctggtgatgctgcagccatcagcagggtggtccattggatcgccatgaattcagcagctgcggtctctgcctatgtgatgacattgtatgtaccgtactccagtgtgtaccggttctttgaactgtggtggcgtgtcactgtctctgtcagtgccactgtccatcgtcgtccggctgttacagccggattgttactgctagtaattggcttccttcgttcgttcgtgatggcatcagcatcagattgtttcttttcttcaggctgataaaatgaagactgttgttgcctgtagctgtatggttgtccttgcgatctgtaccttctcttgtgctcctacctgcagtgatattgtgagatccaggagtagcataatttttctatcgacaaatcataccactacatttcacttggaaagatggacttagcatcataggtttaggtgagactgaggaccaactctgattaacactgaagtctgccgtgtggattgggtttagattgaaagaaattcatggagataacaagaatttttgtggcaaaagctttgttgttatgcagagtttaaggactaggagatgactatatgagacacaagccaagtgctactgtagtttgttttgaccaggacacagcacacaacttggaatttggaaaccttccaagtcatggctgcaattccacgtcaggcttggtgatcgacctagtagttcttttgcttcttgtgacgaactgacgataacacggacagatatttgtgaagctttggccattctatagtccatatgatcactcaagcaaaaaatatcttggtgccacacctcatcatgtgacagaaactaactaataatttcaaagtgcgattaatt

SEQ ID NO: 10303 - DNA, 1620 bp, Oryza sativa
  ref <308>: DATABASE ACCESSION NUMBER: AK107651
  ref <309>: DATABASE ENTRY DATE: 2002-08-28
tggcctggatcgagaatgctacgacattccggcgagaccctggtcttcgtgttgcgaaggacagagtctcgactattggcctcgcagtgccgctcttctcaatctgccatccactcgctcggactgacttaaccccgctggactgttcggctactggttttgtccctgtcggcattctgagggggaataacaggaatgaggcgaccttcgttgctcacgagcaatactgcaactcctgcggaaactcaagttgtggaatttgctcttgatccggcggtcgctgtcgaaaacggcgcagatgcaggtcatgcggacgagcgtcctccggaaggatatggctgggttgtttgcggtgcggtatcgttgatcaatgggttcacatggggtgttgctgcttcctacggcgtctacctctcctactacctctccagctcgcacttccccaccgccacgcccatggactacgctttcatcggcggtctcatcttcggctgcgcgctactcttcagtcccgtctggacgatcctgacgcgtgagctcggccgcaaactcgtcatgaccggcggttgttttctcatggccgcgggcttcgtagccgcgtccttcgccacgcaaccctggcaactgtacctctcgcaaggcgccgcggtgggcacaggcatgggtgcgattttcactcccagcgttcaagtcgtgccgcagtggttcttgcgtcgaagaagtctggcgggtgggattgcgagcgccgggagtgggtttggaggtatcgcgtttgctcttgcgacggatgcgatgattcgccaactatctctcgcttggtcgctacggatcacaggaatctgctgtcttattggcaatttgattggaacggcgttgatacgcgatcgaaacgcccagattaagccaccacagctgggcttcgcgacccatttgctcaagcggtacgattgcttgctgctactcgcctgggcgttcaccaatatcctggggtacatcgtgattctgtatagcgtgtcgagctacgcggtgcaagtcgctggtcttacgcagaagcaagccggtatcctgacggccatgctcaacttaggtactggcattggcagacctgcggcagggctggtgtctgaccgatttggtagaatacaggtggcggcatacattacgctagcttgcgctatctcggtgttcgcgatctggatcccggcgacgtcgtatggcgtgttgattttcttttcgcttgtcagcggagcgatattgggtgtgtactggacgtgcgtcggtcccttgtgcgccgagatcgcgggtttgaaagaagtgccttctttcctttctctgcattggctgacggtcgtgcttccaaccactttcgccgaggtgatcgcactgtatttgcgccggcctgatatgggccgctggggctatttgtacacgcagcttttcaccgggttcgcgtatcttgtggcggccggcttcttgtttgaattgtggcgagtgaagagggtggagaagcttgatagaggccgggaacttgggaggctgggcgagtggatgtacagatatcggccttgaggtgtgaggacggcaagacggttatacaggaacctaacccttcaccgcctg

SEQ ID NO: 10304 - DNA, 2064 bp, Oryza sativa
  ref <308>: DATABASE ACCESSION NUMBER: AK107652
  ref <309>: DATABASE ENTRY DATE: 2002-08-28
gctttttgaacttcatcacgctcccccccccgtctcatctcgatctatcgctcgcaggtcttccccagtcacttttccaacgtatcgataccacactcactctctcccccacacacacatcccacaatgtctcgcgtcgtcgtcgtcggcggtggtctctccggcctcagtgccgctcacactctctacgagcgcggtgccaatgtgctcgtcctcgacaagaaccccttcttcggcggtaactcgaccaaggcaacctccggtatcaacggcgccggcaccaccacccaggccgagcagggcatcccagattccgccaagaccttctttgaggacaccaaaaagtcggctcgtgaccttgcccgcgacgacctcatcaaggtgctcaccggcaagtccggcgaggccgtcaactggctcatggaccgcttcgacctcgacctcagcaaggtctcgcgtctcggcggtcactcgcagccccgtacccaccgtggcggcgcccagttccccggcatgaccatcacctacgctcagatggagaagctcgaggacctcgcagaggcagagcccgaccgcatccagatcctccgcaaggcacgcgtcaccaagctcatccaccagaacggcgaggtcaccggcgtcgagtacgagtaccagggacagacccacaaggaggacggccccgtcgtcctcgccaccggcggctacgcagccgactttgacgacgtcaactcgctcctcaagaagtaccgccccgacctcgtccacctccccaccaccaacggcgaccactgcaccggtgacggccagaagatggtcgcctccattggcggtcgtctcatcgacctcgagaaggttcaggtccaccccaccggtctcgtcgaccccaaggaacccgacgccaaggtcaagttcctcgccgcagaggccctccgtggctgcggtggtctgctcatcgacaacgagggcaaccgtttcgccgacgagctcggccaccgtgactacgtcaccggccgcatgtgggacaacaacaagttccccgtgcgcctcatcctcaacgagcaggcctccaaggagatcgagtggcactgcaagcactacgccggccgtggcctcatgaagcgcttcgacagcggtgacgacctcgcaaaggagatgggcatccccgccgacaagctcaagagcaccttccaggactacgaggccatcgcaaagggcgaaaagaagtgcccatggggcaagaagttcttctccaactcggacctccgcatgaaccaggccttctacgtcgctctcatgacccccgtgctccactacaccatgggtggtctcgagatcgaccccgagtcgcgcgtcatcgacagccagggcaagcccatccccggtctcttcgcctgcggtgagatcgccggtggtgtccacggcgccaaccgtctcggcggttcgtcgctcctcggctgtgtcgtcttcggccgtgtggccggtgactcggcctcgagctacctgctgcgcaaccttgccacgggcaaggccaccgcccgtctcggccagattgccaaccacctcgagacgcgcgttcgcgccgaccccaactccaagaccatcacgctcgagttcggctttggcgacggcgcctcgtcggcctcgagcgtgcagcagcagaactctgcgcagcctgccgccgtggcccagggccagcccgctcagacggacaaggcggtgcagcagtccggcagcgccgctgctgcgcagcagaccatcgaggagaaggagtacactatggacgaggtcgcaagcacaccaccggagacgacgtctgggtcgtcgtcgagggccaggtgctcaacgtctcgggcttcctcgatgaccacccgggcggaaagaaggcccttatgctctacgccggccgcgacgccaccgaggagttcctcatgctccacgaccgcaaggtcatccagaagtacgcggccgacaccgtcattggccgtgtcaaggcttgatctcccccttccattgttgattgatgttccggccgatgtggcaacaaattcatgatttgcctcc

SEQ ID NO: 10305 - DNA, 2552 bp, Oryza sativa
  ref <308>: DATABASE ACCESSION NUMBER: AK107653
  ref <309>: DATABASE ENTRY DATE: 2002-08-28
atacatctcggaagccttccgctcatcctcgtcacactcttcggcgcttccgacgaggcggtggctgctgcgctgctgctcattcgtgcgccaggatgagcgctcccaactccgcgccggatcgcagcgtatctgggcaatcgccatccactgcccgatccaccaccgccaacgcatccgcagtgcatttccaaaccgacgaggctgccgatgcctctctcgatagcatcgctccatccttcaacgagccggcaagcgacgatgggcccgaagtcagctccgatgacggtcagggctacgatcactacaacacctccttcaccaatccggagcgaaggtcgagctcgtttggcatcgcaaccccatcccacggcttcccctcatcctccgcctacaactacaaggccatgatcagcaaacacggtcatggattcccagagagagccgagtccgtccgcaacatctccgccctcgccaacctcgtcgactaccgctccaactactttgaagatcacaggctctcggaagaggagatcaagcaccgcacaaagcatctcggatggtccaaggcagccgccgtatccgaatactacgaacgcctcaacgagacactcgacggatggagagaggtcgacgagatcctcgactcgcgcttcccagacgaagtcatgcgtcgcttcctccaccaggaccaaatcgccgcaaagaacaaacgtcgcaaccaccaccaatccgctgcaaagcacaagcgtcgcaacaaacaagccagcaacaacggtcactgcgaacaacccgaaagcgacggcaatgtctcggacgaagaagaaacagaagaggaggatctccgccgcaacaagcgttccatcaagcgcagcttcagcgcaaaggccatcgacgctttcagcggcctctggtttgggtcctcgtccagcccacgcatgagcgacggcaggcgagatctcgaacaagctcgtcagccacgttcctcttcaaggacccgtcaagcatctagacccaagcccttcgacctcaactcggccaccgaagaggaagaagaagacgatcacaacgatcgcgctcgtgctccaactcgacagctcctctcttcctcacctagcgccaccgacgacatccgaaagacctcggcacgcaacgactacggcgccacctcggcctcctctgccgggcagctcttcgacaagcttcgtcgcgagggccgcatcgagcagatccgtcgttccgagtcccagctcgccctcgcttccggcgccaactcgccagctcccgccagcggcacacaaacgccccaggaagccatctcgtcctcaggctccaaagccaacaccatcaggccttcacgtgtcgactccatctctgaacacgccgatcccgccgccaagtcagccagtgcggacaaacatcgatccagcatgaatcgagacccgagcatcgaacgctaccaccgtccctacgcttcccaagaagaagagaggcaggcgctcctcagcaccgttcccagccgtgcaaaggaggaagagacctcgcgctccgtccagtttgccatcaacatcaacctcctcatcaacatcctcctcctcgcaggcaagggcgtcgccgtgctctcctccaactcggtctcgctcatcgcctcgttcgtcgacagcgctctcgatctcctctccaccatcatcatctttgccacatccaaggccatcgcctactgctcctggaagaccatctacgagtaccccgtcggcaaacagcgtctcgagcccctcggcgtcgttatcttttccgtactcatgatcgcctccttcgtacaagtctttatcgagtccgtcggcaggctgcgcgaggtgctcgccacgggcagtgaggattccgagtccgccgccagtctgccgctcatcggcgtcgccttcatgctcgccaccatcggcatcaagaccgtcatgtggctcttataccgctcctccaaatcctccggtgtacgcgccgtctcccaggatgccgagaacgacgtcgtcttcaacatcgcctcgctcatctttcccatcgtcggctcgcgcctgggctggcctgcgctcgaccccatcggaggtatcgcgctctccatctacatcatctacgagtggatcgagacgctctgggagaccgtctccaagctgtcgggcgccgtcgcttccgccaccgaaatctcaaagtgtctctactgcgtcgtccgcttcaactcggtcaacagcgtatccgcctttgagctcttccactcgggcgacaacctcatcgtcgaggccgacatcgtcctgccccactccatctcgctcaaagagtcgcacgacctcggagagatcatcacctactgcaccgaaaacatcaccggcgtagaacgctcctacatccacctcgactacaatcccaagggtcaagccggccatctcacccagcggggatagcccctccatcccaccttcctttcccttcgaattattcccacagagccactagattgatacggacggtaatacagattgcagcaccagtatgcacgcatg

SEQ ID NO: 10306 - DNA, 1114 bp, Oryza sativa
  ref <308>: DATABASE ACCESSION NUMBER: AK107654
  ref <309>: DATABASE ENTRY DATE: 2002-08-28
acgtccgatcatacatactctcgatccgccggagcaccaccggagtaagcattaccactactactacgagctagcttgccggaggaaacagggcacggagggatagaggtagccatggcgcagccgcagccgcagagaatggaggaccagctgcaatcccaggcccagggccagggccagggccagacggaggccatcaagtacggccacgtgttcgccgtcacgggcgagctcgccggccagcccatcgcgccgcgggacgccgccgcgatgcgctccgccgaggagagcgtgccgggcgtccccgtcccgcaggatatcggcgggggctacagcgccggggtcgccatggagacggccgccgcgtacaaccaggccgtcgccgccgttcgtcccggccaggccagcgacgccgccaccaaccagggcatcgccgtcacccagacctccgtgcccggcggccgcatcatcaccgagttcgtcgccggccaggtggtggggcagtactccgtcgccgaccaggcggtggagcaggacgcgaccaagataaccgtgggcgaggcgctggaggcgacggcgctggccgcgggcgaacgtccggtggacaggacggacgtggaggccatccgcgcggcggagatggcggcgcaagggtccgacgtgaccatgcccggcggcctcgccgaccaggcgcaggcggcggcgcgctccaacgccgacgccgaccgcgacgacgacaagatcacggtgggcgatgtcctcacggacgcgacggcgaagctggcgggggacaaggtggcgggggcagaggacgcggcgaaggttgtgcaggcggagacgtacagcgacgccgcagcgcggaccagggccggcggggtgggcgccgcggtgtccacggcggcgaggctcaaccaagccgacgacgacgccgatgacgacgctgagtgaaccagtcccctgtacttttttgtggtatcactgtgccggcccgtacacagctagtgcgtgtccctgtaccttttgcgtgtgtatatgctgcagtcagatgagtcaagcgtgtgatgtcacctgttgctgtggacacaaataaagaagcgagtgtggtggtgtttcc

SEQ ID NO: 10307 - DNA, 1724 bp, Oryza sativa
  ref <308>: DATABASE ACCESSION NUMBER: AK107655
  ref <309>: DATABASE ENTRY DATE: 2002-08-28
acgaaacaacaagaacacacctcacccaagaacaacacatcaccaatactcctcaccatggcgtctcctacagccaccactggcggccagtcccagattcccacccgtaccctcaccaacactaccgatggcgacgatgccatccccgacgaggacagcagcgagaccaccaagctgttccacgagcgtttgcaggcatggaagcacgcttgcggctacatcgaggactacattaccgcaacggagaagatgcaccaccagcactccaaggagtacgagaaggtcctcaagactgtcagcaacccattgaaggagggccaccacttcgaccagactctcggcggtgtcgctggtctcttcgacaacatccgcagcaacacccagggcatggcaacctcacatggcgagacggccaagacccttaagggatctattctccctgtctttgaacgtctgcacactgagatcaagaacaagacgaaggagctcaccaagggtgctggcaagggtgcgaaggcagtggataaggcccgcaacacatcacagaagcacatcgagcttcttggcaaacacactgccgcatttgatgcctcctcgggtgcggtcaagtctcacgaagatccttacatcctgcagcgccaggtctaccatcgcctgagcaagcaggtgctcgaggagaacaacaaccgcgatgacatgctttcggtccagaaccacttcgcacagtttgaggcacacgtcgtccagactttccagaacggccttgctcagttcaactccatcatgcagaaccagaccgagctgacccgcaacgcctacggcgacatgatcggtgtggcccagcgcatcactcccgacttcgagtggaacggcttcgtcaagcgcaacaaccaccttctcatcgaccctcaggcacccaagcgtgctgtcgagcacattgcctttgccaaccaggaccaccgctccacccagcccctcattgctggctcgctcgagcgcaagggcaagatcatgagctcgtactctacttccttctacgctgtgacaccatccaagtacctgcacgagttcaagaccgacgatgacttcgccaaggagcctcaacccgagacctctttgtacttgcccgactgcctcattggtgccgttgacggcgtcaagttcaacattaagggtaagaactcgagcaagggcgtgctttccaagatgagcatgggccacgagtaccacttcagggcacacactccccaggatgcccagaagtggcacgatgtcatttctagcgttgtcggccagaccaccaacgaactgccggtctcgcctgtgagccctggcaccgagcaagcccaccagaccttcccaacaagtgagactggcactgttggcgccgctggtactggcgccgctgctgcatctactctgcccgagaagagcgctgccgagccaggcttgtcatcgtatgaaagggaagctcagcagcaggcggagatgacgcccagcactgccactactggcaccgttccgtcgactactggctacccccctgagaagggtgtcagtggtactggcgagaaggttatttgaaggaacatacaagagaagagtgcttccatgcgtcagaaaagattggtctccagcggcatgaattgatgaaatgatgcgatgcaagctacgcgatatgcctatgtagaggcttaataatacccgttttgttatgacaagtg

SEQ ID NO: 10308 - DNA, 4238 bp, Oryza sativa
  ref <308>: DATABASE ACCESSION NUMBER: AK107656
  ref <309>: DATABASE ENTRY DATE: 2002-08-28
atcttcacccattcatagaccgaatctgcatctcgctgttatacccgcctgttcgcttctgggacctctacgataaggtcacgacatcagacgccttggcgccaagccatgtcatcctccgcctagacttctagatcaaccgaggcttgtccattgacccagtccgtgcgacagaccgacgcggtgattagaggacatgagcgaccttcggatccatgcagcgctgtcgccgcgcgtggcagtgctctcgagtcccgatgtggaccgggtgatccagttcaacggcatcccggatctgtcgacgctgctgcggccgttcgagttctcggtggagcggctgtcggtgcgcacctcgcagctcgagacgcgcgtctgcgatcgcttcccgctccgcttcgatccgtactcgatgttcaacgctcaggctgcgcgtgcggtcaatccggcagaagagctgctcgaccaggtcaaccagttgatcgccaccaacatcaaaaagtgggatgctcaggtcccaaagccgaatgcagctgggcagcagcaccacacaggatcggacaatgcgttcaacgagcttgacgacaaggaagcagcagggaaagcactggaagaaacgctggccaagctgcagcgaggctcgctcgaagagacaacgccgtggttcgctgccgtccagcagctggtgtttagccaaagacccgtttgcaagcacgaaacattcggacatccggtcgcggtgcttctggcggtgtcgtccgcatcgccggatccgatgaacgactttgccaagctgtacgaagtcacctcgcaggcgtcgccgttcgccgctcagcccttcatcaacacggacgtgctcaagtactacgttctcatccatgacgtgcgcacgtccggccccgacctgagcagctcaaaggagatgctcgagcagatcaagaagacgtacggcctgcactgctgcctgctggccatcaacagtgctccggacgataggcctgctgcgcccgccaagctggctgcgctttggtcgccctacctgtcgaccttgccaacttcgccgaatccgatgagcccaccgggtgatccgacgcgcgccaatctggctgctgtgctggacgaggaggacgtgaagcggatcaaaggctttatccgcgagttgaccgcgcagtcgatcgtgccgttcatggagcgctatgtgcagcacatgggcgagcatctggccaattcgcggcgcggactgaccaaccggctgttcggtgcgtcgcgcaagctgtacggcggcgtcggtgtgggtggctcgagcgacaagagcggcagcggctcctcgacgcccggtgggcttgcgacttcgggcgggtacgatgcgcaaaacgagtggtatccgtacacctcgattgaggcgcagacgcggcgtctggcggatttcgcctttaccatccgcgactacaagctggctgcgtccatgtacgacctgggccgcaaggactttgcgggcgacaaggcgcacaggcactctgcagcggcgaccgagatgtttgggctgtcgcatctgatgatcatgtacacggcacgcagtgcgcccatcgatgtggacagctaccttgcgcaggcgtgtcaggagtacactctgcgatcggcggcgcgtgcagcgcccgcgatggacgagaacaacgctctgcgcgccacgctgctgtactacgaggcctaccggatgctgggctatctgcgaccggctccggcggggctgctgcgcatgtcgcagcgctcggacgaggtgctggcgccgctgttgctcgagcaggcggcgctggcgtgtttgcagctaaggccgcgtgcggcgctgcgcaagtatgcgctgcatctcgtcatggccgcgcacaagtaccaggcgtgcgggcagaaggcgctctcgttacgctgctatgcaaatgccgccgtcgtgtaccgcgacaagggctggacgctggtcgagaaccacatcgaacacgagctcggtatgcaggcgtacaacgatggcgattcggacaccgcgctcgcgcacctcgtgcgcctcgtccgttccagcgccaactcgagtgtagagcacgacacgttcctcaaagcggtccagacggcgtacaagtactcggcgcgcgcgggagagcagccagactccatcccaggcgcggctgcaaccgccttggccctgcccgtgcccatgttcgatgcggcgtcggcgtcgctgcggttcgtgcccgagtcgagcgcctcggcgacgtcggcggtggacgaggaggtgtgggagcggctggaggagcaactagtggcgagtgggttgggcgagcgaacgcatgcagacgggtcgaagagcagacgcaagaggccgacgagcgaaacatcgacgcaggcgagagaggtgcccgtcggccagacgttctggctcgagatagcactgcacaatccgctcggcgttgaacttgctgtcgaccacatccaccctgtgctcaagcacgacactcgagaacaagacgatttcagcgacgtggagacggaggatccggggcggatggtgctgggcgcctttgagcatcgacggatcagcgttgcgatgcgagcgaacaaagaggccaaggcgctgcgcgtggccagcgtgacgttccggctggcggatgcgatcggactcgtgcagccgctggtgaaaaaggggcagcggctgaatgcgaccaaggagcagcgggcggcggtggtgtatgggcgcgagctgagcttggcggtgtcagttcatgcggcgcgcccgactctgactgcacgcatcgtgtatgcacccgcgcacatgctgctcggcgagcaggcgcggctcaaagtggtgttcaagaacgagggcggcgcgccgatcgaggacgtgcgtgcgctgtgcgaccaaccggaactggcgaccttcgacggcgtgccttccagcgcagaggacacgacgatggcgaatcacatggacccggcgggtccggaggatgtactgggcagcgggcagcttatgccgggcgaggaggtggagcggtggctgatggtgcggcccaaccgaacaggcgcggtgagcatcgcatggctgctgccgttctcgtctggcgatggcgagacgtatctatcgcggctagcgctgtcaatcaaggtgtctgcggcgctgcagatcaacgtcaccacggaaccggagcgcagcacggtatgcaggcacgtggtgacggtcgaggcgacgaatcggctgagcagcgacgagatccgcgtggatgcactgtctctgctcggacccggctggaagctcgcgaagtcgtctgcgatgccgcaaagtgtggtgattgcgccgctgcaggtgtggcgcgagcaggtgttggtggaagccgcgagcgccgagggtggcatggacgagtacacggccaccaggctgcaggatgtgttgctgagccgagacacgcggcgtgcacgtgcggccggcgtgaagctacacctcacccgcgtcgcatatgcttccgagtgggatggattgatgctgggactgcatcgggaggctcgcaaggtgtggcgtagccggtggcttggtgctgcattcccgacgctgggtgcacgcgaccggcgcgacgccttcacgctgtgggagccacgcgaccttgacgtggtggtgcactttacgctccggtcgcgcaccgagagcagcgcgcattgcggtcaggtggcggtatacgggcttcaccccggcccgctgcgcagtcagatccgggccatcacgcatcctcgcttggagcagggtgcgggcaaagcggcggtgcgcagtctgtacgccgagacgatcaaagagaaagcgacggtgctggccaacatcctagcgagccgactcaacgccgatcaaaacccggccgtgatccacgccacgctcgcttccacggaggacaacgacgaagcggagaggaggtaccgctttgtggtgcgcaacttctccgacttgtacagcgtcaaggtggcgatccaactgcacgacgacacggacgcagacggagcgaggtggacggggcgcaagacgctgcgctgtgccctggcgagcggggcggtggccgagctaattgcgacgcgcagcgagacgccaggcgtgcatggcgtgcggtacggcgttgtagcggagacgtacggcgccgacggtgtgctcatcgcgcgctacatcgagcagcactagccatgccataccaatgccaatctggacgtgcgtgtggggt

SEQ ID NO: 10309 - DNA, 1458 bp, Oryza sativa
  ref <308>: DATABASE ACCESSION NUMBER: AK107657
  ref <309>: DATABASE ENTRY DATE: 2002-08-28
gagtcgcaggcggtggggcccatggcgtcgtcgtcgccgccgtggctgctgctcccctccttcccctggcctcccccgccccctcccggctcctcctccggccgcggcggcggaggaggcggcggcggggaccccggcgactggaagccgaacgtcgtcgcggcgttcgccggcgcccaactcggccgcgccctccgccgtcgcctcgccggcctcctccgctcgccggaggcgcgacatcttggtgccttgccgagaataggtgacatttggtttgaaggatcagactcattcgccacacactcgattcttggagtgttggagaatgcgctctccgcaccatatgcttgcagctctgttttgttcaatggaaatggatcggacaggaggtacatcggtagggggaagttgccatccagaaggccaagtggaatcaattcgaagaagaggctttggactaatattcttcttgctgttaatattctggcttatgtcgctcagataactacacaaggacgattacttatatggggggctaagatcaacagtatgattgatagaggagaactctggcgtctggctacatcatctcttcttcatgcaaatcttgctcatcttgctttcaactgtttttctttaaattcaattggacctatggtggaaatgcttactggtcctagaagatatcttgccgtgtatttcacttcggctctggcaggttcattaatgagttatcgctattgtgcgtctcctgcggttggtgcgtcaggggccatttttggattggttggtgcctatgctgtttatacgtggaggcataggagatttttggggcatggaaaggaaagtttagagcatattggacgcgttgttatcttgaatatgggtatgggtctccttacaaggggcattgataactggggccatttgggaggcttgctcggaggcatggctatggcatggttcctcggtccagcttggcaatatcaatatgtgtcaaaggacggaagagcggtgttcaaagacgatgcccctattctccaactaagcaacgggaaatggttgaggtagaattttgtatttaaaacggattcctaacttgtgtgggacacagaaattgaagactgaagagaggtggggtttgacactgccattctgccaaggtgatggagtggacgcctagtttggactttggaaagctatttccagggaaactccagctccaaatcttacgcaagggcgacatttgagttcacctgagtcattatttttggatataagttgcaattgtctactgtgacagattatagctaatcaatactcaaatagtcaccacagcaattgtatttaacatgcttatcagtgttactggagcccaactggcacggtgtacatgaatccatatttgatacagctaactataggctcaagtgtatcaatctatttatttttggggtg

SEQ ID NO: 10310 - DNA, 1891 bp, Oryza sativa
  ref <308>: DATABASE ACCESSION NUMBER: AK107658
  ref <309>: DATABASE ENTRY DATE: 2002-08-28
caggcccttgctgagcaccgtctctcgatggtcggcgccactggtgccaagggcctcatcaagaacgctcgtacctttgccatcgccgtcttcgcctccatgggcggtctgatctacggttacaaccagggcatgttcggtcagatcctgagcatgcactccttccaggaggcatcaggcgtcaagggtatcaccaaccctaccctcggtggcttcatcactgccattctcgagctcggtgccttcgtcggcgtgctcatgaacggttacgtttcggacgcgttcggtcgacgaaagtgcgttctcttcggtctcgcatggttccttctcggctgcatcatccaggcttccaccaccggcggctcttacgacttcatcaccgccggccgcgccattgtgggcgtgggaatcggttcactctccatgattgtgcccctttacaatgcggaacttgctccccccgagatccgtggtgccctcgtcgcccttcagcagcttgctatcgtcgcaggagtgatgattagcttctggttcacctatggcaccaactttatcggtggcaccggtgcaggacagagccgcgctgcatggttgatccccgtcaccgtccagatcctccccgccctcatcctcggtgtcggtatcttctggcttcccgagtcgccacgttggctcatcgacgttggccgcgagcaggagtcgcttgccatcatcgctagccttcgtcgccttcccgagtcggacctcctcgtccagatggagttcctcgaggtcaaggcccagaagctcttcgaggaccgcgtctctgcgcacgactaccccgatctccaggacggctcccgatcttccaacttcaagctcggccttgctggttacaagtcgctcttcaccaacccggccaaccttcgaaggaccctcgtcgccatcttgatcatgctcttccagcagtggacgggcatcaacttcatcctctactacgcccccttcatcttcaagcagatcggcctctcgggcaacaccatctcgctccttgcctctggtgttgtcggtatcgtcctcttcctcgccaccatccctgccgtcctctacatcgactcctggggacgcaagcccacgctgcttgccggcgctatcatcatgggtatctgtcatctgtcagttgccatcatcatcgctcgctgcggtggcgactggcccgcgcaccgtgctgccggttgggttgcttgcgccttcgtctggatctttgctgctggcttcggcttcagttggggaccttgcggttggatcatcgttgccgaggtcttccctctcggtctgcgtgctaagggtgtctcgatcggtgcggcttccaactggctcaacaactttgccgtcgccatgtcgacgcccgacttcatcaccgctgccccttacggtgtcttcatcttcctcggagtcatctgctttgtctcggtggcttacgtcaagttcttcgtgcccgagaccaagcttaagacgctcgatgagctcgatgccgtctttggcgacaactcgggcaggtcccagtgggaggccggcatcatgctccaggcccagcgcgacgttggtctgctccgcctcgccggcatcgaggagcccaagggtgtccacggagacaacgtctcggatgacgtcgacgagaagggctccgacatccactctgatggtgaggtcaagaaggagggccacaccgtcgtctccaccgcctagataggcattcgcaaggcgaaaataccccccctttctcaaactttgtctcgctcatccgcgtgtctcatggtgtatggatagcacgttcgggacgtgctcggtttaagccttttgtatctcttaccgtctcgacccgatgctgcaattgtgttcttttacttgg

SEQ ID NO: 10311 - DNA, 1440 bp, Oryza sativa
  ref <308>: DATABASE ACCESSION NUMBER: AK107659
  ref <309>: DATABASE ENTRY DATE: 2002-08-28
caggtcaagaacgtcatcgccgccgcccacaaggcgcagcgccagtttgcccgcgtgcccgccgccacccgcggcgccgtgatgaaggacatctgcgcagcctacatccaccacaaggacgccctcggggctctcatctcctacgagatgggcaaggtgctctccgagggcaagggcgaggtccaggaggtcatcgacgtcgccgacatggccgtcggcctctcgcgctccatccagggaagcgtcctcccctcggagcgtcccggtcacctcatctacgagatccccaacccgctcggcctcgtcggcgtcatcaccgccttcaacttccccgtcgccgtccacggctggaacttctgcctctcgtttgtctgcggcaacgccaccctctggaagcccagccccaccacgccgctcaccgccatcgcaaccaccaagctcatcgtcgacgtcctcaagaagcacaacctccccactgcactcgccgcgctcgtctgtggcgatgtcgagaccggtcagaccctcacccgtgacgagcgcatccagctcaccagcttcaccggctccgaacacatcggcaagctcgtcgcacaggacgtcgccgctcgcctcggcaagatcctcctcgagctcggcggcaacaacgccgccattgtgctcgacgacgcagacctcgagctcgccgtccccgccgtcgcctttgctgctgtcggcaccgccggccagcgatgcaccaccacccgccgtctcttgctgcagcgcaacgtcgcagacaagttcctcgagcgcctcgtcaagttctacacctcgcttcaatccaagggtctcattggcgaccccaccgactcgtcggtgctctgcggcccgctccactcgcagcgtgccgtcacaaaatactgggagacactcgacaccatccgctcctcgggcggcaagatcctctttggtcccgactcgccctcctcgcccggcctcgcctcgcacctcgtcgagagcaagggcaactacgtgcttcccgccatcaccatgcctgcatccagcaccgacaaggtcttccaggaggaagtatttgcccccatcctcaacgtggctgtctttgacacgctcgacgaggccatcgagctcaacaactcggtgcgccagggtctgtccagcagcctcttcaccaccaagctcaccaacattggcgagtggcagggcgccctcggcagcgactgcggcattgtcaacgtcaatgtcagcacctcgggtgcagaggtcggcgccggattcggaggcaacaaggcgactggatggggtagggagtgcggcggcgacgcatggaagcagtactgccgctgggccaccagcaccgtcaactactcgtcccaggtcgccctcgcccagggcgtcaagtttgatgcgtaggtcgtagtgttaatgtgaaagtcataatccttg

SEQ ID NO: 10312 - DNA, 1565 bp, Oryza sativa
  ref <308>: DATABASE ACCESSION NUMBER: AK107660
  ref <309>: DATABASE ENTRY DATE: 2002-08-28
gcaagcaaacaacacaacaccacctgcaaaactgcacttctctgctctcatctctgcatccatggcactcactactttcttcagagaagggttcttgatggagctcttatctgcaattcttggcgattttgtcagcagatcaataaccttcatgatcgacaggtacccgaagcagcggccatcggtcgatgaaaatcttcagaggctgcaccatctccttgtgcggatccgcaccgtcgtcgaggaagctgagcagcggcatgtcacgaaccatgggatgatccgtcagctcgagctgctcagggagcagatgttcagaggccactgcgttcttgacgccttcagattcagagatgaggaggaggacgaggtaacaccacgttttgctctgtccaaattcaaccgggctaagcgtatccgcttctctgacagcagcagcaacactcaaattcagacaagaagcacgaacgatctgcatcagactgtcactagcctcgagagaatcatcggtgacaccaaggaattcgtcgtgttcttgatgagctatcctcctgtgtatcgccagccttacagcacgcatctgtacctggatggatgcatgttcaaccgtcaaatggagagagaaaatgccatcagcttcctgctgcagagagagcctcttgcagttgcagaagaaattgttcaggttttgccggttgttggcccggaattcgtcgggaagagcactctcgttgaacatatctgccgtgatcagagagtgcgtgaacacttctctctcatcttgtattacagtggagatgatctgagatatgagaaggcagaaactttcagtgaaatttgtcaaaccaagcatcgaaatgaatcaaacgatgccatggatggaagattgctgcttatcattgagctcttaggagatgttgatgaaagaacactcaagaaaatccactcttctttcagaaagcaaatgacacatgagatcaaaatcatgatcacaagccgatcagagaagatcatcaggttgggagccaaacaagctctgaggctgaatttcctgccattcgaagcctactggtacttcttcaaggttcttgcatttggagccacagacccagagcagcatccaaagcttgcatccatggcgatggagatcgcgacagtgctaagaggctgcttcttgtgtgtacacatcggaggagctctactgaaagccaatttcaactccaaattctggagcaggtttgttgcgttcgtcagagagtacagagacgaaattaactcccttatgccttgtgattgccaggatcatcctaagttcggttgggtaattgtgagacctaaacctgaaaattactttgtactgcgtgatagctaccagaaggctcttgttgaagatgatggtccaaagattaagctggttgatttgctgtctggacgcgtcaggcgccgagggaaattcgaggttttggtgtggaaatctcggattcctccttattacagctacatatcaaattgtgttatgtactaggttaaatgacatgtggttcaggctttcagtaggttggtgc

SEQ ID NO: 10313 - DNA, 839 bp, Oryza sativa
  ref <308>: DATABASE ACCESSION NUMBER: AK107661
  ref <309>: DATABASE ENTRY DATE: 2002-08-28
accacaaccgtcaagaaacatattgtcaagatgtccctccagcaggcaaacccatacatcgttgacggcaagggacacctcctcggtcgtctcgccgccaccctggccaaggagctcctctccggccagaaggtcgttgttgtgcgatccgagctcatcaacgtctcgggctcgttcttccgcaacaagctgaagtaccacgcttacctgcacaagcgccacctggtcaaccccaagaaggccggtcccttccaccaccgcgctccctcgcgcatcctctacaaggccatccgaggcatgcttccccacaagaccgcccgtggtgccgccgctctccagcgcctgaaggtctacgagggtgtcccccctccctacgaccgcaagaagctgatggtcatccccgccgctctccgcgtcctccgcctcaagcccggccgcaagttcgccacgatcaagcgcatctcgcacgaggtcggctggaaccacatggagaccgtcgacaagctcgaggccaagcgcaaggtcaagcagcaggcttaccacgagcgccaggtcgccgcttccaagaagcgcgccgccgcccagaccgccaccgccgacaagctcaaggacgtcaacgcccagcttgcctcgtacggttactaagcgcccgtgctctcgtagccgaggccgtgcggaaccgtgcatgctgcaaactgcaatccttgacccttcattgctagccaccttgtacttcatactctcttccctgccgtttatacggtgcatcacccatagtcctcctccttcgcattcacaggactcaaaagcgctcaccgcaatgcccagacattacacag

SEQ ID NO: 10314 - DNA, 1212 bp, Oryza sativa
  ref <308>: DATABASE ACCESSION NUMBER: AK107662
  ref <309>: DATABASE ENTRY DATE: 2002-08-28
ctcttcacttggttggcggcggcgctgcgggagctagtagtagatcaagctagggtttggatcgagatggcggggaggggtgggatggtggagtgggaggtggggcggcggcgggattcggaggacgtgatcgtgctgtcgccggggccgccggcgaggaggcggccaccgccggtgaaggcggtggagccggagtccggcgggttcgcgtacgagccgccggagaagctgttctacaagacgagggtgtgcgagacgttcgtgaccagcggccggtgcatgttcgaggacggctgcacgttcgcccacggcgacgaggagctccgcccctcgctcaccgcgtgcgccggcggctggaggaagccttcgccgtcgttgtcggcggcggcgcctcccgtggcggtggcgccgacgcctccgccggcgcaggtcgtgcacgagctcctcgccaggggatccggctccggcggcggcggccaccgcgccatcaccaaggtgtgcttcgagttcagggacaagggcatctgctatttcggggagacctgcgccttcccccacgtctccgctgcagagatccgccagggctcaaggctgtcgtcgatgtcgtcgtcgtcgtgggagatgccggcacggaggagcgtggcggtgaccgtgcccaggacgttcgtctccgtgccgccggtggcgccgccgccgccgccgccccactaccgtgtcaacaacagcagcagctacaacgcggcatccatggccgccgcggcgcccgccgccagcgacgccaaccttgtcgcccagcagccgccgccggagcagggaggccggaagatgacccgcctggagatgctcagcctcaagaagatgaccggcatctacggcgactggctcgaggggtatgagcatccataaaccaatcgtcgatctctcgctcgccatgattgatcgagctccacctgccaattgccatgccatgcatcgatcgatcgtttcgcgttgctaccttagctcatcgatcgtcgtcaagaaccagaacaattttatatttgatttattttccaaatctgctcccaaaccgaacattgatcttgtcattttaccatccgtgtctgtcggactcatgtctgtatgtgtcttaaactgttgttgaattctgtgcgtgtaagcagacctgcattgccgtcgtgtcgtaagaactggaacaattttatctttgtg

SEQ ID NO: 10315 - DNA, 1756 bp, Oryza sativa
  ref <308>: DATABASE ACCESSION NUMBER: AK107663
  ref <309>: DATABASE ENTRY DATE: 2002-08-28
atcaaccagccagctggagcagttggaggctgtggcgggcgtcaaaggtcatggcacgctttccgacggcggctccgattcgggtggtgctcttcgacgcctttgatacgctcgtcacgccgcgggccgctcctcatctccagtatgccgccgtggcgcgcgagcacggcctcgacgtggcggacagcgacgtaaaggctgccttcaagcaggcctttcgcatcactgccaccgagcaccccaactacggcttggagactgacatcgcatcgcccgaccattggtgggcgctcgtgatccagcgcacctttaccccccacctccaccctgccgtgtcggagcagcagtacgcggcaaccatcgattcgctctcccaccgtctcgtcacccgctttggcacttcgcaggcttaccgccttttcgaggatgtcgttcccacgctggagcgcttagcccagatgcgggcccgcgacgaccggcccgtcacgctcatgttggcgaccaacagcgactctcgcatccttggcgtgctcaagagctttggtctcgaccgcttcctgaacttggatgtcgacggatccgcatctgctgcgcaatcctctgctggccctgtgttgtcgtactttgaaaagtgcgccaagcccgattcgcgtttcttccaggctgccctgcagcgagctgcaacccaccgggacgagtccgttccgcccatcaatgcgctatacgtcggcgaccagctccatgaggatttctggggtgccacaacggcaggactccaagctgcctggctgcaacgatccacgggtgccgaaagcaaccagccccaccagcaagtggaccgcgctcgagacgacccacacgacctcgaatatgcgcatcaaagaaccatcaccagccttgctgatgtggtcggcattgtcgagagctcactcaaagccacataggcaccgctggctgcatcgaaagcagcgcggcagcagaacgcggaacgacagacaaaagtttcattcggcacagccgcgtgaaaggcatgagcagagtaccagctcaggctcgcgaactacaaagacagttcggacgcagctgcaagatggccacctggaggagctccgtctagccatggaagtgcgataggtcgcctacaaggttcttgagcttcagttcgattgaaccgtccgatttcgcacgcaggcccagggttcgggcgccgtccgagctgacgaagcgcacatgacgattgcggtctagcgccagcctcaggtgctttcggaaatcctcggcatagtggctgcgtgagggatcctgcgagacgggttcggctttgaacacctccttccattcgggcgccgtttcggtcttgaagcctaggatcttcttggatttcgccgagacgggaaggccgtgcgcgacggtggcgacgtgcgggccgaatccttcgcgggtccgggcaatctgttccatgtcctcgtggatgtttccccatccgcgcgactggatagcttgtccgggcgagtcggccttgggaatgatcgtaacgtacctgcgcgtttcggcgttgaagatgtggaacttgccgaaggtcttgagcgccacttccatatcgagcttcgagattctggaggcgtcgttggcaaacacgtagatgggcgcgccatccttgaagtacatgtgaccatagttgttcgggatcgagctcgggatcatcggtctgtcgacacctccgttcggctggaacatgccggaatacacttcaccg

SEQ ID NO: 10316 - DNA, 1768 bp, Oryza sativa
  ref <308>: DATABASE ACCESSION NUMBER: AK107664
  ref <309>: DATABASE ENTRY DATE: 2002-08-28
attattgctgcattttcattccatgtttgtgatcgcattgagcgcaacgtattgtgggaacatacgccttcaaaacgagcgagccgacaacttcgaaaacaggatcgatacaaaattgagcgcctacgctaaacaacaccatggaaaaacaagactgcgagtctcagactccaacacagctttcgtactttgcccaagtattcagtcaagctggcatcacgccagaagtagaagcctttgagtacaagggatcaggcacggaagaagacccatacatcgtcgactggatcacacaggaccccagaaatcccatgcggtatggcatcgtaataagatggagtatcacggctgttgttgcgatcgcaacccttgcagtcgccttggtgtcgtctgcttactctggcggtgccagggaggtgatccaggagttcggttgcagccaagaggttttcacattagggatttccctcttcgtccttggtttcgcaattggaccactgctatgggcaccgctatctgaactgtttggccgtcaaatcctgtacataactacatacgctgctttaacggccttcaacgctggtgctgctgggtcacagaatattgaaacccttctgatccttcgcttctttgcaggcgcgttcgggtcttcaccgctgaccaacgcgggcggcgttatcgcagacatgtttcctgcgagggagagaggactggctatgactctgtttgcagcagcaccctttatgggaccagcgttaggtcctatcgttggcggcttcgtgggcgaaacgataggctggcgttgggtcgaaggcgtgcttgcaattttcacaggcgtattgtggattatcggcaccttcctggtaccggaaacatacgcaccggtgattcttcgaaagcgagctgcagaactgtcaaaacgcactggcctggtctacaagactcagaaggacgccaacaacagcaaggaatctggaggctccgcaacaatcttcaagaccgctctttcaaggccctgggttctactcttccgggaaccgattgtgcttctcttcagtatctacatggccatcgtttacggaatcctctacatgctattcggcgccttcccgatcgtttaccagcaaaacagaggctggagtcccggaatcggcggtctgtcattcatcggtgtcgctgtgggcatgggattcgctgtttgctacagtgtttgggataacaagcgatatgccgatctcagcgatgcccacaaaggctttgcgcctccagaagcgcgcctaccacccacattcgtgggtgctctggcggttccaatcggtctgttctggttcgcgtggacgaacggcccgaacatacactggatcgtgtccatcatcgcaggaggtccgtttggtttcggcactgtcctcatctttcttggagtcatgaactaccttatcgacacttacacgatatatgccgcttctgtgcttgctgcgaactcagtgctgaggtctctgtttggtgcggcgttcccgctcttcaccacagacatgtatgccaatcttggtatccactgggcagcatcagtgcctgcctttctggctctcgtatgcgtacctttgccattcctattttacaaatacggaccgacaatccgcgagcgctgcaagttcgccgctgagtctgctgccttcatgaggggcatgcaagaacagcaagagcaacagcgagcctctaagtaattcgagctcgttatcatacgagtgaataatcaatgagcatttat

SEQ ID NO: 10317 - DNA, 1128 bp, Oryza sativa
  ref <308>: DATABASE ACCESSION NUMBER: AK107665
  ref <309>: DATABASE ENTRY DATE: 2002-08-28
atacacaaaattaaaacctcgatcgatcgaacaacgacaatctttcaactagctctagctcggcatcaccatcaccatcaccatgtcgtccatttccaacgacaacaatggtgatcagaagcgacagcagcagcagcagctggtgtgcgtgaccggagcaggtggcttcatcgggtcatgggtggtgcgggagctcctcctccgtggctaccgcgtcagggccaccgtcagggaccccgcggaccgcaagaacgcccacctgctcgcgctggagggagcccacgagaggctctccctgcgccgcgccgatgtcctcgacttcgccggcctcctcgccgcgttcgccgggtgccatggcgtcttccacgtcgcctgcccgctgtccaaccgcgatccagagctgatggcggtcgcggtggatgggacgaggaacgtgatgaacgcggcggcggacatgggcgtgcggcgcgtggtgttcacgtcgtcctacggcgccgtgcacatgaaccccaaccggagccccgacgccgtcctcgacgagtcctgctggagcgaccccgaattctgccggcaaaaagacatgtactgctacgcaaagacgatggcggagatggcggcgacggaggaggcggcgaagagggggctggagctggcggtggtggtgccgtcgatgacgatgggccccatgctgcagcgtgcgctcaacctcagcagcacgcacgtcgccaactacctcaccggcgccaagaagtcgtacccgaacgccgtcgcggcctacgtcgacgtccgcgacgtcgcccgcgcgcacgccctcgtctacgagcgccacgacgcgcgcggccgctacctctgcatcggcgccgtgctgcaccgcgcccagctcctccagatgctcatggacctcttcccccagtacaccatcgcttcaaagtgtgatgacaaggggaagccgatggtgaagccgtatgagttttcgaaccagaggctcaaggatttgggcttggaattcaccccgttgaggaagagttgtacgacgcagtcatgtgcatgcaacgaaacggtcacctgcctgtcgtcttgccatagcaggagtgtagatccaagatatatataaaagacgaatttatg

SEQ ID NO: 10318 - DNA, 1369 bp, Oryza sativa
  ref <308>: DATABASE ACCESSION NUMBER: AK107666
  ref <309>: DATABASE ENTRY DATE: 2002-08-28
aacaaacatatatcacgctgctacttactaacactgaaacctcagctaagataattaacttagctagttgtctcaggattatattcagcagatcagaaagcaagttaattagttagtactgtaataagctgctgctgccatggatggcaagaagccatatgtgatcgccatcatcatacaggtgatctacacggggttgtatgttgtttccaaggcggccctcgatcaggggatgaacaccttcgtcttcatcttctatcgtcaggctgctgccactcttctcttgctgcctctcgccattattctcgaaaggagaaatgcgccagccatgtcgcttcggctgtttaccaagcttttcatgtatgctctgctcgggaacacaataaccatgaacatgtacaacgtaagtctcaagtacacctcggcgacggttgcatctgccaccagcaactctgtgcccgtcgtcaccttcttcttggctgtcctactaaggcttgaagtgatccggctgaggaccttgtctggcgtggcgaaggcggcgggcgtggcgctgtgcctcgccggcgtgctcgtcatcgcgctctacgccgggccggcgatcagcccgttgaaccaccaccgcgccttgagcggcggcgtccatggagcagagagcagcgtggggacggggacgagggcgaggtggatgaaggggacgttcctgatgctgctatccaacacgacatggtcgctgtggatcgtgctccaggcgtcgctgctcaaggagtaccccaacaagctgctcgccacgctcatccagtgcgcgctcagcacgctccagtcgctgctgctggcggcggcggtggtgcgggccgacccggcggcgtggcggctgcgcctcgacgccggcctcctcgccgtcgcctacacgggcttcgtcgtcaccggcgtctccttctacctccaggcgtggtgcatcgagaagaagggccccgtgttcctggccatgtccaacccgctctgcttcgtcttcaccatcttctgctcctccttcttcctcgccgagatcgtccacctcggcagcatcgtcggcggcgtcctgctcgtcgccggcctctacagcgtgctctggggtaagagcaaggagcacaacatcaatatgcagctcacgctcgccgccgccgcttctaccgaacaagtgaaacagcggcaagaggaagatcacaagatggagatcgccggcggcgacgagcaggaggagatcaagcagcagcagcaggggaaaatggcggcgtcgccggagcaacaagtgtagctagcttttgtacctaataaatgacataattaattagctagaacctaataagttgttagtgttgataaccgagag

SEQ ID NO: 10319 - DNA, 1348 bp, Oryza sativa
  ref <308>: DATABASE ACCESSION NUMBER: AK107667
  ref <309>: DATABASE ENTRY DATE: 2002-08-28
ctaagcaggcacaatatatcatcacaaacttgacaatattatcacgtactatatactatcgaagcatatatttgttctgcacatatagtagctagcaatagtaattagtacgtgatctaagaaaagagtgatcgatcttcgatttgatcgatagtatcgtcaatcgtgtgtccgatccgatccgccatggagtggagggacagcttcttggacttgatcttgatccctctcagcctcctcgtccccatggcgtaccacgtctggctgtggcgcgccgtccgcctcaccccgctccgcaccgccgccggcatcaactccgccacccgccgcctctgggccatcagcatgaccaaggacaacgagaagaaggcggtgctggtggtgcagtcgctgcggaacgtgatcatggggtcgacgctggtggcgacgacggcgatcctcttctgcacggggatcgcggcggtgctgagcagcacgtacaccatcaagaagccgctcagcgacgccgtcttcggcgcccacggcgagtacatgatggcgctcaagtacgtggcgctgctgctcctcttcctcgtcgccttcctctcccactccctcgccatctgcttcctcaacgaggccagcttcctcatcaacacctcccccaccctcctcgccggcggcgatggcgccggtgacgacggcggccgccgcctcctcggccttccgtcgacgagggactacatggaggaggcgctggagaaggggttcacgctcaacttcgtcggcaaccgcatcttcttcgccggcgtcccgctcctcctctggatcttcggcccgctcctcgccttcctctcctccctcgtcatgatccccatcctctacaacctcgacgtcgtcaacgtcaaatcacatcgcggcggcgactgcggctgcggctgcggcaatgggaaatcatcggtggacaagaacggcgccgcagccgccatggattgcacgcttgtctgacgaagaagcaagcaaagcaatcttggctcgatcgatgatcgatctatctgcagcgagatttgctccggtccaacaaaaaatacctcgagataccggtacctacggtacctgcagcatgcttgttcatgtgtgatataagtgcagtgatggtacagtagactgccacattggtagttaatttggctctatagctagtgcatatgcatgcgtggacgaaaaagctagtttcttgtggatcagcaacacgtacgtcagtggacgatataagttgcttcctagatggtactaggaaatccgttcttgagttcgttgcatgcatatgacatggaatccaacagcgcgtcttgctgtcatttttacc

SEQ ID NO: 10320 - DNA, 1561 bp, Oryza sativa
  ref <308>: DATABASE ACCESSION NUMBER: AK107668
  ref <309>: DATABASE ENTRY DATE: 2002-08-28
gtccatcaagccgactttgtggttcctgccacgaaatcagcccgtgtgccaaagccgagccagcttcatcgaggctcgcgccccatgtccaatcaagcggcgacgccacgatctgcatccctttcggctgcgtcgctgctgcctgattggccgcaagcgccctcaccaacgtacgcgctagcgcctatccgaacctcgagtgcgcgagccagctcggtacgatccgcttcatcttcgccaaggtcgttgacccacgagcgatctgcgccttacccttcttcgagacccgcgcgcacggagatgctcgacgtgcaacatcctcatcatccgcagcaagccgcaagaatgcacgactccgaactgtaccgcacgcgccaggcgctgcagtcgcacctgggagtgcgacagtcgtcgtcttcgcgaagtgcgccagcgcagcagccgcgttcggccgagtacgcgcagacgtcgagcacatcgtccaactcgccgtcgtcgaacaaggaggcgcagcacaaggtgtacttgctcaactgcaagcactgcggcaacttcctgagcgaccgaggcatgaaggcggtgctgctgctcaagcccaacatcacgctgtacagcaccgacattgtgccgtcgacgtgcggaccttttactgccgcttctgcgttccacggcggtgcggatcccaacgagccaccggtggagcgcacgtgcgagtgtctgacgcagagcctgggctgctacggctgtggtgcgcaggtggggtacaacatcatctcgccgtgcacgcgttgcacgagcagtgtgatgaagcactcgaggagctccaacggccaccgcacggttctgcactgttccgagattgcggtgcgagagcgtcgctacattcctggcgagcctggagtgcgcgcccagcctcctcgcgtcatccagaccgtcgccgcacacagcccgatgcagatgtacgccgagagcaggtacgatgcagcggctgcggatctgtttcgccacagcaatgcttctcgccgcgatgtgtatcgcatgaacgtaccctcgtttgacgacgacgatctcgaggctgaaaaggccgaagccaacgcggctctcgtccaccagcagtactaccagcagcgcgaataccgtcaagctggccaccacggtcgggcacaccagcatcctggctctgccggtagccagcgatcctcggcaccttccggctcggggcgtgtgctgcgacgcggagacacgcttttctggagcgatttggtcgcaggcggcgagcgtgcccagccattcgaccctgacccgatcctcgaaaggcccacagtgggcaggtgatggccccccttttccctaaattcgcatgctaatcggcagccgcgatgcacttcttttccctcccttctccttgtcttttctctgcatattgcacatgccctctctatctcttctgtccagcaaacccttgtattccgtccctataatcctcccttctcgcttcaatttgctcatcatcctgtcgcgttatcatactagcattgcttcgttaatctattcttatccc

SEQ ID NO: 10321 - DNA, 1577 bp, Oryza sativa
  ref <308>: DATABASE ACCESSION NUMBER: AK107669
  ref <309>: DATABASE ENTRY DATE: 2002-08-28
cgatcacccacaatctttgcaacaatcatctctgaaacacgtacaaattgaacagctagcctccaaatcctccctccatggccaacgcagccaaccaacacacctgcgatggccctcaaccgtcagcaccaacgcacttccttattgtagcctacggcatccaaagccacatcaaccctgcacaaaaccttgcccaccgtctcgctagcattgacgcctcctcagtcatgtgcactctctccatccacgcttctgctcaccgccgcatgttctcgtcgctgatcgcctcccctgacgaggagaccaccgacggtattatctcctatgttcctttctctgacggctttgacgacatatccaaactgagcatactttctggcgacgagagggcacgtagccgctgcacaagctttgaaagcctctcagcaattgtctctcagctcgccgctcgtggtcggcccgtcacatgcatcgtgtgcaccatggcgatgcctccggtgctcgatgtcgcacgaaagaatggcatcccgctagtcgtgttctggaaccagccggccaccgtgcttgcagcttactatcactactaccacggctacagagagctctttgcatcacatgcctctgacccatcgtatgaagtggtcttacctggaatgcaacctctttgcatccgtagcttaccatccttccttgttgatgtgacaaacgacaagctgtccagttttgttgttgaaggctttcaagagttgtttgagttcatggatagagagaagccaaaggttcttgtgaacacattgaatgttttggaggctgccacgctcacagccgtgcagccgtacttccaagaggtgtttaccattggccacttagtggctgggtcagccaaagaaagaatccacatgttccagcgggataagaagaactacatggagtggcttgatacacattcagagaggtctgttgtttacatatcatttgggagcatactcacatatagcaagcgacaggtagacgagatattacacggcatgcaggagtgtgagtggccatttttgtgggtggtgcgtaaggatgggcgtgaagaagatttgagctatttggtggataacattgatgaccatcacaatgggatggtgatcgaatggtgtgaccaactagatgtgttgtcccatccctccgtgggatgctttgtcacacaatgcgggtggaactcgactttagaagccttggaacttggtgtgcccatggttgctgtgccgaattggtcagaccagcccacaattgcatatcttgtggagaaggaatggatggttggcactagagtgtatcgcaatgacgaaggagtaatagtggggacagagttggcaaagagtgtcaagattgtcatgggagacaatgaggtagcaacaaagataagagagagagtaaattctttcaaacataagatccatgaggaggcaataagaggtgaaacaggtcagaggagtctccaaatatttgccaagacaataatagaatcagattaaggaagtgaaactaatttcgaaaccaatggaaattaatgctgtgaaaatatc

SEQ ID NO: 10322 - DNA, 1919 bp, Oryza sativa
  ref <308>: DATABASE ACCESSION NUMBER: AK107670
  ref <309>: DATABASE ENTRY DATE: 2002-08-28
accgccctcctcctccaccaccaccctctcccctaccaacagggtgctcctcctctcacgccaacccccagactctcgttaccatcgagagcctaccaagcagacacaccaggtagctgaacgctcacctgcctgcttacgaccaacacccgaggagccaatttcgcggcacaaacactcctcccttccctcccacaagatgccttcgcatcagcccgtcgccggcatgtccgccgtggacccggcctacctctccagccagccttcggctgcgtccaagcctcaccctcaagagcccgtcaggaacaaggcctacgaccccaagaagcctcacatcactgagactcccatgacaaagaagaactggtacaagcacgtcaactggctcaatgtcatcctcatcgttggcattcccatgtgtggtctcgttgccgcttactggacacctctctacctgaagactgccatttgggccgttgccttctacttcgccactggcctcggtatcaccgccggctaccaccgtctgtgggcgcacacctcctactctgccagcctcccgctcaagatcttcctcgctgctgttggtggcggtgccgttgagggctccatcagatggtgggcccgcgaccaccgcgctcaccaccgctacaccgacaccgacaaggacccctacagcgtcaggaagggtcttctctactctcacttcggctggatgctcatgaagcagaaccccaagagaattggccgcactgacatctccgacctcaacgacgacgccgttgttgtctggcagcacaagaactacctcaaggtcgttctcttcatgggtctcatcttcccgactcttgttgcaggtctcggctggggtgactggctcggaggcttcgtctatgccggtatcctccgcatcttcttcgtccagcaggctactttctgtgtcaactcccttgcccactggctcggtgaccagcccttcgacgaccgcaactctcctcgtgaccacgtcatcactgcccttgtcactctcggtgagggctaccacaacttccaccacgagttcccctccgactaccgcaacgctatcgagtggcaccagtatgaccccaccaagtggtctatctggatgtggaagcagatgggtctcgcctacgatctcaagcagttccgttccaacgagattgagaagggccgtctccagcagcaacagaagaagcttgaccagaagcgctccaagctcgactggggcgttcctcttgagcagctccccgtcatggagtgggacgactacgtggaccaggctaagaacggccgtggcttgattgccgtcgccggtgtcgttcacgatgttaccgacttcatcaacgaccaccccggtggaaaggccatgatcaagtctggtattggcaaggatgccacagccatgttcaacggcggtgtctactaccactccaacgctgcccacaaccttctctccaccatgcgcgtcggtgtcatccgtggcggcatggaggtcgagatctggaagcgcgcccatggcgagaacaaggacttcatcaaggatgccgcaggcaaccgcatcgtgcgtgctggcgcgcaggtgaccaaggtcgtcgagcctcccgcgagcgccggcaccgcatagatgatgacggtcaagtcgagcagaagaaactgagacgaatgcatgcaaatgttacatggcgcgtttagcgagtggcctgggttctccgcctacttttggagagaggcaggcgttgtttcacattttttatggggcttttacacctacacattcgctgtacatagatttcctactcacgccacctacggggtgcgatgatagagcttagctatgagcttagtttggtggactagttagctaatcaggtcgaaatcataatgtactttgtacaccc

SEQ ID NO: 10323 - DNA, 1333 bp, Oryza sativa
  ref <308>: DATABASE ACCESSION NUMBER: AK107671
  ref <309>: DATABASE ENTRY DATE: 2002-08-28
atctttaatttagctagtcaagaaaacccaatgttctgaatttctgatgctctgatcgatcaaagctgatttatttattttttgtaataatctgttgtacattcagagcaagaggaagcctaagtggttcttgctatcagcgatggcgccgttggcgtcggtcatcgccggaagcgttctggtctacctcatccacggcgaccgccatggcatcccggtgattgggtacctgaagaaggggataaacccgccgtcggcgcgcgatctcctcctgtcgtcgccgcacacgatggtcgctctcaggaccgggatcatcaccggcatcatcggcctcgccgagggaatcgcgatcgggaggagcttcgcaatgctgaagagctacaatgtcgacgggaacaaggagatgatcgccttcggggcgatgaacatcgtcggctcctgcacctcctgctacctcacagctggcccgttctcgagggcggcggtgaaccacaacgccgggtgcaagacgccgatgtcgaacgcggtgatggcggtggccgtgatgctgacgctgcagttcctgacgccgctcttccactacaccccgctggtggtgctctcggcgatcatcatctcggcgatgatcggcatcatcgactacaaggccgccgtccggctgtggaaggttgacaagatcgacttctgcgtctgcgtcggcacctacctcggcgtcgtcttcggcgacatccagatcggactcgccattgcagttgggatatcgattctccggatcctattgttcatcgcacggccgaagacgacagtcctcgggaagatgccaaactcgacgaacttcaggaggatggaccagtacaccgtggcgaaggccgtgccgggattgctcgtgcttcgcatcgactcacctatctacttcgccaattcaggctacctgcgagagaggatcatgcggtggatcgaccacgaggaggaccggatcaaggccgagggtctggagagcttgaagtgtgtagtcttggacatgggtgccgttgccagcatcgacacgagcggcacgaagatgttggaagatctcaagaagaacctagacaggagtagcattcagattgcgctggcgaacccggggagtgaaatcatgaggaaattggacaaatcaaatgttctcgggctcatcggagaggagtggatcttcctgacagtgagcgaggcatgctactatgcgcagcaaaactgcaagataggagtaggaatgggtgtagtacaatgtgtagtagatcctgaacacatggtctgaaactctgtaatagaatgtgcagtacaccagtatctcctg

SEQ ID NO: 10324 - DNA, 1562 bp, Oryza sativa
  ref <308>: DATABASE ACCESSION NUMBER: AK107672
  ref <309>: DATABASE ENTRY DATE: 2002-08-28
aacaaaacgaaccatcttcacctaaacccgtccacacgccgggtggccgccagttcagcgagtgacgacgacgaccccccacgcgcggcggccgcgcccatctccgtcgcctccccgccggccatgtcggtgccgcccgccagccaccgccaggtgtccctgaggggatcgagcgcgagggagatcacccgcgacgcgctgctgcagaaggtctccgaggagcgccagctccgcagccacctccgccgcgccgccgccgcggcgctctccatccagcgtgtttggagaagatactcagtcataagaattgtttcagaacagctccatgaagagtgggaagcattaataaaccagcctgacattaatctgacaaaacaatggatatcaagcatgatgcttagaccatttcttttcttcgttactcaaccatcaagctggtacaagggacaacaggacaagactctaaactcgatttcggcatgcttcaaaatcatcttgaatagcataaactcaatgggtatgcctttttcataatcaaagtttgactttaccgacttccatcttgacctttttgtactttattttctcctccttaatgaaatgacacgcagctctcctgtgtagtttgaaaaaaaatgttttactttacccattccactagttgtggttaactcctataaaaatttatttatgtaatacttccttttgctgtaaggattataatcctttatattattcaatccttgtatggcgatgacctaattgttagttctagaatggaattatgtacttaacagaaaagaaattgcagtcgacgtgagataagcagatactccctccgtccctaaatataagggattttggttggatgtgatgtatcctagtactacgaatctggacagagactttaatatatatcatatatttagtactaggatacatcatatccaaccaaaattccctaaatttagggacggaggtagtatttgttttgatatatatatatattagtactgtttggttgagcagtgcaatatggaaggaatattacagtaacttttttcttgaggctcttgatccactgagctggcacaaatgggtagtctcttctcggtgagatttttttttttttttttttttggggggggggtggaatgtagcctctagatattactgtttcaagaaaaaagaagttctttgaatttgaatgtaaagtgcatgctatgctttgatagacaagaagtatgaagtgggtctacgatatgtaaccttgtttaataatggacggatgcatgctaagctacagagcgaagctcccaaccagctggcctccatgtttaaagataatacaaatattaccacataactagtttagaatgcataggtccataactgtccttcaattatcatttggtagatgaggttaaacacaaaaagcatgaactatcttggagagctagctttcctttaaccattacagtaacaataagaacagcctttagtcccaagcaatttggggtaggctagacaggaaatccaagtcaaaccacatgaaccacaag

SEQ ID NO: 10325 - DNA, 2135 bp, Oryza sativa
  ref <308>: DATABASE ACCESSION NUMBER: AK107673
  ref <309>: DATABASE ENTRY DATE: 2002-08-28
attttcttagtatcgatctctcgccatgaaatatcacgcctcgctgctctcaggggctgccgtgctcgggtccgctgtggcttcgcctgcacaccaccccaacctccaggatgatgtcgcccttgcggctgccgcattggtcccacgcgcgctgccagccaatgcgccgcacggctatgtcccgcagaccaatgcgtgcccctccaacacaccatccattcgcaacgctaccgacctgtctgacgaggagctcgcatggttgccagtccgccgaaatgccactgtccagcccatgcgcgagttccttggacgtctgaacatcacaggcttggacaccaacaagtacatcgacgaccatgcgaacaacgcatccgccctgcccaacattgccattgcggcgtctggtggtggatacagagctatgctgaacggcgctggcgtcgtgcaggccttcgacagccgtaccgagaactcaacaggtcccggacagctaggtggcttgctgcagtcaaccacttacctcgctggtctctccggcggtagttggctcgttggatctctttacaccaacaacttctcttccatctctgatatcttgagctacagtggagacggctcatcgctatggcaatttgagaactccattttcgagggtcccaagacaggatctatccaaatccttgattctgttggatactacgtttctatcagagattctgtccaggacaaaaacggtgccggcttcgacactaccctcaccgactactggggacgtgctctttcttaccagcttatcaacgccactaacggtggtcccgaatacaccttctctagcatccccgcccagcagtggttccaggatgcagaggcgccaatgcctctcattgtcgccgatggcagagctcccggtgagcttctaattgctgccaacacgactgtctacgagtttaatccttgggagatgggatctcacgatccgactgtctatggttttgctcctatgaaatacctcggcaccaacttcacagctggcgctcccaacgacaacgataagtgtgtcactggctttgacgcatgcagcttcgtcatgggcaccagcagctcgctctttaaccaaggcttgcttctggtgaacaactcggagtctagcggcgcattccaagatgcccttcagtctgttcttacgggagtgctcgagcgcatcggcgaagaggacgacgatattgcagactaccccaacccattctaccagtggaacaacgccaccaaccccaaccacaattctacccagctcactctcgtcgacggaggcgaggacaaccagaacattcccctcaaccctctgatccagccgaatcgccacgttgacgttatcttcgccatcgactcctccgctgacacgaatgagacttggcccaccgagaactctgccactggctggcccaacggtgcctccctgcaggctacctaccgccgctccctcgagactatccaaaagtacaccgcattccccagcattccttctgtcaccacattccaaaatctcggtctgaacgccggcccgaccttcttcggctgcgacccgaccaacagctctaccgaaaacaccggcgtcccgcccctcatcgtacctccccaacgctccctacgtctacaactccaacgtctccaccttcgacccggcctacaacgtcaccgagcgcaacgccatcgtctccaacggctacgagggcgcgacccaaggcaacggcaccctcgacgagaactgggcgacatgcgtcggctgcgcggtgctttcgcgctcgctgtacaggactaacacagaggtgcccgaggtctgcaaccagtgcttccagaagtactgctggagcggcgagatctcgcagggagagatgcagccttacgtgccagctctgaagctgcccgacgagaggatcgatgttgccagcggcgcttcgagggtgggaggtgtgtttggtgcgattgtcgtgggattggctgtggggcttgtcaacatgatttaaaagtttttattgccaagggtctcaacatgatttcatttacggttttgggcgctctaatgtgtatatacctcccaagcgttgcttgcagcaatttcacgttttcttctagcg

SEQ ID NO: 10326 - DNA, 684 bp, Oryza sativa
  ref <308>: DATABASE ACCESSION NUMBER: AK107674
  ref <309>: DATABASE ENTRY DATE: 2002-08-28
aacttagcaaaaatcaacgctcacatattcatggcttcagcttcagacaagctcgtcctctcggccatcgtgctcgccgtcctcgccgccgtggtggcagcggcgtcgggctacggcgacgtcggcgagtactgccgcgtggggaaggcggtgtcccggaacccggtcccgtcgtgccggaactacatcgcgcggtggtgcgccgccgccgggggccgcatggactcccgcaagcagccgccgcgggagttcctggagccgtgctgccgggagctcgccgccgtgccgatgcagtgccggtgcgacgcgctgagcgtgctggtgcgcggcgtggtcacggaggagggcgaccgcgtctccgggatgatctcccagcacgcggcaccggggtgcgacgccgcgacgatcgccgggatggcgagcgcgctgacggactacggccggtgcaacctgcagcacacggccggttcctttgcctgcctcatgtttggtggtggcatggattagattaattatttcattagtgattaattaattaattaggcctttgcttaattaattatcgatgtttgctagtactagctagcagtatcatgtttggatgctgcttctctatgtttgtgataatgataatgaaaagaaataaaatgaggaacggatgttcctctttgttgttattcttgg

SEQ ID NO: 10327 - DNA, 1540 bp, Oryza sativa
  ref <308>: DATABASE ACCESSION NUMBER: AK107675
  ref <309>: DATABASE ENTRY DATE: 2002-08-28
aattaatttgtgacgattaagtgtgttcacagcttaattagctcctactagctagtatatatacacaccattcccaatcaaagacgagatagctcaagaagcagccaaattaaagagcaattaatcgattgaacgcgactagagctagctcgatccgatcgtgcgtacgtacgtacaggcatggacggcggcagctggatgctcaaggcggccgccgccggcgacatgcacggcggcgccggcgacaccatgatcagatgcagctggagcgacatggcgactactgatcagctgctgcgccaccacgagcaggagccggcgatgacgatgatgatgaactcgcagtcgcaggccatgcagcagcagcttagccagatctacatgctgatggacatggaggagcacgatcatcagtacgccacgccgccgtcgccgtcgtcgtcctccttccgctccttctccgccgggacgacgacgacgacgacgagccgcgacgacaactcgtcgctcatgctcggcgccgccgccgcctcttgccaccaccagacaacggaggtgtcgtcgcagatactactaccacggccgggacaagcagcacggcggagcagcggcggccatggcgccgccgccgccgccaccgcgttccggccgtactcccggtacctgggcccgaagaagcatctcctccggcggccaggggcggcgaccaccgccaccggcggcggcggtggacagagggcgttcaagaggccatatcggtgctgtcaaagatccacgcggcgaggctcgcgcagtactaccagatcatggagatggccgcgcgggcttcgccagcggccaccgcccgcggcggcggcggcgagaaccagcagctgcagctgcagcacgtcttgtcggagcgcaagcgccgggagaagctcaacgatagcttcaaggctctcagggacgtgctcccacccgccaccaagaaggacaaagcatcagtgctgatgagagcaaaggactacgtgaacgtcctcaaggcgaggatagctgagctggaggagaagaacaggaagctatctgaatcacagcagctgcacgccggcgacggcgacggcgagcgagacgacggacctgacgatgacaagattgaggtcaacacgagcagatcagcggcagatcagggcagttcaccgaacaagtgtcaagagcttcatctgaagatagtgctggggtcgtcgtcggggtgcagtgccatggatgccgtggctggcatcctgcagggtctcaacgagaagagggatgtcagcttgttggccacagggcataattccagcagcagcagcagcagtggtcgtcgtcgtcttcttccccgtgcaaagtcttctcaacaacctgccgtaagattacaaactctatgtaaattgagtagataaatgattttaattaattactccgtttgtttgttaatttttaggggacattttgaatgctcatgccataaatttctctgcatattcttatgcgccgtatatatgatccttttttatatactagt

SEQ ID NO: 10328 - DNA, 977 bp, Oryza sativa
  ref <308>: DATABASE ACCESSION NUMBER: AK107676
  ref <309>: DATABASE ENTRY DATE: 2002-08-28
aactagccaagccaatcggtccccacgcttacaagctacaacttcacctcacccctgctgcattctcgcgtcccaagttacaatccatcaatggcggcttccacttccgccgcggttaagatggccgccgccgtcctctgcctgatggtcgccctctccgtcgccgccgggcagctcacgacgacggccgccgccgccacctccacgcgcgtggatgatcacgtcgtcgaggacgacgacgacgcgacgccgacgacgctgcagcagctggagacgcgcctcgccgacgatcaggacctcgccgacctcctcgacggcggcgacggcgccgccaccatctgccccagcaactgccagaagtgcctggtcaagtgcgcgggcacctgcgtcgccgacatcgtcagcccgcccaccttcgtcgcctgcttcctcaagtgcgccgtcgtcaagctctgcttcgccaaggtttgatcatcatcgcgtcggcggccggccggcgatggtcgacggcggcgccggtgccgcttgattgcttgccttgttgtcttgctagctcgtgtctacgtactccctccgtacctatatatttaacaccgttaatttttttaatatatttgacagtttatcttattaaaaaaataaaaaaatatttttttcttattattaaatatgtttttattatatatatagttttacatatttaaaaaaattaaataaaataaacgattaaatatatttaaataaattaacggcgttaaatatttaaaaacggagggagtagtcgaggtcgccatgcgtgcactcctgcatgcatgcatgcgtggtggtggtgtgtggagacgatgatattggtgtcgcgtgtatcatttcagttgccgatcgatttacggctgatggtgtcgttgaccacacaactgtttggtgactgagggaaatatatgtaacgtgtgtccatcggtaaagatgttgttgcacgc

SEQ ID NO: 10329 - DNA, 1600 bp, Oryza sativa
  ref <308>: DATABASE ACCESSION NUMBER: AK107677
  ref <309>: DATABASE ENTRY DATE: 2002-08-28
attgttcagtcttcttcttcaaaccctcacccatcccctcacacccattgcacctctacaaacgtcctccttaccaccacacatatacaatggccgagcccgagtttgagcaagcctacaaggagctcgcctccacactcgagtcgtccacccttttcgaaaagaaccccgagtacaggaaggccctcgaggttgtttccgtacccgagcgtgttatccagttccgcgttgtctgggaggacgactcgggcaagtgccaggtgaacaagggctaccgcgtgcagttcaactctgccctcggtccctacaagggcggtctccgtctgcaccccactgtaaacctctccatcttgaagttcctcggcttcgagcagatattcaagaatgcccttactggcctcaacatgggcggtggaaagggtggtgccgacttcgaccccaagggcaagtcagacaatgagatccgcaagttttgcgttgccttcatgactgagctttccaagcacatcggtgccgataccgatgttcctgccggtgatatcaacgtgggaggccgcgaaatcggctacatgttcggtcaatatcgccgtctgcgcaaccagtgggagggtgtcttgactggcaagggcctcaactggggtggaagcttgatccgtcccgaagctactggatacggtcttgtctactacgttgaccatatgatcaactatgcctctggaggcaaggagtccttcaagggcaagaaggtggccatctccggctccggcaacgtggctcaatacgccgcccttaaggtcattgaacttggcggtactgtcgtctccctctctgacagcaagggctctctgattgccaccgagggcaagggcttcacacccgaggacatcagccagattgccgccttgaagctgaagcgtcaagccctgactgcgctcgagggccactcttacaactacatcgagggtgcccgaccctggaagcacgttggcaacgtcgatgttgcccttccctcggcgacgcagaacgaggtctcccaggatgaagctgaggctctcattgccgcgggctgcaaattcatcgctgagggttccaacatgggctgcacgcaggaggccatcgatgccttcgaaaaccaccgcaagtcgaacaagggctcctccatctggtacgctccgggcaaggctgctaatgctggtggcgtcgccgtttctgggcttgagatggcccagaactcccagcgactatcctggaccaacgaggaggtcgatgctaagctcgctaagatcatgaaggactgcttcgagaactgcctcgccaccgccaaggaatacatcacacctgccgagggcgagttcccgtcactcgttgccggtgccaacgttgcaggcttcaagaaggtcgccgctgccatgcacgaccaaggcgactggtggggtactgcttagaggataggctggcggcgattgttttatagcatattggggggtagacatggcgaatcggtcatgcgcctgggataccacctttgcattcagcgcaagagctgaaggtttttgtacatactagataccatcatgaatttacggcacgatacacacct

SEQ ID NO: 10330 - DNA, 2366 bp, Oryza sativa
  ref <308>: DATABASE ACCESSION NUMBER: AK107678
  ref <309>: DATABASE ENTRY DATE: 2002-08-28
actgtaatatacgtattactgcttgattggtaaactaatatggggatatactgtggtaatcagcagtgaacagtgacctcactactacgtagtcactagtgctctacactatgttacacgatagatgacaagtcaccaggagaacgggttgttgtgaccattattttgcggcggcctttttgtttgtttgttcaccttccaccggagaggccggacacggccgagacgtcggcggacatggggctggcggtcgacgtgacggtggaagggaaggacatggcgaacgagtcgaacccgtcgttctgcatcagcgccagcatggtgtagctcaccatcgtcggcgccacctccggcatgggtgcgtcgccgtccaggtactgcgtgacctggcgcatggtggggcgcgcgtcgggcaacgggtgcgcgcacatgagccccagcttgagcgccagcctcgcctcgtcggcgttgtacttgccgcacagcctcgcgtccaccgtgtcgagggccgcgtgccggcgctcgtgctcctgcacccagtccagcagcacgttctggtcgtcgggcgcgatgcagccgagcggccgccgcccgcaggtgacctccagcacgaacacgccgaacgcgaacacgtcggtgaccggcgtcgccttgcccgtgcgcaccagctccggggcgaggtaacccatggtgccgacgacgtgcgtcgtcagcgggtcaacgccgtggtcgtacagcctcgcgaggccgaagtcgcccagcctgccgttcatctcgccgtcgaggagcacgttgctcgccttgatgtcccggtggatgacgacctgctcccagtcctcgtggaggtagagcaggccgggggcgacgcccttgatgatctgaaacctctgcccccaatcaagaacaggcttggtcttgtcgtacaagtacttgtcgaggctgccgttggacatgtagtcgtacaccagcaggagctcgcccttgcgccggcagtagccgagcagctgcacgaggttgcggtgccggaggtggccgatgctgacgacctccgcgatgaactccttcatcccttgcttcgagtcgtgcgacaccctcttcacggcgatctcgaggttggatttcgcgagcacgcccttgtacaccctgccgaatccgccggtgccgagcagctgcttgttcttgaacccctttgtcgcctggtagagctccttgtaggagaagcggtgcggtccgaactccacctcccagtcctcccgcacctcggcgtacctcacccgcctccggacgaacaggaaggcggcgatgaccagcgcgaggacgaacgccgcggtggcgatcgggagcacgatctccagcaccttggaacggggcttcggcccgaaccgcggcagcgccgggaggcttgaggtgtggagagaaggagcggcgccgttctgggagaagctccagccgagaacgtagtgccgcgtgtagatgacgcccgtggccgccgagaacccgacgtacgccgtgtcggtcacgacggacgagaggttgacgggcgcggagatgaggggcttactgggcttgggaacgtcgagcggcgccatcgtcacgttgagcaccgtggtggcgccgtcgtagtccacccacacctgcatcggctggcggctgatcaagctcagattgttgaagacccccgtggcttcgtcgtagtagccggcgctgtggttctgcacggacttcatgctgttgatgtcgacgccgatgtggttgctgttcatgtcctggaactccgggttgagcatggtgtcgagctcgacggcgaagatgttgttatcggcgttgccgttgtcggtgacgttgaggatgccgaggtactggccggcgttgaaggtggagagccgcgtgctgggcgcgaccacgaacgccatgccgttgtcgctcagcacggtgaagttggacacgatggcgaagacgaacgcggccgagaaggactggacggcgccgcccgccgcgccgccccgcaggcggatcggcgtcgggtggaacgcgtgcccggccatctggttcgtgccgttgctgagcacgaggaggccgttgggcgccacggcggccatgccgtcgagcgtgaggttggcaccgccgaagccgttgtaggtgaactcgtcggcggcgagcacgcccccatgatcagagccaacgaccgcgagcaggaggaggaggagcagcagcaagcggtgattacccatcgggagatttgcttccgtttgggagttgcaattagcacagggcatatgatgtgtagtcaccgctattcgagtcatagcatcaaatgtctgaacagaagactcgctattcgagtcaatgcatgaacaccggacacc

SEQ ID NO: 10331 - DNA, 1419 bp, Oryza sativa
  ref <308>: DATABASE ACCESSION NUMBER: AK107679
  ref <309>: DATABASE ENTRY DATE: 2002-08-28
atccaccatccccacacatattcagcatgatcgatcttctcctcctccagcccgacaagggcggaaaccctcagctcgtcaaggactcgcaaaagaagcgcaacgcttccgaggagctcgtcgacgaggtgctcgctctctacaagaactgggtcacgctccagaaggacctcgatgtggcgcgccgcgacgtcaacgccgtccaggcagagatcaccaagctgcgcaaggccaaggagaacgcagacgagcagatggccaagaagaaggagctcgacgccaaggtcaaccagctcaagcccagcgtggtgcaggccgagaacgagatgaagtccaaggcgatgcagatcggcaacatcgtgggccacaaggtgcccatctccaacaccgaggacgacaacgccgagatccgcaagtggcatccggacggccccaatgcccaggtcgagaagaagcagggcatcctcagccaccacgaggtcatgtaccgtctcgagctctttgacacggagcgcggcaccaagatctccggccaccgcggcttcttcctcaccggcgacggcgtcgacctcaaccaggcgctcatcaactacggcctcgacttcctccgaaagaagagctacaagaagatcatgacgcccttcatgatgcgcaaagaggtcatggccaagaccgcgcagctcgaccagtttgacgaggagctctacaaggtcaccggcgacgaggacgacaagtacctcatcgccacctccgagcagcccatctcggcgctccactcggacgaagtcttcaccgagcccgccaagcagctgcccatccgctacgccggctactccacctgcttccgcaaggaggccggctcgcacggcaaggacacctggggcatcttccgcgtgcaccagttcgagaaggtggagcagttctgcatcaccgatccggcctcgtcgtgggagatgctcgagcagatgctcgccaactcggaagagttctaccagtcgctccagctgccctaccacgtggtggccatcgtgtcgggcgcgctcaacaacgccgctgcggccaagtacgacctcgaggcgtggttccccttccagggcgagtacaaggagctcgtctcgtgctccaactgcaccgactaccagtcgcgacgcctcgacgtgcgctgcggcttcaagaagcccggcgacaccaagccgacgtttgtgcacatgctcaacggcacgctctgcgccaccgagcgcgccctctgctgcgtcgtcgaaaactggcagacaccagacggcctcaagatccccccgcccctccagccctacatgggcggacgcgacttcctcccctacctccgcgagctgcccaagaacaccaccagccagaagaagaagtgagccgcttttctatacatgtagtcgtttcaacggg

SEQ ID NO: 10332 - DNA, 1603 bp, Oryza sativa
  ref <308>: DATABASE ACCESSION NUMBER: AK107680
  ref <309>: DATABASE ENTRY DATE: 2002-08-28
acgtttggctgcaccctgtctcgcggctgatacgtttgcacaggcgttcagatacagccgatacaccggcggcgctagctgcgtttcttctccgcatggacgctccgtcgtcgccctgccaccgtcggcgcgacacatcttccccttcgcgtacgaggcccccacgacgacggtgggtgggagcccaaggctccacccgctgtcgtggcagcaatccagcatgtcccagcccgcgtcgccacagcaacagcagcagcagccgttgcagcaccagcagatgatatcgttcggcgcgtcgcctccgtgctcgacgacgcagttcgtcgtcccggagaacgcgcagcagcagcagatgctgctgcggtactggagcgaggcgctgaacctgagcccgcgcggtggccccggtggcgtgccaccgtggctgtaccagcagctgctccgggtcccgccaccgccgcagaagctttaccgcggcgtgcggcagaggcactgggggaagtgggtcgcggagatccgcctgccacggaaccgcacgcggctgtggcttggcaccttcgacaccgccgaggacgccgccatggcgtacgaccgcgaggccttcaagctccgcggcgagaacgcgcggctcaactttccggaccggttccttgggaagggccgcgccggcgggaaaggccgcaccagcgtaagctcctcggccgctgccgccgcgtcgtgctcgtcgtcgtcgctatcgccaccggagacacctgacgacgcaaacacgcagcaacaagctcctcagcagcgagaacagcgggacacggcaggagtgtccatggagaagaaacaaccacagcctccagctccaacctctcgtcaagaagggtgctctggcggcgacgcagctgcgccgtacccggccgaaatgcttcacgcgccggcggcgtgcggcggcatgtgggttgctcccgacgagtcatggttcagcacgtggggccctggcagctccttctgggacgactacgacatggacagcgctcgcggcctcttcctccaccctcgcttcaccggtgacgaaactagcatggatcattccggcacgcaagcaaccgtgccggcagtggcagcaacagcggcagggatgagcatgccatgcgatgatgttccggtaacctcttcttcttcagatctccctccccaagggacacctcagactcctaccttcatgtggaaggaggactaagcatgcatgcacacagccacgcacctcgacgagacgactatctcttccatctcccatcgacttcgacgatctctttcattactcatcgactgcaaccacaaaggtatgattagggtagagatgcttgcagattgcagttttaaagacaattttgcagcatcacacagctctacgtacaacagccacacctatatcaattctcaagacttctaaaccacaagggaacccctgttctaggctgcgatttttaggtcagcttgttggggtgaccacagtacaattccctttatttcgtatcttcccaagattgtgtgtgtcagatattcgttgaactcgacttcaaaagatttgaagtattcatgttttcttttactc

SEQ ID NO: 10333 - DNA, 1405 bp, Oryza sativa
  ref <308>: DATABASE ACCESSION NUMBER: AK107681
  ref <309>: DATABASE ENTRY DATE: 2002-08-28
aagcaagcagcgcgcctgagtacgtagcaaaatccagtgtggtgtacgaacgaaaatggcgacgccgcggacactggtgcccattctgccgcccgtcgcggcgctcctcctcctcctcgtcgccgcctcctccatccccatcctcgccgccgcgcagccggcggacgcgtgcggcggcgcaccggatcaggcggcggcggacggcgcgtgccacgacgtgccgagggcgctgcggctgaagctgatcgccatcccgaccatcctcgtgtcgagcgtcgtcggcgtgtgcctgccgctcctctcccgctccgtgccggcgctccgccccgacggcggcctcttcgccgtcgtcaaggcgttcgcgtcgggcgtcatcctcgccacgggctacatgcacgtgctcccggacgccttcaacaacctcacctcgccgtgcctgcccaggaagccgtggtcggagttcccgttcgcggcgttcgtcgccatgctcgccgccgtgtccacgctcatggccgactcgctcatgctcacctactacaaccgcagcaagccccggccgtctagcggcggcgacgtcgccgccgtcgccgaccacggcgagagccccgaccagggccaccggcacggacacggacacggccatgggcatggcatggcggtggccaagcccgacgacgtcgaggccactcaggtgcagctgcgccggaaccgcgtcgtcgttcaggtcctcgagataggcatcgtggtgcactcggtggtgatcggcctcggcatgggggcgtcgcagaacgtgtgcaccatccggccgctggtggcggcgatgtgcttccaccagatgttcgaggggatgggcctcggcggctgcatcctgcaggcggagtacggccgccggatgaggtcggtgctcgtcttcttcttctccaccacgacgccgttcggcatcgccctcggcctcgccctgaccagggtgtacagggacaacagcccgacggcgctcatcgtcgtcggcctcctcaacgccgcctccgcggggctgctccactacatggcgctggtggagctcctcgccgccgacttcatggggcccaagctgcagggcaacgtccgcctccagctcgccgccttcctcgccgtcctcctcggcgccggcggcatgtccgtcatggccaagtgggcgtgagctgacgatgcatcacactctgcggcatcatgcaattcgctgcattgttagattgagcttggtcagactcgatcatcagctgcagacatgttgtacagtgactgtgacttctccatgttgtactgtaattcaggttttcagtgttgtagcgtggttgttcaggttttgttcttcgtgactgatgatgtacttcaatacgagcatctacatattttcatgattatt

SEQ ID NO: 10334 - DNA, 2136 bp, Oryza sativa
  ref <308>: DATABASE ACCESSION NUMBER: AK107682
  ref <309>: DATABASE ENTRY DATE: 2002-08-28
acaagatatcctccggcgtggttgtcgtgtgttattaattgaaacaaatctcccctctaccaccaccacaccaccaccgccatgtactcctccggcatgaggcagttcggcgccgcctcgaggctcgcgcgccagctccaggtccgcaacttctctcgcaccgcacccgcaaagaagatcattacgcccaacggccctctgcgcgcaaaggaggcctcgcctctcctcaacaacaagtaccccatcattgaccacgagtacgatgcgctcgtcgttggcgcgggtggtgccggtctccgtgcagccttcggtttggccgaggcgggtttcaacactgcttgcatatcgaagctcttccccaccagatcacacaccgtcgccgcccagggtggcatcaacgctgcgctaggaaacatgcacaaagacgactggaggtggcacatgtacgacaccgtcaagggttcagattggctcggagaccaggacgccatccactacaggaccagagaggcgcctgcgtccgtcattgagctcgagaactacggctgccccttctcgcgaacagacgagggcaagatctaccagcgtgcgttcggtggccaaagccaggactacggaaagggtggccaggcctaccgctgctgcgccgccgccgaccgtaccggccacgctcttctccacactctctacggccagtcgctcaggcacaacaccaactacttcattgagttcttcgccattgacctgatcatggaggacggcgagtgcaagggtgtcatcgcctacaaccaggaggacggcactctccaccgcttccgctctcaccacaccgttcttgccaccggtggctacggtcgtgcctacttctcttgcacttctgctcacacttgcactggtgacggtatggccatggttgcccgtgccggtcttcccaaccaggacatggagttcgttcagttccaccctaccggtatctacggcgctggctgcctgatcaccgagggctctcgtggcgagggtggataccttctcaacagcgagggtgagcgcttcatggagcgttacgcacccactgccaaggatcttgcttctcgtgacgttgtctctcgctccatgaccatggagatccgcgagggccgtggtgtcggtcccgacaaggaccacatctacctccagctttctcacttgcccgccgaggtcctccacgagcgtctccccggtatctctgagaccgcctccatcttcgctggtgtcgacgttaccaagcagcccattcctgtgctccccaccgtccactacaacatgggtggtatccccaccaagtacactggtgaggttctcactgttgacgaggccggcaaggacaaggtcgtccccggtctcttcgcctgcggtgaagccgcctgtgtctccgtccacggtgctaaccgtctcggtgccaactctcttcttgatcttatcgtgttcggccgtgccgtctcccacaccatccgcgacaacttctcacccggcaagccccataaggagcttgacgctggtgctggcgccgaggctatccagactgttgaccagattcgcactgccgacggccccaagagcaccaacgaggtccgcagcgccatgcagaaggtcatgcagactgatgtctccgtcttcaggactgaggagtctctccaggagggtgtcaagaagatcaacgaagtcgaccagatgttctcccaggtcggtaccaaggaccgcagcatgatctggaactccgacctcgtcgagacccttgagctccgcaacttgctcacttgcgccgtccagaccgccgagagtgccgccaaccgcaaggagtctcgtggtgcccacgctcgtgaggactaccccgaccgtgacgacgagaactggatgaagcacacgctctcatggcagaagaagccccacggaaagaccgagctcggctaccgtgcggttactggtactactctcgacgaggcagagtgcaaggctgttcctcccttcgcgagaaagtactagattctgggagtgtgtatgtatgtggagggaagggaactcttgtgtacagtttagccgcttttcttgacaaagggatgttgatagcgaatatcgtattgtgaattgtttcaaaag

SEQ ID NO: 10335 - DNA, 1477 bp, Oryza sativa
  ref <308>: DATABASE ACCESSION NUMBER: AK107683
  ref <309>: DATABASE ENTRY DATE: 2002-08-28
acaaatctcgccggtgtgttcgacgacgcgcagtgccggctgtttccccctttcacccccgccccaaccacgccgcctcgccgctcctgcggcgatggggtgcacgccggctgttctccaacatcccaccggcgaggtatgcacgacggtggatgggggtgtggtgaccaacaacatgctcgcgcaacaagatcgtgcgagctcaatggccactttctccccccacccaccacccgccccgctcgccgacgcggcggccatggcgtgcaatcggcagtctaactggaagccgtctgttccccaagatcccatccgcgatggaaacacggcggcggatgtgattggtgtgtccaaccacttgcccgcgcacagctgcacaccaccttacgagctcgatgtcctacacagatctcatcctcagctgcggctcgtccaccggatctcccatggtggaaatctcgtaagtgttctcttccccgtgctgttcgaatgagtctccgtattagccagcgagctgtgtttcttttttggtggttcttgtattttctttcgtttcgcaatctccgttcttggtggtgagcagagaaaactgttttattaattgttggcaggggagaatacccgtatagctatttgatggggattttgcagccgcaagcggcgaattttgggggagtcgtgcatggtgatctccctggcgtgctttgcagattgggcgctgaggggtttggactacggcggtggctcctccgacctctcgatgctcgtcggctcgagcggcggcgggaggaggacggtgggcgacggcggtggcgaggcgccgaagctggagaacttcctcgacggcaacttattctccgacgtgcacggccaagccgccagcggatacctctactccggaagcactgtcaacggcgccggtggttacagtaacggcggatgcggcggcggaaccatagaactgtccatgattaagacgtggctctggagcaaccacccgcagccgcagccatcgccgccgcagcacgctgatcaggacatgagcaccgatgcgagcgcgagcagctacgcgtgctccgacgtgctggtggggagctgcaacggcggcggcggcggcgccgggggcacggcgagctcgcatgggcagagcctggcgctatcgatgagcacgtggtcggtggcatccactgcagggggcagcgtcgtcgtcgcggccgagagctcgtcgtcggagaacaggcgggtggattcgccgggcggcgccgtcccgaggaaatccatcgacaccttcgggcagaggacgtctatataccgagctgttagagatttccattaacctttgctagtgttattgttgctgatcttgttctgcatgttccagctcaagtatttatcatcaattttttaaatttctcttcatgttttagtgtattgctcattaatctcaaagcaaaataattaatttttggatcgaaat

SEQ ID NO: 10336 - DNA, 1508 bp, Oryza sativa
  ref <308>: DATABASE ACCESSION NUMBER: AK107684
  ref <309>: DATABASE ENTRY DATE: 2002-08-28
atcgattgatcaccaacccctgtttcctgttgggaacgacccgtttccaaccccccttctctgctccacattcatcatggctgcgatgccaaaaccctccgactccaagacgggcggcaaggccaccgtcttgctcggatcccagtggggcgacgagggcaaaggcaagctcgccgatgtgctcagcggccagatggacgtctgcgcacgctgcgccggcggcaacaacgccggccacaccatcgtcgccgacgtcaacggcgtcaagaccaagttcgacttccacctgctcccctcgggtctcgtcaacccgcgctgtgccggattcatcggctccggcgtggtggtgcacgtgccgtcgttcttcgccgagctggacaacatccagaagaagggcctcaactgcgacggccgcctcttcatctcggaccgagctcacctcgtgttcgacttccaccaggtcgtcgacggcctcaaggaggtcgagctcggcggaagcagcatcggcaccaccaagaagggcattggtccggcctactcgtccaaggcgtcgcgctccggtctgcgtgtccaccacctctacgaccaggagctcttcgcctccaagttccgcaagctcgtcgagggccgcttcaagcgttacggacactttgagtacgacaccgagggcgagatcgcccgctaccgtgccttcgccgagcgtctccgaccgcacattgtcgacggcgtcagcttcatccacaccgcgctcgctcagaaccgcaaggtgctggtggagggcgccaacgcgctcttcctcgacatcgactttggcacgtaccccttcgtgacgagctcgtcgacctccatcggcggtgtgctcaccggcctcggtatcccgcccaccgccatcggcaacgtgatcggcgtcatgaaagcctacaccacgcgtgtcggcatgggacccttccccacggagctgcacgaggagatcggccaccacctgcaggaggtcggagccgagtacggcacgacgacggggcgccgacgccgctgcggctggctggacctgatcatgatgcgctactcgtgcctgatcaacggctacaccagcctcaacctgaccaagctcgacgtgctggaccagctcaaggagctcaaggcggcggtgggctacgttgtggacggcaaggagctgccgagcttcccggcggacctcgaggtgctggccaaggtggaggtgcagtacaagacgctgcccggctggcagcaggacatctccaaggcccagacgtgggaggagctgccggagaactgccgcgcctacgtcgagttcctcgagcagttcctcggcgtcaagatcgagtggatcggcgtcggccccgcccgcgagtcgatgatccaccgcgcatgatccgtcgagcgactcccaactcggcctcgccacgtacggctagcttgacgtgtctctgccagtcgaccatacgcagtctctgcgttgtttccatagaatccgaatagtgccctag

SEQ ID NO: 10337 - DNA, 1521 bp, Oryza sativa
  ref <308>: DATABASE ACCESSION NUMBER: AK107685
  ref <309>: DATABASE ENTRY DATE: 2002-08-28
aattggaagaatcgcactgccccgcctggagagcagagcgcgctcggctgaaccgggtcatccggtgggatctcccgccgccgcctcgagcccagaaattggccgagctcgattcaagctgaaacgcacatacacagcgcaaagcagcttggccggggcgcagagatgactgacgaggctcgcaagcgaaatgcatcctctcatgccggcttttcagcggatttctggtccggggtcgtcgagccaacaacgcaagcaaccctctccgcatcctttcttcccctcttcttcaccagtcaccatcaccgtcaagcctgtccgcaaaagctcttcctcctctggtcgccatcgatcccgcgttttggagcaaagcagcctgcaaaactattacgatcaagtttgcgtgcacgttcatccactacccgcataacatcacatagccacaatggctgacgatcagaccacagcagccatcaaggacgaggagttcgagcagaagaagcaggccacctcgtccgtcaagtccttcctctccggtggtttcggtggtgtctgctccgtgcttgtcggacaccccttcgatctcaccaagactcgtctgcaaacggccgccaacggcacctacacaggaggcctcgatgttgtccgaaagaccatcaaggccgatggcatcaagggaatgtaccgtggtatgggcccacccctggtcggagttactcccatctttgcgctctccttctggtcgtacgacatgggcaagaagttcgtctacgcgatgacccctggccgcacagatcccaagctttcgacaggcgagcttgcctttgctggtttcctcagtgccgtccccaccacgctggtggcaggccccgccgagcgagtcaaggtgctcctccagctccaaggccagagcggcagcactggccccacctacaacggtcccgtcgatgtcgtccgtcagctctacaaggagggcggtctcaagtccatcttccgcggcaccggcgccacgcttgcacgagacggtcccggtagcgccgcctacttctgcgcatacgaggtctcgaagcgcatgctcacgcctgccggccaggaccctcagcagctcaacttcctcaacgtgctcaccgccggtggtctcgccggtatggccatgtgggcgctcgccatccctcccgatgtcatcaagtcgcgctaccagggcgctcctcacggcacctactcgggcttcctcgactgcgcacgcaagaccgtcgcccaggacggtgtcaaggcgctcttcaagggcttcggccccgccatggcccgtgccttccctgccaacgcagccaccttcctcggtgtcgaggtgtctctctcggtcatgaacaagatgttctaggctgccaaaccattcccaggaaacctggaacagcagcgctaagatccagcaatctgcgccacacacgagccgatccattctttgtacttttcgaacatggtcacgacctagacgacgaaaaattcagcctctatagatcc

SEQ ID NO: 10338 - DNA, 1507 bp, Oryza sativa
  ref <308>: DATABASE ACCESSION NUMBER: AK107686
  ref <309>: DATABASE ENTRY DATE: 2002-08-28
accatctacaaaacctatccctagagcagcaccgcaacatctgcagctcaacacatcttgcatatccaccaacccgcgcctcttctccaggcgcatcacactgcccaattcacaccatcgacgacaaacacaatcgtatctgcgaaaccacaccgtgcgacacgcgcacccatctacactcacttaaacgacggcaactgcaccacggtaaagctgtcaagctgttttccgcactcgtcagcgctgtctctactcttcgtagcaagccggctgcgccaactcagcagacccgccgagctatcgagacctcctccgcagcgtcttcggaatcccccgcaccttctctgatcatggcggtcacccctcgcagcaggaccgcttcggcaaacgcctcgccttccaagtccaacgggcgcaagcagcccgccaaagtcgccatcgacttttcggacgaggatgaccctgcaggaaccccgagcaggaagactggcaacgccaaggccaaagccaacgcgaaagaccctattgagatcgcagacgacgacgaggaggtcggcgaaggcgaaggcgaagaagaatacgagattgaagaggtgcggggtcatcgtcaaaagaagggcaaagaagcatacaacatggaatacctcatcaagtggaaaggctatgcagacagcgaaaacacgtgggagccagaggcgcagcttccccaagatttggtcaacgcgtactggaagaagcagccttccaagtcgcagcccaagaagttcgaaaagcgcatgttgcaagagagcgaggaccaggagagcgaggacgacatcgagcccatcgaggcggacagcgacgaagaccaatacgtcaaacagtcgaagcgaggctccgcagccaaggccaagcactcagtatcacccaagcgcaacggccgtgcaagcagcagcacgggctcgaagcgctcgagcccttccaggtcagcctcgggcagcgcgcgtggcgccaagaagcgacgaacctcttcctccggccgcggtcgccgtgcgtcttcgtcggacgacgatcagtattccgaagacgacgaggatgacgaggaggaaagcgacgaggaggacgagagtgttctggagaaggagcacacggcgctcaacagcatccgcaccaggttcttgaaatactttgtcaaagagaaggaggactgggaagacgaggtggagggcgtcctcaacatgcagcgaaaccctgatgacgatgagctgcgcagccatttgcagttccgcaacaacgaccactggcgcaaggccatgagcaagatgagcttcggccacaaatacatcgacgagggaccgcagatctgggtggccaacaagacggccaacgaacgctgcccgcagaaggtcatcaaattctacgagacgcacctccgcttcgccgacacgcacaaggctgtccgctagatcggcccccgagtcctctctgtaacaccagtcttgtccatacgaatcgcatcattcactcc

SEQ ID NO: 10339 - DNA, 1441 bp, Oryza sativa
  ref <308>: DATABASE ACCESSION NUMBER: AK107687
  ref <309>: DATABASE ENTRY DATE: 2002-08-28
gaagcttttcctcctgaacaaatccccgaacttgcgaagtatcggcctcttcttcttctgcttcatggattgatccatgctgtcgtagtggctctcgtcgacgtgatcgaactcatcgtcgaagtcgctcatggcggcttccgccgccgacttgaggtcggcgatgttgctcagcgacgcgaacacccggtccttgtggttcaggttgcccatcctcgccgactgcgagaagccgcccttgaacttggcgggctcgccgatcgagtacctccggctgctcggcgtcctggacttgtccgccgccgtccaccggtgcgacgccgcctccggtgtgcccttggcgctggagacgagacgaacgctcggcaggtgctggtcgaagccgtagtccgccacggaggcggtcctcgccgacgccggggtgctgcacgcggtggccgtcgtcgtcgtcgtggcggcgagcaggctgttgagctccttgaggctgccctgcgcggcggcctcgctgaccttgatgcactcgtactcctgccggaggctctgcagcgcgccgtccttctcggcgacgacgtcgttgagccgggcgttctcgccacgggcgagctccagcgactccttgacgacgttggcctcggcgacggcctgcttcaggatgtcgcggagccgggcgttctcgtcgcggatcacgcgctgcgactcgacgagcttggtgttctcctggcgttcgcggttcacctcctcctcggacgcgcggacgcagtcgaggagcacgcgctccttgtcgccccacgcggcggcgcactcctcggcgtcgagcctgcaccggtcgtgctcgtcggacacgtcgcgcagcctcgcctcggcggcgtccagctcgtgcctcagccgctcggcctcggcattggcggcctccagctcggcctgcgcctcggacagccacatcttcacctgcttcgcctccatcgtcacgtcggagagcgcgacggacaggtcgtcgagcgccttccggctcttctcctccccctgcatcgccgtccggagctcgcagcgcagggccctgatctcatcgtccccgccgccgaacacgaggtccttgacgctcctctgctccaccgcgccaccccgccggctcaccaccgccgccgccgccgaggcctcgaggctcgcgttggcttgctgcagagtggtgatctccagcttggcctcctcgagcgagatcttcgtctgctccagctgcttcgtctggtatattagcgactcgagcatcttgcgctccgactccttggccttctccacctcccgctgcaagagttgcaccttctccgccgcgtccttctccttcctcagctcctcctccatctccgacaccttctgccgcatcgcgccgtcgcgacgcctctgccagaaaaaaaaaacacgacaatcaaaatcaagcagagac

SEQ ID NO: 10340 - DNA, 1638 bp, Oryza sativa
  ref <308>: DATABASE ACCESSION NUMBER: AK107688
  ref <309>: DATABASE ENTRY DATE: 2002-08-28
atagatgaagtcatggacctagttgagttaactggactgaagaatgccatggttggcctagcaggagcgacaggcctgtctgctgagcagcgaaaaagactaacaatagctgttgagttggtagctagtccttccattatatttatggatgagccaaccactggtttggatgctcgtgctgcagcaattgtcatgagaacagtaagaaagacagtagacactggacgaactgttgtctgcacaattcatcagccaagcatcgagatatttgaatcttttgacgagcttctacttatgaagagaggaggtcagctcatatacagtggttcattaggtcccctatctagcaatatgataaagtatttcgaggctatacctggtgtccctagaataaaagaggggcaaaacccagcagcgtggatgttagatatcagttcgcgcacagcagaatatgagattggagtggactatgcagaaatttatcagcgctcatccctatactgggagaacaggcaactaattgatgacctaggaaaaccagaaccaaacacagaggatctacattttccacccaaatattggcaagactttagggcacaatgcatggcatgcctgtggaagcaaaattgtgcttattggaaaaattcagaacacaacgttgtccgattcataaacacatttgctgtgtcaattatgtttggaattgtattctggaaaattggctcaaccattaaggatgagcaagatgtattcaacatactaggggttgtgtatgggtcagcactatttctgggtttcatgaactgcagcatcttacaaccagttgtaggaatggaaagagttgtcctctacagagagaaggcggcaggcatgtactccactatggcgtacgccattgctcaggtggcagttgaattgccttacatgtttgtccaagtattcatcttctcagcgattgtgtacccaatgattgggttccaaatgactgccacaaagttcttttggtttgccctctacatggtgttaagtttcctgtactacacgctctatgggatgatgacagtagcactaacacctaacattgagatagcagctgggttgtccttcctcatcttcatcttttggaatgtcttctctggattcatcattggaagacagatgatcccggtgtggtggagatgggtgtattgggcaaacccggcggcatggacggtgtacgggctcatgttctcgcagctgggagaccggacggagctgatccaggtgccagggcagccagagcagacggtgaaggagttcctggagggctacctcggactccaggaccgctacttcaacctcgtcaccagcctgcacgtcgccatcatcgcgctcttcaccttcctcttcttcctctccatcaagcacctcaagttccagaggcggtagcacggaattgatgcgtgcaaactgcaaatatacactaataaccaatcacttaactgtacaaatgtaagagaacataacaaaaatgcacaacataaggatttgttactaaaatatgtaaaccgtaagggatttgcatgtgtaatagcagtatagaattgttgtagtaccatggtcgagaaatatacaaaagaaagcaagtgtatatgttgg

SEQ ID NO: 10341 - DNA, 524 bp, Oryza sativa
  ref <308>: DATABASE ACCESSION NUMBER: AK107689
  ref <309>: DATABASE ENTRY DATE: 2002-08-28
gaagaagaagaagagccggccgtgtttccctggagcaaggctgcggccaagaggcacagtgccgccgccaccgccgtcgtcatccggcccgtcgccggccacgttcgcgtgcgtcgtcaaggcgctgttctcctcgtcgcgcctcccaagaaagcccaaggctccaacggccgtccctctgccgccggcatcgccgccggttccgcagccaccgtgcatgtcggcggcggcgacgacgacgtcgaacaccaaggcgtcggagcggaggtccgtacgcttctgccccggcgccgagacgtcggtggtgcggcgcagggtggaggagctggtgcggagcctcgccgatgtggaggaggacgaggacggcagcgacgcgagctccgatctcttcgagctggagagcctccgcggcgccgacggcgacgagctgccggtgtacggcacgacgagcctcgcgaccaaccgcgccattatattgcgcagagagcagcttgctagttcataaacagtggcaacttcaagcc

SEQ ID NO: 10342 - DNA, 897 bp, Oryza sativa
  ref <308>: DATABASE ACCESSION NUMBER: AK107690
  ref <309>: DATABASE ENTRY DATE: 2002-08-28
ctctcccctggcctttctcttcggtgggaagcggccgcagcagcgtgcggcggtggcggtagggagcggcagcggcggcagcggcagtacatgggtgagctgaagcgcgccctcgacgcgcgctgccacgtgttgctcgagatgccgacgggcaccggcaagacggcggcgagctcttccccatgtgcgcggacggctgggagctcctcactcaagcgcggacgccggcgagctcctctcccatcgcgcggacggccgggagctcctccccgcgcgcggacgccggcgagctcctcccccgtcgcgcggacgccgacgagctcctcccccggtgtgcggaaggcctggagctcttcccccgcgcgtggacggccgggagctcctcccccagcacgctccttccccggcgagctcctcccccggtgcacggaaggccggaagctcctcccccgcgcgcggacgccggcgagctcctcccccgtcgcgcggacgccggcgagctcctcccccgtcgcgcgggcgccggctcctcccgcggcgcgcggacggccgggaactcctaccccacgcacggacgccggcgagctcctcccccgtcgcacggacagcaagctcttcccccagcatgcggacggccgggagctcacatgtggaaaagatgacatgtggagccaactaatttttgttttgtgaatgacatgtcggtcccacaattttttgttttttgtttttactcttgtgccagataagcgacacgtcgacgacacgctggacgaaaaccgggtcaacactgccacgtggtcgccacgtcagccaaaaccgcctccaaaaccacccaggggcatagtttgcaccggttttgatagttggagtcgatatgcccggttttgttgttgg

SEQ ID NO: 10343 - DNA, 518 bp, Oryza sativa
  ref <308>: DATABASE ACCESSION NUMBER: AK107691
  ref <309>: DATABASE ENTRY DATE: 2002-08-28
acctcactagctcgaccaagccgatcccctctctcgatcactctcaactaattctctcaacctcagctgatcatcggagatggttcaccgggcggcggcggacggcgcgcggcggcggctgcggcggcagctgtcaatgccgggatcagggaggccgcagcagcagacgaaggaggcgtcggcagcgctggtgcggctgccgtgcaacaaggggaaggcgtcgcggttcaagcggagctgcttcagcgaggaggacgacgccgcgtccgtcgcgtgcgtcgtctgcgcgccgtccctccctctcattaattagttaattagtcatcactctctctctctccctctatgatctagttgattaattaatcagtcagtgaatcacacttggaggctactgtactcgctagtttgatcctcgcagctggtaatcttgtagtggcattaattaatgtgcgtgtgtgtttgtgtatgtgttgcggtaattaaatggtgatatatataattcgtcctgtccgtcg

SEQ ID NO: 10344 - DNA, 758 bp, Oryza sativa
  ref <308>: DATABASE ACCESSION NUMBER: AK107692
  ref <309>: DATABASE ENTRY DATE: 2002-08-28
ctcacgcacgtggcggagcagaggaacagcgcgcggccggccgacggcctgagctgggacggctcggcatgcggcgaaaaaagcggcggcgctccgccggggtatcactgccggcgacggcgaggaccaacgccgggatctcctcattcagcgaggaccaacgccatggtgacgagcagcgccgggatctcctcgttcagtgaggaccaacggccagcctcacctccatcctcacggtgcagcagctgtccacggacatccagggtctggacggcctcattgccagctccgaccccatcggcttccaggtcggctccttcgccaagagctacctgatgcaggagctgggcgtgcccgagtcccgcctctgggagctcgccatcaccgactactcctccaccctgcagagcggcatcgtggcggccatcgtcgacgagctgccatacgtggagctcttcctctccatcaactgccagttcaggacagtggggcaggagttcacaaagagcggatggggattcgctttccatcacgactcccctctggccgtggacctttcgtcggctgccgaggaggaggagggtgacgtggccgccgaggaggaggaggccggagagcgaggtaggtgcggaggcaatccgatctgatgaattggcggaggcggcgctccatggcaggggcaatcttgccatttgaaaaatattatcacctcttttgatctggaaaatataaaatattgtctctggtgttctataacc

SEQ ID NO: 10345 - DNA, 966 bp, Oryza sativa
  ref <308>: DATABASE ACCESSION NUMBER: AK107693
  ref <309>: DATABASE ENTRY DATE: 2002-08-28
atgcggacattgcagaggcggctctcgcagctcgtgctccgccgcctcctgtcgccgccgccgccgcccgccgcccgccggcccgcaccggtggcggcggaggccgtctccggcggaggagcgacagccctacttcgccgcgggggtggctccggggtggcggcgggcggctggagtggcggcggctcggggcttcggttggctcggaggctctgcacctacgacgagagagatgacagggcacttgaggaggaagctgagaagaaatttggatggatattgaagatattctttataggaactgctggtcttgttggttaccaattctttccttacatgggggataacctgcttcagcagtccatctcacttttgcgtgtcaaagatcccttgttcaagcgaatgggagcttcccgattagctcgttttgcagttgatgatgcaaggagaatgaaggtagtggagatggggggagcttaagaacttcttaatgtattggaaggtgctaaagatgataaaacacgtaaacaaatcctaaaagctcttcatgcactttcgaagtctgaggaagcagcagggtttttggacaaggcgggcgcctacgtaatagtcagttccactcccaactccctcgagtatgctgagatcgagacctacaagactagcctcctgaaggcgtttgatgaactgaagtcgtgacgataaatggctgggagtggtgaatcgatctacatgtttgttttaaactggacgtatccgagcattctttgttgatcagaccttcggtcttgttgctggaatcatgtctacatacatttgttctgaacaggcagcacctttagagagttgttattttgtctaaacgaatcttcttccttttttctagaggaaaaacattggattggctttatctgtataatgatcgtgtaggcactgtatgcttccataataattgttgttttggac

SEQ ID NO: 10346 - DNA, 542 bp, Oryza sativa
  ref <308>: DATABASE ACCESSION NUMBER: AK107694
  ref <309>: DATABASE ENTRY DATE: 2002-08-28
agctcaagccctctcctggagtcttctcgtctgcctccacgaccaacacgcgcgccattggacatggagacgccggccaaccacgaccacggcgccgccccgccgctgccggcggtagcccactcgagacttccagcggcgtcgacggcgggacaacgacgccggtggtggcgaaagaggaggagaagaagagggaggagggacgatcagcggcagggcagagagcttacggcgagggcgtgatcgcgccgccggtgaggaggggggaggaggggaaggcggcgccggcgacggcgaggccgctgccgcacgagcaggtgccgcagcccgcggacgtgtacaacccgcagctggagcgcctctgaatcttttctctctgatcaatccagctcttgctgattacctgagcttctgctacttctcggagttaaataatcacgcaggatgcgctttagtttctgcttaaatatattaatcttgttcataagcaactagtactactactttgtatccctgcttataattagcatgtacaccttatt

SEQ ID NO: 10347 - DNA, 768 bp, Oryza sativa
  ref <308>: DATABASE ACCESSION NUMBER: AK107695
  ref <309>: DATABASE ENTRY DATE: 2002-08-28
aggataaattagggctttctcctcgtgctccctgcgattgcgccgcccccgattcgcccaatccaatgccgcgcgcctccagggccccgaatccccctccccccgccgccgccgccgcggagaatggtgagaacccccccgcccaatcctcctccgcgtgggggttcttcgtgttttttttttgttaggatgtttggttcgcgtggattcgttgcggccgcgggctggtggtaattccgatgcattgttgggttgtgttgatggctttggttcgggagattccggttcttggttcgggggggatttcgcgtagatgtgccccacggtttagttgcgacttgagtacggattgctcgaatcatccatgatcggatcctgatgtcgcgttaatcgagtggttttagtactgggagtagagaaatgtcatcaggaaagacgcagccgggccagaatttttttttctttttttttggctttgggaattcggcacgcggctccacagcggccgctatgtagggataattcagaagtaactgctgttgttttgattgttatgctatggaatcttgtaaagatgggcaggtgtttctttatttgtgttggattggggagctacataatcaaatgcctttcttttgatggtctgtttcactaaaagaaaaaatatcatgctgctgggtttcctttccaaagaaatgtaatctgttccttgagaattggctgtatgaactgttaattggtggcaatcaaactgctctttttcccttg

SEQ ID NO: 10348 - DNA, 601 bp, Oryza sativa
  ref <308>: DATABASE ACCESSION NUMBER: AK107696
  ref <309>: DATABASE ENTRY DATE: 2002-08-28
aaaccttgcactgctcatcgatttctcttcctgacggcgacaatggcgtcgaagaacagcaagctctcggtgtcgtcggtggcggtggcgctggtggcgctgatggtggtggtggtcggcgccgtcgtcgcgacggctgcgggcggcgaggagtactacggcggcgtcgcgcgcgcggcggatgggtgcgagccggggcagggcgtggtgcccaaggacccgctgccggggtgccgggcgtacctgctgcggcggtgcggcggcggcgacccgccgggggtgcgggcgcggtgctgccaccagctgagggaggtggcggcgcgctgccgctgcgacgcgctgcgcgccatggtggaggtgctcgtcgaggaggaggaggcgccgctggcgtgcaagaagggggccatggccgccatcgccgaggggctccccgggcgcgacgagtgcgacctcgacacgcgcgccgacgacggcggatcgcgccgttgccacttggtgattaattgatatctgatgctgtttaatgataaataataatcgccattgttatattctagattatttatttatcaaacgaataaaatgattatggtcgcgtgct

SEQ ID NO: 10349 - DNA, 602 bp, Oryza sativa
  ref <308>: DATABASE ACCESSION NUMBER: AK107697
  ref <309>: DATABASE ENTRY DATE: 2002-08-28
atcttataagttctgaacaatggcaggcggcgcctcttctcctagggtggtcgcctgcgtcgtggtggcgctgctcctcctgtccttcgccgtggagccgctggaggcggtggccgcggcggcggcgccggcgacggcgacgaagccgatccggtgccggaagtgcgaccacgcgtgcaagaagtcgtgcaagggctacggccgcaactcggactgcagcgtcccctgcggcgacccatccaacaaggccggctgcaagagctgcctccaggcctactactcgaagtgcctcaactactgtggccaggcctgccgcgccgtctgcatcaactgatcaatttctaccggctaaattcgtccgaaactgggtgcatccatatgtgttgtgacttgtgtagacgacagtgttgattactgggtgtgatcaaataagggaggctctgtgctgccagccagtacgaatatgcatgtttaatttgcaaatggagatgctcacacactaattgcttggttagtgttccgttcaagctagatttgtgcaattattagctatgtgctgaagtgatatggaaagttgtgcacgcttgttaaccgttccactt

SEQ ID NO: 10350 - DNA, 1044 bp, Oryza sativa
  ref <308>: DATABASE ACCESSION NUMBER: AK107698
  ref <309>: DATABASE ENTRY DATE: 2002-08-28
gcaccaaactaccccaatggcgccacccctgctcctcctcctcgcttctctcctcctcgtcgcagcgcggcgagccctcggcctcggcctcggccagtggcagcccggccacgccacgttctacggcggcggcgacgcctccggcacgatgggtggcgcgtgcgggtacgggaacctgtacagccaggggtacggcacgagcacggcggcgctgagcacggcgctgttcaacaggggcctgagctgcggctcctgctacgagctccggtgcgcgggcgaccaccgccggtcgtgcctccccggcggcgccaccgtgacggtgacggcgaccaacttctgccccccgaactacgcgctcccgagcgacggcggcggctggtgcaacccaccgcggcggcacttcgacctcgccgagccggcgttcctccgcatcgcgcggcacgccgccgggatcgtcccggtctccttccgccgcgtggcgtgcgccaggaagggcggcgtcaggttcaccgtcaacggccacgcctacttcaacctggtgctcgtcaccaacgtcggcggcgccggcgacgtgcgctccctcgccgtgaaggggtcggggtccgggtcgcgcgtgggggggcggtggcagccgatgtcgcgcaactgggggcagaactggcagagcaacgcgtacctcgacggcaaggcgctctccttccgcgtcaccgccggcgacggccgctccctcacctgcgccgacgtggcgcccgccggctggcagttcggccagaccttcgagggcaggcagttctagattagtttagccaagaggattattatctcttaattcttactagtatcttttgagtttaattgcacacccaatcggtgtttagtgaggtctagtcgtctagtagatgctgaggttgctgtggctcctgcaagagaaggcaaggcatttcgcgcccgcgtgtcagaggccggatggtttgcagtttgctgctctgctcttagttcagatttgtacagggcatgtggcatgagtaaatgagttgattagtt

SEQ ID NO: 10351 - DNA, 647 bp, Oryza sativa
  ref <308>: DATABASE ACCESSION NUMBER: AK107699
  ref <309>: DATABASE ENTRY DATE: 2002-08-28
gaccctaggggtttttgggtcggccttgttcgagcgctccgcttgctcgcgttcacatggcggcggcggctttagggctcccggcctgagacggtgcggctccaccgcggatcgagccggcggcggtggctcccggcggaggcggcagcggtggcggcacggctccatcacggatcgaggtggcggcggcggctcccggcggaggcggcggcggtgacagcttcgacttcgcggtgtgctccaccgcgttttgaggcggcggcagctgggcgtgctccttcagtcctcctcccgtctccaactccccccaagactgttccttctttcggcggcggatggaggcaccggcggacggcggctacctgcttggtggccaaccggcgaggtgctccggaggacactccaccggcagcaacggcgagggtttcggaggacacccggccacatcgccatcttcatctagctgggtttctctccctcgtgagcacaggtatgatttccagatgatgggaggagctggtcaagggcacaccgcacactcgacctgcaggacgatggcaccatgtgctttttgtttttctgaacgaatcggcaaactgccaatttcattgaataaagaatgaagaaaactttacaagtatgaaagg

SEQ ID NO: 10352 - DNA, 618 bp, Oryza sativa
  ref <308>: DATABASE ACCESSION NUMBER: AK107700
  ref <309>: DATABASE ENTRY DATE: 2002-08-28
aacacaaacacttgcaacccccaagcatttccgtttcttgctctcctccgtccgtcgagccaatcaggcaagcgagatcatcggcaccttcgtgctcgtgtacaccgtcttctccgccaccgaccccaagcgcaacgcccgcgactcccatgtcccggtgttggcgccgctgccgatcgggttcgccgtgttcatggtgcacctggcgaccatccccgtcaccggcaccggcatcaacccggcgaggagcctcggcgccgccgtcgtctacaacaacagcaaggcatggagtgatcagtggatcttctgggttgggccgttcatcggggcggcgatcgcagcgctgtaccaccagatcgtccttcgtgccagcgccagggggtacggctccttccggagcaatgcttaagccgcaatcaaatgtgctctttctcctttcagagtttaaggtgaatgggaagaacagagcacagggtgatcagtagtagaagcggcttcaattaagaagagtgaagcctgcaccctcaagtgttttgtgtgtgcgctatcaaaagcaagtgtgacattgttcgatcgaataaattatgatatatatgaatgaatgcaagatatgaggag

SEQ ID NO: 10353 - DNA, 1077 bp, Oryza sativa
  ref <308>: DATABASE ACCESSION NUMBER: AK107701
  ref <309>: DATABASE ENTRY DATE: 2002-08-28
aaagttatctcactgtcagagaccagacaaagaagctctacatccaaaccacaaaacgcaatggcaaccgaactgcccactacaaacggacacagcgcccaagatggcgagaacaacttcgctgtcaaggcgggtttggcaagaatgttgaagggtggagtcatcatggacgtggtcaacgcggaacaggctcgcatagctgaagaagctggtgcgtcagcggtcatggctcttgagcgtgtacctgcggacattcgggctcaaggtggcgtggcacgtatgagcgaccccaagatgatcaaggagatcatggaaaccgtcacaattcccgtcatggccaaagcacgcattggtcactttgtggagtgccagatcctcgaagccctcggtgtagactacgtcgacgaatctgaggttcttaccccagccgacgctgtccaccatgtagacaagcaccccttccgcattcccttcgtctgcggatgccgcaatctcggcgaagccctccgccgcatctccgagggcgcggccatgatccgcaccaagggcgaagccggtaccggcgacgtcatcgaggccgttcgccacatgcgcaccgtcaacgccgagatccagcgggcatcgtccatgtcttcgacagaactctacaactacgcaaaggagctcggcgtggattacaacctgctgaaggagacggctaagctgggacgcctgcccgtggtcaatttcgcggcgggtggcgttgcgacgcctgctgatgcggcgctcatgatgcagcttggatgtgatggtgtattcgttggaagtggcatcttcaagtcgggagatgcggcgaagagggcgaaggctatcgtgcaggcggtgacgcactacaaggacccaaaggtgcttatggaggtgtcgatggatctaggtgaggccatggtgggtatcaactgcggggatctcggggagaaggataggcttgcgaagcgtggctggtaagaaatgtacttcggacagggacggttacgataggcgttgaggtgctcaggacatagagctcccaaaatatagatgtaatgacatgatgaaaac

SEQ ID NO: 10354 - DNA, 863 bp, Oryza sativa
  ref <308>: DATABASE ACCESSION NUMBER: AK107702
  ref <309>: DATABASE ENTRY DATE: 2002-08-28
tagagtgctcaaagcaagccatcgctctggatacattagcatgggataacatcataggattccggtcctattgtgttggccttcgggatcggagtaatgattaatagggacagtcgggggcattcgtatttcatagtcagaggtgaaattcttggatttatgaaagacgaacaactgcgaaagcatatgttcccaattactactactctctgcctcatcctcatccccatccccatcccgactacctcatccccatctactccgactccgagagagagagaccgcgagaggcggcagcgtggcggggtggcggcgtcggattggcgatgacggctgttgattcggtgacggagtgacggcggcggtggttgatccggtgacggagtggtggctatgtgcgaccgcgcgcgcgggcaaatccggtagcggtcctaagtggatctccggcggcgtcggcgatggtcgacggtggatccagcgtcggggacggtggtctcgagcagatccggcagccgtgtgagcgagcggatctggcgggagtcgtgggcagatctccgacggcggtcacggcctcgcgggtggatctccagcgacggagacgacagtggcgggcggctctccggcgacggccatgcaggtgctccccgtcctctttcactctcccatggtgggctcgttgctgcttctcctctcccatggcggtaaccaactactttggagagagacaaagctagagcaaataagatcggattgtttattccttatgggtggttcttatgggtggttcttatgcataatgctacctcaagaaaaggatagctataagaaccacctccacaatatataagtagacctatgagcat

SEQ ID NO: 10355 - DNA, 472 bp, Oryza sativa
  ref <308>: DATABASE ACCESSION NUMBER: AK107703
  ref <309>: DATABASE ENTRY DATE: 2002-08-28
aatctccattgattccccatctcgcgcgattggcggcgtcgagccggcgtccagctgatgagtgacgacaggcgacagcatgggcgagcgggaggtggcacatcgacaggcggagcagtcgagcagcggaagtccaccagccactggccgttgggcgcacctgcggcagtcggcaagggcggctgcaggctgtggctgcagttgggcagcgcggcgcatcagggccagagccggcgcggcagtcggcgggccaacaagtagcagggcaggccagcagcagcagcagagcaacaggctgattcaatctttgctatttgtcttatccaccttaaagatagtctattaatcgatctttgctaggactatctgttttgcagattatttatgtctatcctcctttggctatccctgaaacttcattagttgaggtaaattttagtgatggaatgtgacgaggggttgttgtcatgct

SEQ ID NO: 10356 - DNA, 525 bp, Oryza sativa
  ref <308>: DATABASE ACCESSION NUMBER: AK107704
  ref <309>: DATABASE ENTRY DATE: 2002-08-28
cttctccctttcgtccccattccccacgccgtcgcaggctcgtagcctagctagcggcgtgccggtgccgactcccgatctcaatctcgtagggccgccgcgcgcctgccgcgtcagcacccacgcagggtcgccggcttgtcgtgctcgcgtccgcgcagggccgctgcgcctccaggtctcggcactgccgcaccaggtcccagcgccacagtcgtctcggtctctcggcagcactgaggacgccaaggacttggcaccggccaccagacgtgaaggctacggtggcaagaaagacctactccgaactatgtttttgtgtatgcctggacaacatgtgtagcggtgataactaatgagtgatcgactggtgattgattaatgatcatgtgttattgtgttgttgcttaatatgagaatttgatggatagtgttgctgaggggaaattcttgggtacaaatttgttgtactgcttgttgctgcaatgctgttgcaactgaataagtaataaactgatgatgtgc

SEQ ID NO: 10357 - DNA, 714 bp, Oryza sativa
  ref <308>: DATABASE ACCESSION NUMBER: AK107705
  ref <309>: DATABASE ENTRY DATE: 2002-08-28
agatccaacacctcctccctcagatccacaggcggcagcaccgcgggcgatcggaggagagggtggtggcgggctcggggcgcgggcggcgtgctcgggtgtgggcgatagcgctcgggtgcgggcgacggaggagagtgcggcggcgagctcggggcgcgggtggtgaggtcaggcgtgggcggcggcgctcgggcacgggtgacggaggagaggacggcgtgaggtcaggcgtaggcggcccgggcggcggcgctcggcgacagggaggcgcgaggcggcggatccggcgacggggaggcgcgaggtggcggatccggcgatggggaggtgcgaggtggcggatccggcgacgggaaggcgcaaggcggcggatccacagcggtggtggcgaggcggaggcggtggaggtcgccggggctcggcagcagggtcgtcgaggcggtggaggtcgccggggctcggcagcagcgtcgtcgaggcggaggcggttgaggccgacggggctcggtagtggcaacggtgatggtgcaggggacttcaaggacgacgacgccggcgacagcggttctctgtatttgtgatgcttgtaatatttgtgatgatatttgtgaagcattgtatttggattgatgcttggtgttcaaattttttgttaaatgtgtggatatttttgatgcttgaatgcttgggagaatggaaatttttagctgt

SEQ ID NO: 10358 - DNA, 667 bp, Oryza sativa
  ref <308>: DATABASE ACCESSION NUMBER: AK107706
  ref <309>: DATABASE ENTRY DATE: 2002-08-28
aaattcattcagcggccgcacgtatcgcaatatatgacgtcgcacaggcataaagatctcctcctccccgccacggcacccaccacgccccgcgacgacgacggagccgccgccaccttgttcccgccggcgcagccgccgcgcgaccacccgcagctcgacctgagcctgtccatccgcattgggccgccgccgccgccgccgtcgcacacgcgcacggcgacggcgacggcgcaggcgcaggccggccagcagaagaaagcatcagcagcagcgggcttcgacgacggcgacggcgacgacgtgcgggcgctcgccgcatcggcgccgccgcgctcgagatcacctgccacgcttgcatgcagcgcttccactcctagcgctaatttttaactaatcaacctcgccgtcgccgtcgccgtcgccgtcgttcatctccatcgtctccttccttggtacgtagccagctggcacgccacgtagcatattggcgatacgtacgtacggtactatgcatgtacgtgtgcgtatacacgtacgtacgtacgtacgtacaccaagcctcgacgtttgctggatatggctgtacgtagttagttcgatctgcacactagcttacattagctgctccttttgtttaattaatttagctaaatttcgtgtgttt

SEQ ID NO: 10359 - DNA, 721 bp, Oryza sativa
  ref <308>: DATABASE ACCESSION NUMBER: AK107707
  ref <309>: DATABASE ENTRY DATE: 2002-08-28
agaaaaatccccaacaaaaaaacaaaagaagagcttgatgccataggagagcacaagagctcaaccacacacacacacacacagagattttgactattaattttcatcgtctttggttttaagttggtgtgtgttcttccatggccggcctgagtgtccttcttgagacacacaagaacgatcaccaccccaacatgaggcctccccaaatcatcagcaaggccaccctccatagccacccagagacgatgtcctcctcctctccggcgactgcgacgacggcgacgatgagctccttcttgcagcgctgcttcctctgccgcagggagctcgccgacggcaaggacatctacatgtacagaggggacagagcgttctgcagcgtggattgccggtgcaagcagatcttcatggacgaggacgccgccgccgccggcggcaactgcgccgcggtgcgcgccggccggcggcgggcggccgtaccgcgcgagcaaaccggcgccggtggcttcgcgtactgatcgatcgaatcatcgatcagcccagccgtacgcgcgcgcgcacgtagattaattagcacaaatgaaacgaaaagcagaagatatcaagcacgacgatttggggaagatcaagatgcttgattcatcatataataataataatttattattcactcgccaatgaaaatgtactggttgattaattaaatccctttctttgg

SEQ ID NO: 10360 - DNA, 708 bp, Oryza sativa
  ref <308>: DATABASE ACCESSION NUMBER: AK107708
  ref <309>: DATABASE ENTRY DATE: 2002-08-28
ttggttcacacctcgacaagtagaccaccgccctgatcactcgccgccccgcgcgcgcgcgatcgatcccctcctcgctcccaaatgcaaggagcaaggtcggcggcggcgatggcggcggcggcggccgacgaggagagggaggtgcggagggcggtggaggagaagccggttgtggtggtggggcggcgcgggtgctgcatggcgcacgtcgcgcggcgcctgctgctggggcagggcgcgaacccggcggtgctcgaggtcggcgacgacgccgacccggcggcgctcgtcgacgccgcgctgcaggcccgccggcgcaaggacggcggcgacaaggctgcggcgggcgacggaggcggcggagcggcggtggcattcccggcggtgttcatcggcgggaggctggtgggcgggctcgatcggctcatggccatgcacatggccggcgagctcgtgccggtcttgaagcaggcaggagccctgtggctctgagttgatcttcgtcattagcgatgagagagagagagtcattaggcttaaaacatatgcatgtcccttttgatctttttttaactgtagatttgtttgtgcttcgttctcgatacaattctatctttaattgcgtcgatcatatggaaacttcgaaacttcagagaaacagagttgatcaatcaagagatgttcacaaggtcaaaaaaaaaaaac

SEQ ID NO: 10361 - DNA, 610 bp, Oryza sativa
  ref <308>: DATABASE ACCESSION NUMBER: AK107709
  ref <309>: DATABASE ENTRY DATE: 2002-08-28
gttcggccgtctctttttcttctccccggtgcgcaccgcatcccctcccgcatctcgcttgcatcgccaccgcttcgactcccctcctccctccaccgacggccggcgccggatctcctccctccgccgccggcaccggctctgcttctcctctcctccctccggcgccggcagccgcggttgccggctcgcgcggcgaccgacgcgcgcgggaggcgccggatctcctccctccgccgccgccgccggctctgcttctcttctcctccctccggtgccggcagccacgattgccggctcgcgcggcgaccgacgtgcgcgggaagcgtcctcgggaggctccggcgccagcggaagacgatgcgccgatgggatgtggtggccgcggcggcggatgtggtggtcgacgccagatctcctctccccgccgccgccgccgcgaggaggaggaggtagtgttagtcaaggaggacgagcagaagcagaagcactgcggccgcgttctttgatcttttttcccaactcgattcgatcgatcacatcacttgctaataacaagatgggattagctgttcttatctttgcatgttctgttctctaattcttgatg

SEQ ID NO: 10362 - DNA, 680 bp, Oryza sativa
  ref <308>: DATABASE ACCESSION NUMBER: AK107710
  ref <309>: DATABASE ENTRY DATE: 2002-08-28
ctcgaaccatccatccatctatccacccaaccactctctcgctcgctagctcatcgctcaccggccggttgagatggcggcggagggcaatgcgtcgtcgtcgtcgacggcgacgggaagggggtgcgggctggcgctggggaggctggtgaggaagctgaggaggcagagcaggatgatgctgtccacggcgacgtcgtcgcggccgccggcggcggcgaggtgccagtacgacccgctcagctacgcgcgcaacttcgaccggagtggcctcggcgacgacggcggcgacgtctccgcgcagctctaccaccgctacaccttcgcctcccgcttcgttctctcctcttcgtccacggccgctcgccggcagccgcaataggggccgagaccgatgctagctgaggcacgcatggccggtctgcgcgtgccagtgctgcgcgtagctaagctagctagcttagctctagccattagaggtagatgcactcttgttcttcatcctgcagtgttgttaattaattagtgtgttcatatgaggagggagtggtggttgtaagggatttcttccatggctctctccattggccgagatgatggtttcgatctctcgtgctgatttcttggaaatccatgcacattattcctgatataaatcgtcccattaattcctttttttc

SEQ ID NO: 10363 - DNA, 885 bp, Oryza sativa
  ref <308>: DATABASE ACCESSION NUMBER: AK107711
  ref <309>: DATABASE ENTRY DATE: 2002-08-28
aatggcgccatccaccattacaaaggtgtctccaccgatcgaacgttcgacgtcgaaccaccactagctagctagctagccatgcccctcctgctgcagctggcgctcgccgtcgccgtcgccgtcgccatggtcggcacggcaacgacgacgacgacgcacacgcggttctacatgcacgacacggtgaccgcgtcggcgtcagggggcgggccggcggcgacggcggtgcgcgtggtgaggggcgtggcggcggcggcgctgccgggcgacgcggtgaaccggttcggagacctgtacgccatcgacgacccgctgacggacggcgccgacgcggcgtcgtccgccgccgtggggcgcgccagggggttctacatgttctcgtcgcggacggactcggcgctgctgttcagcgccaccatggagttcacggcgggggtgcaccgcggcggcgccgtgtcggtgctcgccagggacgccatcctcgacgaggtgagggagctgccggtggtcggcggcgccggcgtgctccgcggcgccgccgggtacggcctcctcaggacgcactccttcaacgccaccaccaacaacgccgtcctgcagatcgacttgtacctcagcgtgtagaagatcgactacaagttcttgcacacgatcttaattgcgcttaccgtgtacttaccgactacaagttactcaaaggtgttgattccatatattttcattccacggaggaggaagaatttgtcggttttaaatgaattagcacatatgagtcaatatttatgagtggttttgtaattgtataggttcattacaagctaagagttcaaagcttgtcttatactccctccgttcatgttataagatgttttgactttacac

SEQ ID NO: 10364 - DNA, 816 bp, Oryza sativa
  ref <308>: DATABASE ACCESSION NUMBER: AK107712
  ref <309>: DATABASE ENTRY DATE: 2002-08-28
aagacccaagtcactctctccgctccagtctccactctccaacggtcacattctctcttctcctcccttccccgaattcccaactcgatccacgtcgctctcgctcgccacagacacgggcgcgcggcgatcggagaagcctcggacattcgagatctcccgctgaccctgtgggcgggcggtggggggtagccagccatggtggaggagggggcgaggcggcgggtggtggtggaggtctgcaacgcgcggaacctcatgcccaaggacgggcaggggacggcgagcgcctacgccgtcgtcgacttcgacggccagcgccgccgcacggccaccaggccgcgggatctcaacccgcagtggggggagcgcctcgagttcctcgtccacgaccccgacgccatgtgcgccgagacgctcgagctcaacctctacaacgacaagaaggccatcgccgccaccgggggaggcggccgccgcgggggcacgttcctcggcaaggtcaaggtggccggcgcctccttctccaaggccggggacgaggtgctcgtctattacccgctcgagaagcggagcgttttctcgcagatcaagggggagatcgggctcaagatttggttcgtcgatgagccgccgccgccgccgccacccgccgcccctgcggatggaaaggccgatgctgccgcggagaagaaggaggctgccgagggtggcaaggaggagaaggagaaggcgccagccgctgccgctgcctctgcggccgaggagaagaaaccggaggcgccggccgaggagaagaaagcagaggaggccaag

SEQ ID NO: 10365 - DNA, 637 bp, Oryza sativa
  ref <308>: DATABASE ACCESSION NUMBER: AK107713
  ref <309>: DATABASE ENTRY DATE: 2002-08-28
ctagagcagagaggggagagggggcaaggcaaccgaacgccacgggaggagggcgccgattgacgcccgccaccgcgcagccgcccgacgccgtcgccgctcgtcgccgtcccccgctccaagtcgtacgcccgccgccgacatgccgttgccgtccccccctccaagtcgtccgccgccgccatccaatgtgtcttttggtgagaggggcgccgcatgggggagaggagagagagagaaaacgatgatgacaacgcagccaccttggaggaggaccgggccgacaccggagaggggagctcgaggtcgatccgcgccgccgcttgggccacgtcaccgccgcgtcgttgggggtggaggagaggacgccggcgctgctccgctcgaccgccgccgctcgaatcctccgaccggcgccgtcgccgtcgccaccccgccaccgctccgcttggcgccggcgccgtcgagctgccgctcggctctctgtggttggaaaaggaagagagggagagagagaggagaggagaggggaaagtgaaaagagaaaagtggtattggtgggacccactaagcttcttgtattgtggtcttgcggagtttgcattatagaacatctagctagtattgttcttggtct

SEQ ID NO: 10366 - DNA, 677 bp, Oryza sativa
  ref <308>: DATABASE ACCESSION NUMBER: AK107714
  ref <309>: DATABASE ENTRY DATE: 2002-08-28
aagcaaagccacagccaccatttcgcctctcctttctccgcaggcgaagcaagacgccgtacactcaaatcaaaagattcatcggaagcaaattagacttgggctcttcttcttcttctccgtctccggggagcaccaaccatggggtcctgctgctgcatggggtgcaacgacgacgacggcggcagcggcggcggcgacggcggtctggacccgaaagggttcttgctggccctgatgatcgcgctggtgctcttcatgatctgccaccggccgcagccgcgccggaacaactacgtcgtctaccggtgctactgatcgatcgccgccggtggatcgtcgccggccggcgaacagccggccggcgtgccatgtttgaccgtggaccgtcgtgtgtggagtggatgatgcaaacatgaaggtcgccttcctttcctcctctctggattcatcaatccttttgaaatagtagcaatcttgctgggtttttccagggttcgatcatatgatatatagagttggtagatgatcttttattcttctagaaaaaaaaaagagagagagatggtaatcttggtataggagaaatgggtgagtaaaaaagtggggtttactgtttgatttccgatgtacccaactaatcaatcagtgaatactgaacgagggattatactagt

SEQ ID NO: 10367 - DNA, 612 bp, Oryza sativa
  ref <308>: DATABASE ACCESSION NUMBER: AK107715
  ref <309>: DATABASE ENTRY DATE: 2002-08-28
acctctctcctctctctcagctttcgcgtctcccctctctctctcacgctctccctcccctctctctctcgcgtctcggcagtggctgagcggcgaagacggcgagccccctcggctggcaaccggaggcggcagccacgcccgcccctccgccagatccggcgggaggggaggcagcgggcaccccacgggcggaggcggcggcgtggaggggagcttgtgggggacggcatttgggagtcggtgggcttcggcagtggcctagcagaggcggcggcagcggctggtggcggtggcgccctcccctttactggatccggccggaggggaggtggtggacctctggcgatagccggcggcggtccggtggaggcggcggcagccgccgcgcgtgtcctcccctcctctagatccgactggatgggagacggcggacctcagggacggcaacggcggcggccgcgcactcccctccgtcggatccggtgggaggggaggtggtgggcaggcagcggtgcccgaggatttttttgggatgatttgtagattcttttaagatattttttcatttatggatgatttttttaatatatttcgatctgtgatttgtgg

SEQ ID NO: 10368 - DNA, 965 bp, Oryza sativa
  ref <308>: DATABASE ACCESSION NUMBER: AK107716
  ref <309>: DATABASE ENTRY DATE: 2002-08-28
accaccacctcaaaacggcaactgcatgacctccaccacctccacctcctcctcttcactcccaagaactcgcaatcgccaccgccgccgcggcggcgcagcttgataccggcggcgcgagaggaaggcggaggagggagagagaaatgggcaactgccaggcggcggaggcggcggcggtcgtcatccagcaccccggcgggaaggtggagcggctctactggcccaccaccgccgccgacgtcatgcgggccaaccccggccactacgtcgccctcgtcatcctccgcatctccgccgacaaggccgcctccgccgccgccgcgggggacaacaagaccaacgccggtggagccaccggcggcggcggaggcggcgccaagatcaccagggtcaagctcctcaagcccaaggacacgctcctcctcggccaggtctaccgcctcatcacctcccaagaggtgacgaaggcgctgcgggcgaggaagaacgagaagatgcggcggtgcgaggccatcaggcagcagcacgagcagctccggcgaggcgacccgctcgctggcgtagccgaggaggaggaggaggaggagagcgcctccgacgatcaggacgggaagagggaccggcaccggagctccggcgccggcgcgccgccggccgccggcggcagaggccggcactggcggccgtcgctgcagagcatctccgaggccgcgagccagagcggcggcggcggcggcggcagcagcatctctgaatccgccgcaagatgattcccctgtttggtgctgtattgtctggttttcttttctttttttttctttcttcttcttttcttttttttcttttctctcttagtataaagtgcttggaagttggaactacctccaaaagaaagcagaaaaaattgtaaatcagagtaatcagagcaggatcaataggaaggaaagcttgtttcatctctc

SEQ ID NO: 10369 - DNA, 623 bp, Oryza sativa
  ref <308>: DATABASE ACCESSION NUMBER: AK107717
  ref <309>: DATABASE ENTRY DATE: 2002-08-28
tcggtctctctcttcgtctctccgtctctcgttctctcctctcgttttctccgctctctactcttctctttctcctctctcggtcggcggaggcggcagcggcggctgcgccctccccttcgccagatccggggaggggcggccgcagaggggcggaccagtggcggcagaggggcgacatgcggcggcagaggggaggggggatgctgcggtgggatgagaggcagtggcagcttggcggcggcgccctcccctctcgactctctcttgctatccgcggccggcggaggcgtcagcggcagtcgcgccctcccctctgccagatccggggagggcggcccggcggcggccgtggtggggcggtccagtggcggcggaagggaggggggatgcggcggcaggacaagaggcggtggcggcctggcggcggctccctccctccgtcggatctggcgaaatgtttcttaaaagatttctgtgaaatgatttgtgtgatgttcttcaatgtttcttgatgttagtgaaatgatttctgtgatttctgtgaatgagttctgtgatttgggattggggattagggaatgtttattgatattagtgaaatgatttctgtgatttctgtg

SEQ ID NO: 10370 - DNA, 699 bp, Oryza sativa
  ref <308>: DATABASE ACCESSION NUMBER: AK107718
  ref <309>: DATABASE ENTRY DATE: 2002-08-28
atctttctttctgatttctcattaatttcgcatcaagctagcttgtgatcagcaatggacggcgagatggattggatcgcggcgcgcttcgtcctgtcggcgataatgggggtgcacccgctggtggccgtcgacgacgccggggccgatgacgagcacttcccggtggacgacgccgcagccgtccacggccacgcgtcgccgcctcctgtcgcgctgccggcggcggtgctggcgccggaggaggtggccggcgcggtggtgtgcgcggtgtgcacggaggaggttgcggcgcggcaggccgtggtgcggctgccctgcgcgcactggtaccacgccggttgcatcgggccgtggctgcggatcaggaccaactgcccgacctgccgcgccgagctgccgcgggagcccgccgccgccgactggcgtgtcccgcggcgcccggcggtggcggagacagccggcagccgcctgcggcgggaggcgtcgtatacgatgctcgcaggcacgttgcccagctaatcaatcatcatcgatcaatagattaatttattatactatgtacatgtgtaaattaatcggcatgtatatacaacgaaggtgaagtgaaaattgtacagaggcaaactcacgtaaacccagcgcccgctggatagaacggaacgatctatgaaagataacatttttaattaatctgct

SEQ ID NO: 10371 - DNA, 649 bp, Oryza sativa
  ref <308>: DATABASE ACCESSION NUMBER: AK107719
  ref <309>: DATABASE ENTRY DATE: 2002-08-28
aaaccctccttccctctcccatccgccgccgccgccctatccccatccccaccgccgctcgggctgcgtcgccatccaccgccgccgggggctctacccgccggtgctgctctcttcgctggcggtggtgcggcgatgcgaggaggcgggcggccgcgcgcggtggtgcggcggcacggggaggcaggaggcgagacgccggcggctcgcaacgacgacctcgacgccgcttggggtggagctcggtggcagctgctcgcgacgacctcgacggcggatctagaggggccggcaatggagctcggggcggagctcggcggtggcggtgacggtggccggccgcggcgatgacggggcggcggtgcccgactgcggcgacgacggcgccctcgtcacatttgcgtgccgcactgccacgtggagagagagggggaaacaggcgtgggtcccacatatggctagccggttttggctggccaactttggctagtctagtggggaatttagccagccggatggcttggagaggcatttagctagtctgttggagtagattttttgtgcaagttagccaaattttaacttggcgagccatttggctaggctcttggagatgctctaactgtgataataaggcctcaagtttatc

SEQ ID NO: 10372 - DNA, 591 bp, Oryza sativa
  ref <308>: DATABASE ACCESSION NUMBER: AK107720
  ref <309>: DATABASE ENTRY DATE: 2002-08-28
aataacaaaagctaacgccggaattgtgtcgtgtgatttcgggaacgtacgacgccgcgccggccggtgatcgatggcggcggtgcgcggggttgggctagcgtcgtcgctcctcctcctcatcatcatcatcgtgtctgcaccgcacctcctcctcgcatcgctcccgccccgcgatgcgtccgccgccgcgtcggggtcgacgacgacggcagcggcggcggcgacgacgcccgtagcggcgtcaagctttccttcagaagaagctgatcatggcaagaagctcctgcacgaccacggcgaaagtgcaactagtaattcttacgatgtcgtcccatttcaaccgcactgctgcagcaaccacgacttaccaggtcaactgcgggcggtcaagtacagggttctgtgcggcaatcatcctgggccatgcccacacccaaaaacacacaaggacattcgcttttaattctcgatttcacaaccaaagtatgtatcgtgttcaccttgtttcactaaaagggtgtgtagctagcacaagcttttcagtttgcaactgatgagcatttttgaaataaagtctcactttgcacc

SEQ ID NO: 10373 - DNA, 561 bp, Oryza sativa
  ref <308>: DATABASE ACCESSION NUMBER: AK107721
  ref <309>: DATABASE ENTRY DATE: 2002-08-28
agctcacaatctctctctctctcacacacacacacatctctcgatcgcttggacgaggcagcgagcgagccatggagaccgagccgtcgacgccgatgacgcagtcgtcctacttcgccggctgcatgggctcgccggcgtggctgccggcggtgcagaggagccccgcgcggttccacctcctctcgcgcgacgccgccgccggccgcgacgacggcggccggcgagcgtggagccggctgctgaggaggctggtgcgggagagcaggagcttctgcagcctcggcagcaggcacggcggcgccatggccgccgccaccaccaccttccactacgacgccgccagctacgccaagaacttcgacgacggccgacgcgcccactacgccgcctccgcccaagcgccgccgccggtcgccggagctagctagctagagggtttcttgatcttttcttttcctttttttgtttcttttttccttcttttttatttggtggttcgcttgtagctattaattagctctgttcttgaaatggtagttgaagtgttgattttcgtgg

SEQ ID NO: 10374 - DNA, 615 bp, Oryza sativa
  ref <308>: DATABASE ACCESSION NUMBER: AK107722
  ref <309>: DATABASE ENTRY DATE: 2002-08-28
atcagagatagctaagctaataagagcaagcttagaacaagaacacatcactgtctcctagctaagctagccaattcaattcaaacacacagaaattcagacgacggcgacgacgatgtttcgccgcgccgccatggccgccgccgcaccctccgacagcgaggtgagggttcagagggtggacaagctggacctcgtcttcaacatcctgacaaagccgccggtgtacggcgccggcaaaggtaacaaccctccaaaagctccagcaccaaggcgaccggcggctaccggcggcgaccatggcagcggcggcgccgtcgccggcaggaagcagccgggcgtcgtgtcgatagaggacatcaacaagaggtctgaaaactacatcagggacaggaagaggatgttctttggccaaaattagtccaaattagtttcgagctcgatcatggaaattaattgaagtgttaagatcggtctgcatgatgtgatatttgcactgtattacgtacgtatatacggatgtatgcatgcataaatatggggaaaataattagcccctgatcgatgggcgcttgtgttgtaaaatatttacctgaaatatatgaatagcttgct

SEQ ID NO: 10375 - DNA, 665 bp, Oryza sativa
  ref <308>: DATABASE ACCESSION NUMBER: AK107723
  ref <309>: DATABASE ENTRY DATE: 2002-08-28
aagggcggcgaggccgcctccctccacaagccgccgaagaagcacaagaagaacaagaagcccgcctccgacgcccccgccgacgccgaagccgacgcggaaggcgcagcggcgccctccgcggagggcgccgccgagggcggcggcgacgagtacaccatcgacgcggcgaagcggatgaagtacgaggatctattccccgtggagtcgaagaagttcgggtacgaccccgccaacgccgccaaggcctcccgcagccgcaccgtggaggaggccctcgacgaccgcgtgcgcaagaaggccgaccgatactgcaagtgaggtgagagcccttagaagctagggtttccggctccacggagcccggcgttcgatgctttgctctagtcggatctagctccggattcaattccaatcgagttctctcgacttattgtactgccgccacacatgaatttgcttgaattagcttgaatggtggagtgggttatgtttgatcgccgaattctggtttatacactgtggaatatgaagacgtgctgtaactgcaactaactgatgattaatgtgtaacgcggtctagttgcaatgttcctattagtcgtagcaaagctgtatcgtgtgcattataatccagaattatcgaaattgctggcaaattcaat

SEQ ID NO: 10376 - DNA, 794 bp, Oryza sativa
  ref <308>: DATABASE ACCESSION NUMBER: AK107724
  ref <309>: DATABASE ENTRY DATE: 2002-08-28
gttgcagagcgccgcgcccaaccggcagaggaagaggaagaagaggtcattccgccacgtcccggacccatcgcctctccccgatgacggcggcgagctcccctcctctcgcaccacccgccaccatcccctcctccacctccgccctgcggcacctcctacccctttccggtctccgcttccggcgattaccagcagctgtgggccgtggctaccgttctcggcccggcttccgctaccgtgcagccgccggcccctctccgccctcctctgagccgccgccacggtctccccacggttggcaagagaggttatcaagattacaggataggatacgcatattctttgcagttctgttctggatggcactgtttttctggggaagtgcttgggatgggaataacaattcaggaggcacaaagcgccaacgattccgtaagaaatcgtgaggatcctttatcaaagttcactggtaatacaaaggtgggtgctgctccttgccaaagtagttctgataccccaaaggaggctggctcgatggtgggtacgtctgcgtgtacccttcattccacagcaacaaaaacctaaaatagatcagagaatatcgatgaaaagaattataatttgttttacaccatttgtaatatctaagcaaatttttagagtgtatttgctgctcactgctagggcagtgataggaagtggagcagattgatatttaaacctatactattatgagaagcattttgttaaccttaatgctgatgatggtctgaacacctcaaggttagcat

SEQ ID NO: 10377 - DNA, 370 bp, Oryza sativa
  ref <308>: DATABASE ACCESSION NUMBER: AK107725
  ref <309>: DATABASE ENTRY DATE: 2002-08-28
aaaacctccgcaaagaaggcgcacggaaccatgggcgcggcctgggggccccctcggcgcccgccccgcctgcctacctcgagcgcgcggcgacgcatgtgatggcggcggctcgacccgacgacggcaacttgcacagccctcgtgatgtcgcccgcgccacgcccccgtttcctccgcgacccccgcgcgcggcagccgcgcgcacccgacgtggggaggaaacggaacgcgacgccgcctgcccacgctcccaccactggacggatggatgggtggatttcccatccgccggcgcgtcccaatctcacgcgcgcgacagggaggcaccgcaccgaaggcgagtccccgaagccccaagctccaaaac

SEQ ID NO: 10378 - DNA, 553 bp, Oryza sativa
  ref <308>: DATABASE ACCESSION NUMBER: AK107726
  ref <309>: DATABASE ENTRY DATE: 2002-08-28
ttgaacgcaagttgcgcccgaggccatccggccgagggcacgcctgcctgggcgtcacgccgccgccgccgccaccgacggctacaagcggccacgcttctcgccgaggtgtagcagcctaacctaagcttcgctactactcgccgtacgtacgtacgcggcaaaacgaatctaagctaagctaggggaacaatgcgatgctgatacactactaccggtttcgtgtcacaactagcttggtgttttttttgtttgtttgtattccctccatctcaatatataagagatttcgaagtaatacgatatatcctctgtttcatattataagattttctagcattatccacgttctcatatatatatatatatatatatatatatatatatatatgaatgaatgaatgtggttaatatgttagaaagtcttataacctgaaacggagggagcagtattataaatctggacaaattttctttctagattcgtaatactaatatgtatcatattcttctaaaatctcttatattatgtaacggaggggtactgcgtgtc

SEQ ID NO: 10379 - DNA, 1133 bp, Oryza sativa
  ref <308>: DATABASE ACCESSION NUMBER: AK107727
  ref <309>: DATABASE ENTRY DATE: 2002-08-28
aagccgccgtcgacggtgcggctcgggcgttgtgagcgcggactcgtcggcgccaggtccggcggaattcctctcgtgggcgtcccatccgcgccggcggggctcaggcgggagccggatctggtggctgcgccgccgccatccccgctgctgctgccctttgctctaggcttcgtccaagggagaggcaggggcacgaggggagcggcgctcgcttccccttcccgtccgagcgcacgcagccggagcagcgctgctagcaaactgcttcgaccgcctgatggaggaggcggaggcaaggcccgcgccgcctgaccccaacgacgcgaggcagcggttcttgttggagctcgagttcatccagtgcctcgccaaccctacctacatccactatctagcgcagaacagatactttgaggatgaggcgtttatcggttatctcaagtatctcaagtattggcagcgtccggagtacatcaagtacataatgtatccacactgccttttctttcttgagctcctccaaaatgcgaatttccggaatgcaatggcacatccagcaagcaaggaagttgctcataggcagcaatatttcttctggaaaaactataggaacaataggctaaagcacatcttaccccgccctcctcctgaaccaactcccacgccagcacctgcaccagcagcggtgcccccatcagcatcagtgccgtcgactgtggttccacctgttgctgcacccccatcagctttgctacctatgtcagcagctggtgcatctgccatgtctcctatgcagtttgcaggaactcctggcaccaatatcccaaagaacgacatgagaaatgtcatgggtggacagggtggtagaaagagaaagataggctagtgaaactgtggaaaatgctggtcaactcaaggacaacattgtgcaagggaagagtaatcttcagatttttcttttctctgtaggcctttatttcagactcagacaatttagaagcttaacagttatttgtgctgctggagatgtaatttagataacaatatgccatgtacgcttggtccttgaatgattggctcatttatgtggccttgtagttagatagtgtactaatattttgttcaggcct

SEQ ID NO: 10380 - DNA, 747 bp, Oryza sativa
  ref <308>: DATABASE ACCESSION NUMBER: AK107728
  ref <309>: DATABASE ENTRY DATE: 2002-08-28
cttcggctgtggtcattgcctaccggtaaactcccatacttccttcttttgttcgagggaggccatacatcttccttctttggttggatccaggtcagaaagttatagggtgtgcgcaaacaagtctgaattaataagaaggggcagtacactacccatttgggaattggcaaatcacagtcatacttcttagagtggggtggagcaccagcaccttaagctgcaccagtatcttagtaagatagacaccgattaagaaaccgagaagtctagattatggggactctataagtttttctcagatttcctgtctcttccttctcccatctcttcctctacctcctctggatccgccccctcccctctcctccccacttcttaggcgctctcctccccacttctcaggcggcggcgcccgggcggccgcggaggcggcctcatgcgccctcatgcggtagctgggcggcgaggtacaacgcgcggtgggcggcggggcagcgcgtggcgtgggcggcggggccgcgcacggggcggcagcgcgccggctctcctctcttttttttttaataatttgtgattgagatatgtataatttcttttttagaatttgtgattgattgcatggatctgagttgtataattgtgatgcatttgatttgtgtgtaatttttttaagatttgtgatctatttgatttgtgtgtaagtaacttaggatttgtattatgatgtgaatgatttgtgatgct

SEQ ID NO: 10381 - DNA, 576 bp, Oryza sativa
  ref <308>: DATABASE ACCESSION NUMBER: AK107729
  ref <309>: DATABASE ENTRY DATE: 2002-08-28
aaaaacccttctcccctttgccgccacagcattcgatcgatctcctgcccaagagctacgtgccatgcatatggccggtgcaggcggcagcaaccgcgccgtgcggtgcgcggcggccgtcgcgttcatcgtcgtcgtcgtcgtcgtgggctcggccgacggcaggggcggcggccggggcggacacgtactacatggcggcggcggcggggacgacccgggcaacttccggagcagcatggtggactgcatgatggagtgcgcggcggaggtggtgagctgctccagcgcgtgcgccgggaagccccgcggcgaggcgcccacctgcgccgccgactgcgtccacggcgacatcagctgcctcgccgggtgcggcgcccccgccccgcccgccgcgtgacccacccaacgcaaaaaccaccttctcccattcacgcccctgctgcgcatcgacgtttgcgtgatgaaatggagtagtatatctgatgtgatccactatatatatggagtaactagttagttcgattaatttcgatgctggatgtgtttagtatatttacctactgtttgacatat

SEQ ID NO: 10382 - DNA, 577 bp, Oryza sativa
  ref <308>: DATABASE ACCESSION NUMBER: AK107730
  ref <309>: DATABASE ENTRY DATE: 2002-08-28
aactcacacaacaaaccacccccaagatcaagaacaacaacaacaacaacaacatttgtcaagatgagcgtggagatcgtggacgggagcacggtgcggagcttcgtggacgacgaggccgccttcaacgcgtcggtggacgggcgcttcgcggcgctggacgccgaccgcgacggcgtcctctcctacgccgacatgtccggggagctcatggcgctccgcgtgctggacacccacttcggcgtcgacgacggccacggcggcgccgacgacgggctctaccgcggcctcttcgcccgcttcgaccgcgacggcgacggcaaggtcggcctccacgagttccgcgccgagatgaaggaggtcatgctcgtcgtcgccaatggcctcggcttcctccccgtccagatggtcgtcgaggatggcagcttcctcaaggtggccgtcgacagggagctcgccaaggccgcctaattcaataacctagctagctaattaaccacattgaactagcccacgacgattaatttgagtactttgtttggtaaattttattgaatttggtgttaatttggatttg

SEQ ID NO: 10383 - DNA, 519 bp, Oryza sativa
  ref <308>: DATABASE ACCESSION NUMBER: AK107731
  ref <309>: DATABASE ENTRY DATE: 2002-08-28
acctttcagcaacaatggcgcagcagtagtggcctggatggcggcggcagcggcggcggcgccggagaacggcgcggtggggtgcctggcgtcggcggtggagggcccgataacgtgaatggcaatgggccaacacccctgacctctgctctgctgcagtttcgatctagttctttttctttttccgcgcatctcgctcctcgccgtctcgctgccgccgccgatgccggtccgcgttttctccgtcccttccattgccgccgttcctctcggccgcgcctctgcttgtggtgccacgttctccagcgccgatgcggcggctgtctgcagatacgccagccgtttggtcaggcacagcaatctccggcggcaaaggttcttggtgatctgccctacggattgttcaggttctcactgtttccctgttgttatctgttactactaccattttaccgcattattgtatattcccctgattcgttaatctagggaagaggtagtagaactggaacacaattc

SEQ ID NO: 10384 - DNA, 922 bp, Oryza sativa
  ref <308>: DATABASE ACCESSION NUMBER: AK107732
  ref <309>: DATABASE ENTRY DATE: 2002-08-28
aaccaaacccaaaaacccaaaccaaacgcgcgacgcctcagctttctcctgctcctcctgccactcaccaacccaacgcaaagcatcgcggccgcgaggtcgtcgacctcgtcgtcgtcgtcgatggaggtggaggcgttcccgatacggttcacgaggggaatacggtcgcactgggggaggcgcaagtaccagcggctggaggcggcgaacggcggcgggaagacgagggcgacgcagcagctgggcggcgcgcgccgcggcggtgcggggtgggggctgcggctgcggcggctgctccgcgtccgcgtgcgcgtggcgagggcgtggctgtcgtccccggcgcggctgctggcgcggatccgcgacgcgtacgtgggcggcatgctcgccgtgtcgaggaaggcgtcgggcatgtcgctgccgaacgcgcccgaggggctgtggcctaggcgcgtgccgcgccggaagcagctcccggcggcgcggccaggccagctcaccgacttcgagcagaggctcgtcgtcgagatatacaagtccatcgtcgcctccaaggagctcaccaccatgctccaccactccaccgcgcacctgccgcagcagcacaacacggcggcgccggcgtccagtggccagctgctagtcaattagcgtgctgtctgtatccaccatcgacatgggaactgaaccgcgagagctcctgcaagttcgtttgctcgatcgctgctcatgttgatgattattactactgctgtttcttccttgtaatttgtaagaagtattagttaggacaagatgatgatgtacacttcaatttctacctggtgcaaatcaccatgccgccgcgagtatgtttaatttcgtaaccaagaaatcgatcaagcaaagttcgtgcctccgcgcaccttgttcttgttct

SEQ ID NO: 10385 - DNA, 743 bp, Oryza sativa
  ref <308>: DATABASE ACCESSION NUMBER: AK107733
  ref <309>: DATABASE ENTRY DATE: 2002-08-28
gtctcttttacctgtttgaccagatcgaatcgatctcatccagcctcttcggctcgaggagggaagcctcgccgccgtcgcccatggtggcctacgcgcggcgccgccggcgccacacctggctataggcgggctgaagagggatgcgctctgccggctagacgccacggccgagcacaagcaggacgagagtggcctgccgtgccgctgcagcaggggcggacggcaacgtcggcgaagatcgagggcacccgccgccgcatgagcgactctcttccacgccctgccgagaagcctcgccgccgtcggagcccacgtctattgctcccatggtggtgctgtgcctgcgtgcggcggcggcgtcgccgctgcaaacatcacgccggcgcccccgcatcggctccggctctggtgccggcgcctgcctccgccgctcccccacctgcgtcccgatgccgacgtccctgctggaggaaggcgccaatcgcgtgcgccgtggaggtggccggcggtggcgtagacgctggcttgttggagcgagcaccgcatcgggatagtaggggaggaagaggggaaagagagaggagggagtatgacaggtgggaccacgtcgagggtattttggttagacaaaaattaaaatagagcaaaatcgtttctaataaccaaaaaacgtatttcagtgaataccccttagtttaggatagcattttaatgaatcactttgaagatagtattccagc

SEQ ID NO: 10386 - DNA, 787 bp, Oryza sativa
  ref <308>: DATABASE ACCESSION NUMBER: AK107734
  ref <309>: DATABASE ENTRY DATE: 2002-08-28
ggccttctgctgctccgatctactactacttattacgtactcgcatctcaccatgaagccgctatcgcttctgtcagcgctcgccctggcgttccacgcggtcaacacgggcgtcgccgtgtaccgcagccgcgccgacgccgcggccgtggcgctcgtgctcgcgtcctcgctcgcgctcgcgctgctcttcctctgcctgcgcctctacgagggcgcgccccccgccgaggccgcgaggcgccggtggctgcgccgcgccgtctggctgctctccgcggcgctcacggcggcgttcacgcgccgcgtcgcgggcgcaatgccgccagcgggggccgtcctcgtgtgggcgatgagcgcggcgaccgctggcggagggttctacgccctcgtcgtcgtcgacgacggccgcgatctcggcgcaaaatagctaattaataataataataataataataaatgcatatgatgcgtatatatatgtgacgtgagttacttgctagtcaggcgatccatagaaacaaaataatactactattaaaagggatcaaagtacacaaaatgtgtacgtatgagcacttcacgctcgtgtcgatgttcagctagcccagtggatgcagtacgaaccaataccagcatgctctgctggctatggtgttatacagtgcttgttattgtgattattcgttgagctctatatgtagtgtggttgttgttgattagggatctcaatttgatatcaacaaaggattatatatttatccattgagtgatcgattgatttttc

SEQ ID NO: 10387 - DNA, 864 bp, Oryza sativa
  ref <308>: DATABASE ACCESSION NUMBER: AK107735
  ref <309>: DATABASE ENTRY DATE: 2002-08-28
agtctgcacacacgcacaagaatcgagtgagccagagttgagagttcgttccatctcccttcgctcgccacgtggcagccgctagtccttatcgccgccgccgcccacctcgccatggcgccgccacccgccgccgccgccgccgtggacggagtcggggtcggggtcggggcgcacagcgtgttcgtgtgcgggagcctgatgcaggacgaggtggtgcgcaccatcatcaagcgcgtcccgccctcctccccggcgctcctccccaactaccacaggttcaacatcaagggtaggatttatcctgcaatcctacctgttcaaagcaagaaagttgctggcaaggtcatcaccggtgttactgatgcagagctccagattctggatgaatttgaagatgtggagtacgtgaggacaagagttgagatatcattaactgatacttcagagacaatgcttgctgacacctatgtatgggctgatgcagaggatccaaatctttatggtgaatgggattttgaggaatggaagaggttgcacatgaaagatttccttgcgatgacccacgggttcatggatggcctcgaacagcctgaatccaagtccagggttgaaacctaccaatcattcatgcaggaaatccaacagcctgggacgacgacgacgacgacccaggttgagatttgaaggactacattgcaatattcgccaatagccgatatatatagtgaaatggcagttcgctgtattagcatgttagtatgaaataacccatctcctcgagagtgtaatctttatactttatagcatcatcattaataatacatgtaagaataaagtttctactgtgatttctgttggtcc

SEQ ID NO: 10388 - DNA, 768 bp, Oryza sativa
  ref <308>: DATABASE ACCESSION NUMBER: AK107736
  ref <309>: DATABASE ENTRY DATE: 2002-08-28
aagcaaagcaaagccttcccgtttcctagttgtagttgcctctcccctcccgctaatcaaatcccaggaccgaattaacaagggaaagagagacagcaagaagaaaaccctcccgtgcagatcagatcggcagattgcttcgaagcaaacctttgactcctcgaccgatcgagcaagcaagcaactcgacctacctatttacggatcaccacgcgctcggacggatcgagcacggatcacctacctattgatcgatttcgtccgaagcctgcggctgtgtgcaagcatgctggagctactgctggtggggtgcagcagcgtggtgctgctcctccacggcgccaacttcctcctccgcgcgctcttcgctcgccgcggcgccgtcgcgcgccccatcagcttcctcgggttcgtcgcgtgagggaccaccgatcgatcgatcgatctcgccaaggccggggccgaccgtccgtcacgatcccgcaccgcgcgcgcgcgacggatcggagcgcgaacaacatgccgtgcaccgtacaccgatcgaccaaccggccgtgcccttcgatctctctctcatgtgtatataatccgtgaaagaccgacctgtgcgggctcggtcgtgcgttgagcagtccatgtatgcattcagtaggttagctagcagtagaagaagcagactcctttcaaaaaaaaaaaaaaaaacagagagacaagaagcagcagcagactgtatagcactaccaacttgatgcatgattggttattatt

SEQ ID NO: 10389 - DNA, 844 bp, Oryza sativa
  ref <308>: DATABASE ACCESSION NUMBER: AK107737
  ref <309>: DATABASE ENTRY DATE: 2002-08-28
atcatcttgctgccacatccacttcgactccaatccataatcgcggatagatcacttcactactgcaacggattacgactccaatgggttcttgcgtctcgcgctctacggcggcggcggcgtcggcgatcaccaccaccaccgcggccaaggttgtgttccgggacggctccatggcgcagttcgcggcgccgggtagcacggtgcgggacgcgctgggcggcgaacgcgcgtcgtcgtcggcgtccacctgcttcgtctgctgctccgacgagctccgcttcgacgcgccgccgcgcgcgatggcggcgcacgacgcgctccggccgggccagctctacttcgtgctgcccgtctcggcgctccgccgcccgctctccggccaggacatggccgcgctcgccgtcaaggccatcgcggcgctcggggcctccgccaccgccgccggcagcagcagcggcgtgtcgtcgcggggcaagaacgcgcgccccgccggcaagcagcggccgcaggcgacggctcgagtggcgccgctcgtcgccgccggcgccgaccacgtgtacggcggatacgactcccagaaaacggtgcgcggtgatcggacggcgaggatcaacggaggtggtagcattgctcgccaacgcacaggattgcagaggttgagcgccatctcggaaggcgatgagtgatccaacttgttaaattgctatatacaagtttgatcaaggattagttgttaattatagttcatcaagttgttaattaggtgctcccacatttgtagatataggagtccgtacttgtacagtatgttcagggaattttgatactgattctttgcagt

SEQ ID NO: 10390 - DNA, 718 bp, Oryza sativa
  ref <308>: DATABASE ACCESSION NUMBER: AK107738
  ref <309>: DATABASE ENTRY DATE: 2002-08-28
accaagagctagagacagcaactcaccaaccactagctataagcttattgccctagattaacatagctaatttcgactaatctcaatcagtgacaacttttattaagtagcttaattagttagttagttagaagaaaagggaaggggagaaagctagtatatgggagggaggtcgttcctgtgcatcttcagcttctcgaggaggtcgaggcggtactacgccgacgacgaggcggcggcggtgagcgactgggagcggccggcggcgacgaggctgcggaaggtccggtcgagcgacgaggacaacgggtggtggatcggcgagcgcgacgtcgaccagaaggcctccgacttcatcgccaggttccaccaccaccagaccagcctcgtcgtctgaactactccatcgatatagctagctaactcgcgatacaggaccgcagctagctagctagatgtagtattattatatatattattacatgtatagtatatatgttgtaatgtgtgtgtgcaatatatatatatatatatatatatatatacatatatatatatatatatgcagctggctagctagctagggcatgcatgacatgagatgagggccggaactgctatgtatgaatgtacaaatatagttttaattgtttaattagcactgctgatgatatataataataataataataatgaataaatatgtatgatattgttt

SEQ ID NO: 10391 - DNA, 566 bp, Oryza sativa
  ref <308>: DATABASE ACCESSION NUMBER: AK107739
  ref <309>: DATABASE ENTRY DATE: 2002-08-28
atctgcactccgctgatccctctcgatcggcctaggttttgccggctaaaatcagatgggtgacatgtaaatcgtcctggccgcaggcaaaatcgaggcgcagtacgtggagatgaaggtgccactctactcctacggctgcgagaagaagatcaggaaggccctgtcgcatctgagagggatacactcggttcaggtggactaccagcagcagaaggtgacggtgtgggggatctgcaaccgcgacgacgtgctcgcggccgttcggaagaagcggcgagcggcgcggttctggggcgccgaccagcccgacctcggggaggactcgatgccggcagatgctcgtaagcactacctgcaagcgttcaccgcgtacaggtttaggaagtcttggaagaagctctttccactgatccggctgttatccggaactcaaaagtttctgtcacgcgaacacgggccgccggctagtgcgattcaggagcggcaccggggtttcgaataaatgtactctgttactgtcttttttgggtagttgatagtatgtagattggcagattgctgtg

SEQ ID NO: 10392 - DNA, 551 bp, Oryza sativa
  ref <308>: DATABASE ACCESSION NUMBER: AK107740
  ref <309>: DATABASE ENTRY DATE: 2002-08-28
aaagaacaacacacatacaaacacaagtaaacttacttcatcttgctagctaattgtagagattgatataatcactgtctcttcagatcattatccaataatggcatcctcctcactacactgtcactcgacgaccatcctgttcgtgctcatcttcttggcgtcctcgtcgtctctgcaggccaggatgttgccgagtgatgttcatgatgatgataataatgttcatgtcaaggagctgagtgcagtttcttcaaaccctactgctagcactactgtcgattcgctagcactcatggcgccgccgccgccgccgccgccggccgccggcaagccggagatgatgcctgccgtcgacggcaagcgttgggggacggcccagctgcagggctcggtgcccagcccgggcataggaaactgaactttttggcatatactgtatctgagaatgtatgtctacgtaagtacgtagacacacatatatatttttgtgtagatcaagaagaatgtgtaaggacatatatacatgtaattctttcttgcaatataat

SEQ ID NO: 10393 - DNA, 973 bp, Oryza sativa
  ref <308>: DATABASE ACCESSION NUMBER: AK107741
  ref <309>: DATABASE ENTRY DATE: 2002-08-28
gttctccactcgtgcaaccccgcacctctctagaatcttgatcctcccaagctgctcaagtgctcatcccccatggcgagcgccccctcggtcaccgccttcttcgggctgctggtgtccatgtacgccaccggattcttcccctacgtcgacctgcagtcgggtggcgagagttgcttcgctcgagctccgccgcttgacgccgcggtccacacgatgctgctggcggcggcggcggcgatggttgccttccacacatccgtcgcactcatctacgcccgtatcggcggcggaggcggcggtgccgtggacaggatgatccgcccgcaggtcgtttacctcatcctgttcttgtcttccggcgtgcttcacgtcttcttggctcctcagccaggcgccatcgacggcggccaagatttgctacccctcgccgtcgcggttgtccacgtgctccgtccagctgctgcagcgacgacgttcttcctctccatgatgctcatctacacccatgtccgtgctgttggccgcggtgaagggggagccggcgccgccgccaccgccgccgggaacgtgccgatcgcgacgaccaccgtggagctcctcgccaagctggtcctcgccgctgcgcttgtcacggtcgttcttaccctcacttccaccgtccttgctgcctcctacgccgactgatcgacgagctgagtttcttcctactgctggtaagcgatttgagccatttttcttgagtcatctgtgctggttatgggatcgacaatgttcagacttgtccgagagttagtgttcatcctgtgctgtaacaagatcggattatatgtgctgcaagtgtgcttttctggtcattttgtatgtgaccagctgcaactcttcgatacttattaatggcttgtggatttgatggactcgtgttgtggtatagcgcacactatgttgcagtagcattatatcgtgtctggtt

SEQ ID NO: 10394 - DNA, 582 bp, Oryza sativa
  ref <308>: DATABASE ACCESSION NUMBER: AK107742
  ref <309>: DATABASE ENTRY DATE: 2002-08-28
tctaagcatggctcgtggtcccgtctcccctgcctcctccctttcagattccccttcttgcccctctcgcctcggcccgctgacgaggcctccatccgccggagcagagcaagacgagcccacgcgcagctacagccgtcgtcacgacctcctctgtcgatgccgcgcccgccaccgccgtatccatcccgatctggccgcggggagggggggtgggcagaaccgcccacgatggcaccagatctgccgcccccggctggcgacggcgtgaggtggaggaggacggcgacgacggagacagagcggcgaagctcgcccgccgtcggccaccccacccctcgcgccgctcgctgtcaactagcgtatcccgcgtgcggctctccgttggccaccgcgcggagacgggcggcggtggtgctggcgagagggagaggcgagcggctggcgatagagagagggagggaggcggccctccgggcgagcggtggcagcgatagggagaggaagaggcaagcagcggcggcgagagggagagggagaggagaggtgaggaaaagagaagaggagggggcggcggcggcg

SEQ ID NO: 10395 - DNA, 887 bp, Oryza sativa
  ref <308>: DATABASE ACCESSION NUMBER: AK107743
  ref <309>: DATABASE ENTRY DATE: 2002-08-28
gttcctagctttgggcgagggtgacggccgcgttcgccattgccacctcactgctcacgctaccgcctctaaagcaaaaggacgatgctctccccctcctctttcgtcgtggctatctccatcgtctctttccttgaccacagcggcaatggggtaaagagagaataaaagatacctgaaatccactttagcccggaccattcctgccggccggtgagtggctcgctggccccgccgccggcggtgatacccacagccatcctgcgagctttatataagccgcaggtgagggagacgctctcgcaccgcagagcaagaagagtttgcagattaactcgatctctggacaagctttgagtactgatctcggagtgatctttgttgttgtgagttgtgaccggcctgcagccggagaaaggcggattgagatggcgtttctggacggactgtacggcggcggcggcggccggaggaggatggcgacgacagcgaagggcgccggcgcagggaggcggcggtcgtcggcggcggtggcggcgccgcggccggtgaggcagctgtactggaagctgaggtcgaggttgcggtcgtcgtcgtcgaagcggcacggcggcggcggcgcggcggcgaggttcgggtacgaccttcagagctattcccggaacttcgacgacggcggcctcgatcgatcgtctccggccagctaccgcttctaggctcatgtagctaggtagctagagaagagtgccctgccattgctggagaccggagagtgcaatatattctggtctacctgcaataattatgcaagtggtattagtgttagatctacttgtaattgtagtgttgttctgtcttcatacaatttggtcagatttgcttttttt

SEQ ID NO: 10396 - DNA, 735 bp, Oryza sativa
  ref <308>: DATABASE ACCESSION NUMBER: AK107744
  ref <309>: DATABASE ENTRY DATE: 2002-08-28
aaagaaccccctccccaaattgctccaaacgccaacctccccagccccccaccacctcggaattcggcgtgaatccatcccatggctcgcctcggcatcggcgtggcggcggcggctgcggcggtggtggcggccacgctggtggtctcctgcctgcgcgcgtcgcctgccgaggcctacagcggcggcggcctgctacagccagctgctcaccacggcccacctcggcgccatctcctcctcgtcgtgcggcggcaggctggggcggcagtgctcagcggcggtgggggccgacggcgggctgctccggcgggcgctggcggcgaggaagccgacgaaccggtacgtcagctactcggcgctggacgcgaacaaggtgccgtgcaacaagcgaggccagacctactaccagaactgcgcgtcgcagcaggcggcgaatccctaccgccgcggctgctccgccattacccgctgctcccgcaacatgaactgacgatgatgatgatggtgatcacatcattgtccatccaaattccccaattcccaattcgtccaatccattgattcggtcggtgaatgcatggatggatcgattatatatatatatatatatatatatgtgtgtgtgatgcattattattatatattggctaattattaatcgattagttgtatttatatgcatgctgctgatgatgatgattatatatttatatatatgtgatgtgatgatgt

SEQ ID NO: 10397 - DNA, 882 bp, Oryza sativa
  ref <308>: DATABASE ACCESSION NUMBER: AK107745
  ref <309>: DATABASE ENTRY DATE: 2002-08-28
acacatgcatcgatcattcatggatgccgaattgccgcgatccgggcattatttcgcgccaggagacccaagatcatcgtgtcgcccacgctataaatagctagctagcttgcctttatgttgcatatgccaactgctacatgcaggacgtctgaaactatcattagtgacctgcagcgcctgcagtatatatatacaagtagtagtgagcatggaggacgacaagaaggaggcggcgagcaagtaccgcggcgtacggaggcggccgtggggcaaattcgcggcggagatccgcgacccggagcgcggcggctcacgcgtctggcttggcacgttcgacaccgccgaggaggccgcgcgagcgtacgaccgcgccgcattcgccatgaagggcgctatggccgtgctcaacttcccaggcaggacgagcagcaccggctcttcgtcgtcatcgtcatccacgccgccagctccggtgacgacgagccgccactgcgccgacacgacggagaaggtggagcttgtgtaccttgacgacaaggtgctcgacgagctccttgcggaggactacagctaccgcaacaacaacaactactgatccggccgtcgatgaactgagacggatcgacatggggccggtcgtcggtacgctcgctgaaacgagacccggattgctatcaataagcaagcagaagaaaaccgtctcctatatatagcttcttctgttggcacaagcatatatgggcatgcatgacacatgctactgtgaattgacgggtgtgtgctgtgtgcagactactaaaccacgcttgcaagttgcacgtacgacgtggttgtcaagagcatgcagtccacgaagcagagaaaaacacctggtttatc

SEQ ID NO: 10398 - DNA, 841 bp, Oryza sativa
  ref <308>: DATABASE ACCESSION NUMBER: AK107746
  ref <309>: DATABASE ENTRY DATE: 2002-08-28
atgcacgagtaccgcctcgccgacgtcgaccgctccgcccgcaagaagaacaccctccggctagatgattgggtcctgtgccgaatctacaacaagaaaggcggcgtggagaagccgagcggcggcggcggcggcgaacgttcgaatatgatgagccacggggagaccgcgtcggcgggctcgccgccggagcagaagccggccgtgctgccgccgccgccaccgccgtacgcggcggcggcgccgttctcggagctggcggcgttctacgacgtgcggccgtcggactcggtgccgcgggcgcacggcgcggactcgagctgctcggagcacgtgctgacgacgtcggcgtcgtccggcggcgtcgtcgagcggccggaggtgcagagccagcccaagatcgccgagtgggagcgcacgttcgccggcgccgccgccccggctggcgccgtcagcacggccggaccgattctgggccagctcgaccccgccgccgccgtcgccggcggcggcgacccgctcctccaggacatcctcatgtactggggcaagccgttctgacggctcggctcggctcggcggcttgagccgggagggatgaatgatctgatattctatcggggtggctcgggcgagccgctggaatcgatcggtggccgttggatggcggccgagttattggtagccgtcagatgggagatggaatggcattagttagttactagtatccgtatggacggcggcgatgaaacaggggagccccgagatgcgtgtaggaaggagatgcatggtactgtactcgagaattataagccgtgtgtatatgcgaaattggttggct

SEQ ID NO: 10399 - DNA, 697 bp, Oryza sativa
  ref <308>: DATABASE ACCESSION NUMBER: AK107747
  ref <309>: DATABASE ENTRY DATE: 2002-08-28
ggcggcgcgctccagggctccagcgacgaacgccgtggcccgcagccgcgcgcaatggtcacctctcggtttgatttgccccattgtggggggcgatcgcggatcacccgcccgcaccaccggaccggaggcggcgcccctctacgtcatcctccgcccctctggtgcgttgctaacctacaggcccggggacggcgagggcgtcctcacggagtcacggccaccctctcgagggctcgactccccctgatcaggaaatctgatggcacggtgagatctctagcattgagcgctgccgcttgtgcctgaaacctgtttgttaaaatgcgtccgtgcgtccgcgaggcggttgaggatgtgcttgccttccctgcacccgtctggaggaaagttagtgctcgcatgggtggatgtaacatcacttgctcgtatcaagtgctggagaagtggaaacggtctacacgagcacatagcccggtccttcatctcaagtggtgctaatgcttgtcttgccgtttcgagtggaaccgggaatccctgcacctgttggatgtgaactgccctatacgctgggctgggtggatatttttttagggtaggctaggtaggttactgttgtttgaaagggtaatggcgatactgatcgatgttagtcatggatggtgattgaagtctgaacgtgtaacggtttcctgtt

SEQ ID NO: 10400 - DNA, 512 bp, Oryza sativa
  ref <308>: DATABASE ACCESSION NUMBER: AK107748
  ref <309>: DATABASE ENTRY DATE: 2002-08-28
aatatcaagcacaagcagcggagcggaggcaggagcagaggacgtcggatcgcgcgaagacgatggagggcggcgacgggaggaaggagacgacggcggcggcgagggcgcagaaggaggcggcggcggcgggaatctccgtgcgcgagtcgctgcagcacgcctgggcctcgttccttggcctggtgaggaaggtgacggcgaggagcgaggaggaggcggcggaggcggacatgagggcggccaagatgcaggtggaggccaccgacgaggcggaggccaagaggaagcagctcgccgactgacagccgcagcatggccacagcgacgcagttctgttctgctcagccgctcttgcttcgtacaagtagcttgtaacatctgaaaactagttgtaacttgtaagaacatggtagtcacatggtgtgctagtatgccactcgcacgatttttctacctgttcgtctctgtatgtaagtaacggaatgtcagaatctagctacagctttatg

SEQ ID NO: 10401 - DNA, 754 bp, Oryza sativa
  ref <308>: DATABASE ACCESSION NUMBER: AK107749
  ref <309>: DATABASE ENTRY DATE: 2002-08-28
aaaaaaaaccacaaacccaacgaagaaggaaaaaaaaaggaggaaaagaaaagaggaggaaagcgaagaggttggagagagacgctcgtctccacgtcgccgccatggccgcccgcgccgccgccgccgcgttcctgctgctgctcatcgtcggcgcggccaccgcggcgccggacatgtcgatcatctcctacaacgcggagcacggggcgcgggggctggaggaggggcccacggaggccgaggcgcgcgccgcgtacgacctctggctcgccgagaacggcggcggctcgcccaacgcgctcggcggcgagcacgagcgccggttcctcgtgttctgggacaacctcaagttcgtcgacgcccacaacgcccgcgccgacgagcgcggcgggttccgcctcgggatgaaccgcttcgccgatctcaccaacgaggagttccgcgcgaccttcctcggcgccaaggtcgccgagaggagccgcgccgccggggagaggtaccgccacgacggggtggaggagctgccggagtccgtcgactggagggagaagggcgccgtcgcccccgtcaagaaccagggccaatgcggaagctgctgggccttctccgcagtaagcacagtagaaagcatcaaccaacttgttactggtgagatgatcacattgtcggaacaagaacttgtagaatgctcaaccaatggagcatcgagtcggccttgttggcctactggaaaaaaaccacaaacccaacg

SEQ ID NO: 10402 - DNA, 919 bp, Oryza sativa
  ref <308>: DATABASE ACCESSION NUMBER: AK107750
  ref <309>: DATABASE ENTRY DATE: 2002-08-28
atacgtgttctagctaagctagctagctagctctcgttctccggccatgtcgacgagggcgcccgtcgagctcgacttcctcggcctccgcgccgccgccgccgacgccgacgaccgccacgccaagagcggcggctcctccgcctcctcttcctcctccatccgagggatggagacgagcgcgatagcgaggatagggccccacctgctgcgccgcgtcatcgccgccgccggacctccgccaccgccgtcgacggcgccggtgccggaggagatgcccggcgccgccgccgccgccgctccgatgacgctcttctacaacggttcagtcgccgtcttcgacgtctcccacgataaggcagaggctataatgaggatggcaaccgaggcaactaaagcaaaaggactcgctcgtggcaatgcaattgtaggcaattttgccaaagagccactcacaagaactaaatctctgcaacgattcctctccaagagaaaagagaggttgaccagcttgggtccgtaccaggtgggtgggcccgctgccgtcggtgcgacgacgtcgaccaccaccaagtcttttcttgcgaaggaagaggagcacacggcgtcctagctagcctcctagctagctaattactgttgatttggtccccttgattaatcgtttattattaataattatttcattgattccatcattagtagagggtacagaccaggcaggggccagttaataatcctgtttagtgttgatcgatcgatagattaaccatactccatatgtaggtctgtgtgtaatattgatttatatatatagtagtatctatagttgattacaaggtcatggattttatggatgtgtaaagcaagcttagagtgaatattggatgcatttatgatttatactatgtagttgtac

SEQ ID NO: 10403 - DNA, 683 bp, Oryza sativa
  ref <308>: DATABASE ACCESSION NUMBER: AK107751
  ref <309>: DATABASE ENTRY DATE: 2002-08-28
ggcagaaacaaaattcagccatgacgacggccatggcgtcctcctcctcgcgtggcgtcaccgtccccttcctgatgatcttgccgctcctcttcgtagtcgccgctcttccggccgaggtcaccgtcaccggcgacggcatcctgctgccgtcgtgcaagaccgtcggcggcgggagcacctacttcgacgtccagttctgcctcgacgccctgggctccgtcggcgccggcgccggcgcccggagctaccgggacctcgccgccgtcgccgtcggcctcctcacggccaacgccaccagcacgtcggtcaagatcgacgccctgctccgcggcggcggaggcggcgggaaggtggacgccgccacggcgcggtgcctgcggtcgtgccgggcgctgtacgccggcatcgcgcggaggcagcccggctgcgccgcggcggtgaggggcggcaggctcggcgaggcgaggtcgtcgctggaggagtcggcggccgcggcgaggcggtgcgaggacgggttccgcgggggcaacgcgacgtcgccggtgacggcggaggacgacgccgccttcaagctcgccaagcttggcgtggcgctgcttggttttgcttgacaaaattacagctcgtgtgtactgttactactagtgctatgccgtgatgttctaaatgaaattaataac

SEQ ID NO: 10404 - DNA, 423 bp, Oryza sativa
  ref <308>: DATABASE ACCESSION NUMBER: AK107752
  ref <309>: DATABASE ENTRY DATE: 2002-08-28
gcgcacacacacactctctctctcacactactaccctcatgagcacggaggcgacgatggcggccggccgtgcggggtggcacgtcgggcgttgaggaagctgctgtcatcgccgccgccgttgctgctggtgtaggtgtgggcggagtagagaagatcgtgaagctatttatggggtaggtgcctgagcacatgatgaaggtgaagctgctcaccatgttccaggatgtggccatcgtcgacaaggtcaccgtcatcaaggacaaggcctcttgtggtgtggatctgtacacccagatttaggcttgtgactctcgagctcttacattggcttgtttctaaggtttagtttggggttttctacatgttatatgggtgtttctacagttatgatgactttttattgagctctttgttgatttt

SEQ ID NO: 10405 - DNA, 736 bp, Oryza sativa
  ref <308>: DATABASE ACCESSION NUMBER: AK107753
  ref <309>: DATABASE ENTRY DATE: 2002-08-28
aactaaacccgtcccgagacctcacctgagctaaccccctcttcgattcttctccccggcggcggcggcggcgacgatgggcggcgagggcaagtcgaggaagcggcgctcgtcaccctcgtcaggggaggaggaggagagggagcggaagaagaggagggacaagaaggagagcaggaggagcagccgagacgaacaagccgaggaggaggaggaggaggagaggcgcaggaggaagaagaagaagcatggcgacaggggcaaagacaaagagagggattcaaaggagaagcattccaaggagaaggagaagagcaagcgaaagcacaaggatgatgatttcaaagaaatatccaaagatgactatttcgcaaagaacaatgagttcgcaacctggttgaaggaagaaaaaggcaaatttttctctgatctttcttcggagtctgctcgtgatctgttcgagaagtttgtgaaaacttggaacaaaggaaagcttccatcccaatattatgaggggatcactcgtggtccacggtcagcacacaagtggaacatcaaagtgtgatgcaacctgaggccttctgtattttgttgaggacattgttctgtcaggctaagggtagtatttatcttcatcgcctaggtttttgtatctaaattcatatatattagttctgtatcactgttcactaatgttgctgaccatcacttaagtttgacatatacttatagtgat

SEQ ID NO: 10406 - DNA, 541 bp, Oryza sativa
  ref <308>: DATABASE ACCESSION NUMBER: AK107754
  ref <309>: DATABASE ENTRY DATE: 2002-08-28
aaccacatggcaccgcttcccctccccttctcgcttgctcctccgacggcgccgcttcccgacttccggcggcgagcagccgggctgcggatgcgccctcgctggcccaggacgatctgggacccacgggcgtagtctccgcggcatcggcgacggcaacggcggccggccggcgggaagctttagctccggccagattgacggcgccctcgccgccggcttccgtggagagcaggtcgctacccagagtaggtgttggtcatatggtgtacatccctggtttgacaaacctgctccttgagttcagcgaacatgtaagcaacataacttgtttgaagctgcatattccatatatattatttgaagttgctgtaatgcatttgtaaaataacttgaattgttctcttagctacatataaatagcacagagaatagataagtgcttcagagaataagggttccaagagatgatgtaataaagatggggtcaacgtggttccctaattttggggtataaaatataaaatcaagcagcttttat

SEQ ID NO: 10407 - DNA, 455 bp, Oryza sativa
  ref <308>: DATABASE ACCESSION NUMBER: AK107755
  ref <309>: DATABASE ENTRY DATE: 2002-08-28
accgcacgcgattcgctttggcagtgcaaagcagccgagatcacccaccagcaataatgtccggcgcgcaaggtgcacagcccaagggcgccttcacggcgaccacgtcaggtcggcggcggccgcggccaccggcggcgaggaggagagccggcacccgccgccgccggcgaggacggagctccggtcgaccgaggacgagcgcgggctgcccgtgaagaggctggaggacaaggtcgacgacgccgccgggaagggcggcccggtgttcggcgccggcgaggacgacggcaagccagacctcggcgtcaccagcaccggcggcggctgatattactgctgcttcttcagtcaccatgtgctcccttgtaaaactgtagtagcctctgtgggtctgtctgtgtagcacacgaagtgcaaagacttcttttctataaactaaaaaagcgaagtgc

SEQ ID NO: 10408 - DNA, 693 bp, Oryza sativa
  ref <308>: DATABASE ACCESSION NUMBER: AK107756
  ref <309>: DATABASE ENTRY DATE: 2002-08-28
agctagttctccacagaacacaacacaacccaagcagagcattagttgatcgagcactcgagcagctagcttagcttagcaatggcggggagcagcagcgtcggcgccgtccaccgcgcgggcctcgccgtggggctcctcctgctcgccgccggcgccgccgcgtgccacggcgcgagggccgtccccggcgagccggagccggcgacataccggccgcagaacgtgtacggattcggcggcttctaccctggccccaacatcaactgggtgttccccggccccaacggcgtcacgccgcaggtcggcttcggcgggatgccgggctcctcctcctccgtcttccccggcgccggtggtgcctcgccgctcacgcccggcggcggcgtcatcggcatccatggcgccaccaagaagccgtgatcatagggcatcatgaggcttcttggcccaaccctcttaagtaaataagaatgacgaaggcgtgcttagctagctagtactatctaggttcgtgttatgtagtagtagtaggtgtttaattaactttgatctgtatcctgtatctgtgtgttgaagtgtgttgtttctgtgtgaaactaatctaggttgttcgtgcatgctgttaatctcatctacatttccacttcttcagaggtttactgtctactaatgaagtggtgggctagttct

SEQ ID NO: 10409 - DNA, 568 bp, Oryza sativa
  ref <308>: DATABASE ACCESSION NUMBER: AK107757
  ref <309>: DATABASE ENTRY DATE: 2002-08-28
tctttgagaggcagcttagctgcttgctgctgctgcctgcattcttcttcagctagctagccgctgctgacctcttcctggtcggagctgcttgtgacgcagctggattgcgacgacgacgacgatggcgacggcgaccggccgagctcggcgacggccggcatcgttcgcctcacgtcgttgtcaggcctcctcggcgaccggctgccgctgctgctcctctgaaatatccggcacactacccattcttcagcctcagccaagcaaccctgcagagatcgttcacacaaatcagaaaaaaaaatatgtcagcttcatcgatctaagaacattccagctttagctgtgtttgaaaacttcagttgtttctgtccatgtactcattttttttaatttttcccttttttttcttgaaatactcttttgtagttttcacattgtttacaaaggacacacaagcttaagcaacctaaaaactgttcaaaatttatggtctttcttctggaattctatcctctgtactttatttttaatatatgctgaaattcaagtgcaaatcctactgttc

SEQ ID NO: 10410 - DNA, 940 bp, Oryza sativa
  ref <308>: DATABASE ACCESSION NUMBER: AK107758
  ref <309>: DATABASE ENTRY DATE: 2002-08-28
atcgccggccgggccgcttcagacgacaacaaccctatccgccggaagaaccaagaaaatttggaagagacaattcacaattgacgaagaagggaaaaatcctccgattcctccagtctcccatcgagcggagcacacaaaccaaaccaagaaaaccggtgatgcttccccccgccctcctcctcgtcgtcgccgtcggcgccgcgctcctcctcgccttccgccctccgctgccggccctcgccgcccgccccatcgtcgccgccgccggcggcaagcccgcccccaccgaggccgccgccaccgcgaggtggctcgccgcccagaacacgtggggcgtcctcagcacaatatcaagtgatctaagtggagctccttttggcaatgtagtttcatatagtgatggagtgccaggtgagagccatggaatcccctacttctatctgacaacgctagatcccactgcgagagatgcattggaggatgaaaggacctcctttacccttagcgagttccctcttgggacatgtgggaagattgatcctgaaaacccaacttgtgcaaaacttactcttactggaaagttgaagttgattgaccctcaatcatctgaagcagatttggccaaagaagcactttttactaaacatcctgaaatggagggttggccaaagaatcatcatctccaaatcttcaaattggaaatcaaaaacatatttttgattgattggtttgggggtcctaagcctatatcccccactgaataccttgaatatgagaagaaccgggccttgctgaagtcatcctaagcgacgcaccacgtttatatgtatgttgtaaagataaacagtaaattaattatatatgctatgtacatatttacatactgtgaacacatcttgttcatcttgaataaaaacgttattatgtttgtttatgg

SEQ ID NO: 10411 - DNA, 758 bp, Oryza sativa
  ref <308>: DATABASE ACCESSION NUMBER: AK107759
  ref <309>: DATABASE ENTRY DATE: 2002-08-28
aatcgcagcgtgccggtggtgaagacgcagacgcccaccgccgtggcgcgggacaccggggccagcaccaggtacaccccgagcgcgaaggccaccagcaagctcctcgtcgacttgcgcatccacgacagggagtgcttgaagtacctgtgccggatcttccagtccaccgccgccgtcccggcgtagatcaggctgaacgtggcgagcatggagcaggtgaaggccaccgtcacggcgtacatgaacgcgtcgaaggcgtacctccccgacagcgccggagagcccgcgacgacgacgacgttgccacggccattgttattattaccatcgccagccgcgtagccaccgggcggcgagaaagccgccgcgaacgcgacagtggcgacgaggacggagccgacgcccaggatctgcgtcgactccgtcattttcttggactcggcgatctcgtctagcttgggtacgtactgctgctggaagtgatcgcgccggatgttgccgctgagggctttcgctaccaccagggaccaaagtatccacgttcgtgcgttctgcatcaacaaattactaaattagatgcaaaatcatctctaattaaagggacttactatgtttcagttgattggttatatatgagttggtttagagactagagatgtctataacaagggtaattttaatatctctgagaaggtactaagaggtaccatatttctatggtaaatttaatacttctaggtattaagtaaggtact

SEQ ID NO: 10412 - DNA, 730 bp, Oryza sativa
  ref <308>: DATABASE ACCESSION NUMBER: AK107760
  ref <309>: DATABASE ENTRY DATE: 2002-08-28
tgcgagggagggagcgcgcggaggcggcggcggcggcagtgaggtgagttcgtcggtgaagagaaagtgggggtgaagtgaagtgcgatttgaggagggagcggtggaggcgtgaggaggcgagccgcacatggccaccacgcgcggcggtggtggctgctgctggtggcggtggtctgcctgttgtgcgcggcggcgaggtctccggaggggagggcgcaccgcaccggcacctgaaggggctcaacaagccggcggtgaagagcatcgaggtgcgtcgtgtgtgaagattttgaatttgcctctttttctttttcttttttgaattggtatctatcatgggttcgtcctggtcaaagttaagcgtgtgtggcttcatttgggaagaggatttgggaggaagcacgagcaaggtggtaggtttgctcttgggcttatcgttcaaagtgcaaggtggcattctgattcaaaagaagatgtcttttctgtggctctgtgtggttgtgcaaggcccttcttccagccgtaccacctcatcatcgtcctggacggcgaccccaagaagacgatccgggtgactgcttcgatgaagaagtttatctccaagaagaagtatatctacaccatcgacgagttcctccccttccacccctcgattaacttcacctcagtgagatctgtctctgttaaggtttgatctgtggacactaagtaatatttgtgctcgatg

SEQ ID NO: 10413 - DNA, 560 bp, Oryza sativa
  ref <308>: DATABASE ACCESSION NUMBER: AK107761
  ref <309>: DATABASE ENTRY DATE: 2002-08-28
ctccttcgccgtcggcgacgccagggacggctgcgagggcgccatgctggtgcacgccgtcgtcgtcgccggcggcggcggcaacgcgacggcgaaggcggcggcggcggccgtgccctacgcgtcgcgcggcggcggcggcgccaggcaggccagcctgaggttcgtggcgagcgggcggcgcgccagggtgacgttctacagctcctactaccacaccagcgccggcgacggcgtgtcgccgtgcgggccggtgctggaccaggtgaaggtgcagccattgatgacgaaagcttagcttaagctgtcgtcagctcagctcagctcgtcgtaatcttgcatgccttgtgttggctaatgttaatctgtggtttttttttgtttttattattttttaggtaaaatttgcggttttttattgatgttgtcatgaattaaaatgagtgcaaatgtgcaacgtagcaggatgtggctactggtacgtgattagcgatctcgcgtgacatttgaaagctgttttcacgtttcatgaaatttggaagctgttttcatatttcagt

SEQ ID NO: 10414 - DNA, 990 bp, Oryza sativa
  ref <308>: DATABASE ACCESSION NUMBER: AK107762
  ref <309>: DATABASE ENTRY DATE: 2002-08-28
caagtattagatccaggtgttctctatgatagccatctatattctcatattctttatattggtttggtccaagtgttcttcatgtacaatatcattcaaccaacctcctgtatattttcaatcatccattcatccatgcaaccacccggccgcgcgtgccggcacgcatcagcaccactcatttgccgtcttcaactctcacaagttttcgccattatgtatatggccaagatagtcgtcaccggacaggagctgttaagcaagcttactgtcagcagcttgggatggaaggcaggcaacagaggaggaggtgtcctagcttttgttggctcctgagacatgcgtgcagaggattggtggctgttcgtctctcgcgttcacgggctgctgcgtcctgccaaatcggcccgattcgcctgcgctaaaacatcggtcactcggacaccaccaagggtcaaggaaagggagaatcagcatgtctcagttctcaagatgatttgcagagctcactgggatcctctgtgcctgccaggattttcgtcaaagagatgcaagtgctaagtatatcatggttatccctctaagaccaggtacaatagaagattattagccagctgcaaatatattttaataagataaaagacgagagagaagagcagcgggctacagatctgtaaccagctgcaggctgcagcacggacttaaagacgcaatgtgtgcatgacaggtgcgaccatatataaatagtatagtaagcaactattgtattaattgtctattagatcggctatagatgaattggaggtagtagtgggctatattattaaacttgctctaagagcgagtacaatagcaagctataagttaagctgtaagcatatgtggagaagagaagaaagaagagagaaggaaagcgggctacagatttgtagccagctgcagcaaaaaaaaaaaaaaaaaaaaaaaaaaaaaaaaaaaaaaaaaaaaaag

SEQ ID NO: 10415 - DNA, 1128 bp, Oryza sativa
  ref <308>: DATABASE ACCESSION NUMBER: AK107763
  ref <309>: DATABASE ENTRY DATE: 2002-08-28
agagcgctgcacgacctccgcctccccaatccgtcccgtctcctcgcccgccgccctcgactcccgtctcctcgcctgccgctggcgccgatctccatcctgctagcagaggtggcgccggcgtcctcctgctcccgccgcattcgcatcctaatccatcccatccggcctcggcctcgaatttcgtctcctcgcccgccgcttgcgccgatccccatcctgcgagcagaggtggcgcccggcgtcctccttcttccaccgcatcgtcgctcgccggcaaaatgggcccaagagttgtatttatgttcatcatcgctgtaatgcttttgggagatacaagcttggcctttgataatgctgttggtgaaaagatttcaaatatggaaacatccctgacaatgaaggtagatccacaactatgccaaatttgtgaggagtttgccacagaagctctcttctatcttaatgagaatgagacccaagttgaaatcattgccactcttcaccaagcttgttcaaaatttccttcttttaagttggagtgtacaaaattggtggattactatgtttctcttttcttcacaaaagttacttctttaagcccagaagaattttgtgaatcagtaagtctttgtcacaaagtgacattcattcgtctcccaagacatgaagattcttgcgacctttgccatgaggtggttgatgagatccttactgatcttgaaaatcctgatgtggagcttaagataatcgaggtacttctgaaaggatgcaacaatgcagaaaattttgtacaaaagtgcaagaagttgatcatccaaaatgcaccaatcatactagaacatatcaagaagtttctgaagaagagagatttctgcaattctatccatgtatgtggaggcaagattattcctgctagagcaggagaccttggggccctttctgctgcctgaattatcctgagcggtgtacagttttacaacaaagtttaagggtgtacatgcaaaaaaatctgcccaggcaatgtatagtacatttatttgcgtctgtagaaaaataaagcaagcagtcaactttgtaaagaatacaagcctattttgttgtgtccatagaacacgagggccatgt

SEQ ID NO: 10416 - DNA, 735 bp, Oryza sativa
  ref <308>: DATABASE ACCESSION NUMBER: AK107764
  ref <309>: DATABASE ENTRY DATE: 2002-08-28
tctctctctcacttctctgcaacggcaagctgcccggggcgaggtgagagggctgcgccgcgacggccgccggcggaggcggcgcgcgagcgcggcggcttctccactttctccgcctcctcgtcccgctcggccgacgtgggcgcgctcgtgtcgtcgcgcgcgccgacgaacgcgtcagccctgtcagcggagccggcgacgcgtacgcgcggtgggacgcggtggtggggtgccgggcgttcgcggagaagccgccgcgctccgcacatggttcagtctacctaagttcttgaaggttctttctgcttcagaccatgtgcaatcttgaagaaccgatggttatgcttatccagttgaaaaatcaacatagcaaccaaaactgtcattaggttcctagaatttttcttgtaaggactcaccagatgcaggtccctcaggcatcatataactgtaacatcagctaaaagaagagtgaaactgtcactgttatgatgttcttgtgcagctgctgctatgccggctcaagctgaatccacacagccactatattcttcatatattgccggtgcatgtcatttccatacatgtagcatcatatgaagcattttcctgttgtcttgattatctatgcaaagggatcctccagttcatctcccatagacaaaagagcaattttacagtccttaagaagataccatgaggtatcattttttctattgtaaatttagtacc

SEQ ID NO: 10417 - DNA, 1058 bp, Oryza sativa
  ref <308>: DATABASE ACCESSION NUMBER: AK107765
  ref <309>: DATABASE ENTRY DATE: 2002-08-28
aagcattgttgcgattgattttgtagtaagcaacagagtaaattaagaaagctgtgactgcaatagtggatggctcgaccggcagctcgccgcggcgcaaggcgcagccgcgcccgcggcctcctgctcctcgccgccgccgccgccgtggcggtggtggtggtggcggcggcggcggcggcgggtgaggaggagcgccaccagcagcagcagcagcagccgggagggacgttcgagttcaacctgcctggccatggcaacgtcaaggcctcgtggagcgtggccgacgacgaggagagccggtggctcgaccgcttggccgccgacgccgagtcgtcgtcgtcctcagcctcggcggcgggcggcggcggcggccaccgtatccccttcggcgacgacagcgtcaagttcggcagcgacgcgtacgagttcatcgccgacctgctcaggcaaggcaccgacgacggcgagggtgagaagccgacgggttactgggagaaggttgacgaggaggggagccggatgctggaccgcatcgccgcgaacgcgagacaccgggcagaggccaacggcgacgacgacattggtggctttgttcacaacgtcttctctggcaagtccaagcagcacggcgaggagccgtctcatgtcgagagtgacaaggagttcagtaacagtaagctccctcctcatgacgacatgtaggagaatggtactgcaacaagtacttggggtgtgttgatccgtggtgtcaactgtcaactgctcagcaggaagttggaaggaagcctatctactaaagcaagaaggttaacttgcataagcctgaaggtttaggaggatcatgctgtcaagctgaataattgtagcagtctagttcatgtcttagcttcctctaattatcacaatctggaacgagtgaaacttgcacaatcatatcactgtgatatttcaatttgcttgctactaaattgatgtgggtttttattcaggcatgattagaagacagtactagcatttcacaggattttaactacaataagtatctgattattttc

SEQ ID NO: 10418 - DNA, 640 bp, Oryza sativa
  ref <308>: DATABASE ACCESSION NUMBER: AK107766
  ref <309>: DATABASE ENTRY DATE: 2002-08-28
cataattgtttcctcggggccatttttactgcagtctgcagagcagttaccgccgtcgacgtgaagttgccagccatggaaggggcgtgcctccgcctcgtcgtgaacccgcagcaaccgacgacgctcctcgccgtcttcctcctcctcctcgtggccgccgccgtcgcgccgccgcacgtcctcgccgccgaccacgtcgtggggggctccatctggtccatccctcccaggcccggcctgtacagagcctgggccgacaaccggacgttcgtcgccggcgacaacctcgtgttcaggttcgagacggggatgtacaacgtggtgcaggtggggaggcgggagttcgacgactgcaccgccgacgacccctaccgggactggaccgacggccccgccgtcgtcacgctcggctccgccgccgtccgctacttcatatgcaccgtcggcaactactgctccctcggcgtcaaggtgtacgtcgcctcccagaatgcgccctagatgaaccattccgctttgcttcttctgcagtttctcattgatccatatcacagtttctgatccatcatatcatcatcattggtgttcgtaaccattaaccatttcgctatccattcagtatcaaactatttccaag

SEQ ID NO: 10419 - DNA, 452 bp, Oryza sativa
  ref <308>: DATABASE ACCESSION NUMBER: AK107767
  ref <309>: DATABASE ENTRY DATE: 2002-08-28
aaggcggcggcgcagcagggcgcactggatctcgccgtcgccggccaccatctcccctcccctcctctccagcctcccgtccggcgtccagcctcacgaatcatgtcccctccacgactccagctcaccctccggagtcagcaaggggcggcggcggcggggaggcgagacaggcaagggcgcgacgatgggacaggcgcggacggcgaggttgtggcggccggcgagacaggcaagggcacggcgaggggacaggtgtggccggcgaggttgcagcgcacatgcgcggtcgcggcgaggggacaggcacggcggcggccggcgattcacggcgagcttcacctacgcacaggcggagattcacagagagtgagaggtattgctccatctccaagactccaattgtgccttgtgattttgtgaatgaaactgtgcccatgatatttttgtgt

SEQ ID NO: 10420 - DNA, 582 bp, Oryza sativa
  ref <308>: DATABASE ACCESSION NUMBER: AK107768
  ref <309>: DATABASE ENTRY DATE: 2002-08-28
tcgaccgattcgacaccgacgaaagagggcgaaaaccatgggctcctcctcgagcaacggccggaccgcgcccgcgccgccgcctccggctgcgcctgcgccgccgcacccactccacgtgatggacgccgacgaggaggacgagaacgtgaagcagctcagcgagtgcgccgccctctacctctccctccaggattgcctcgtggagtccaaccgcagctggaaggcctgccaagcacatgttcaagccttgaaagcatgtgaggcaaagagaaacaaaagtgaaacaagataaaattattttgcaatatttggcactaataccagtctgcttttggaaggtttatcatattcttcattgaggatggcgacaccataggcagcgtgtttagagctgttagctgatgatggagaaggtctacagcatcataacctggagttaacttgttaaaagaacctgtagttagatttcgaccgaaaggacacaggatgagctcgccacgttaactgaacttgcttgattgtttctggtggcagtcgctgtttcttcacattttcatgaaatgagacaatatcagcatt

SEQ ID NO: 10421 - DNA, 940 bp, Oryza sativa
  ref <308>: DATABASE ACCESSION NUMBER: AK107769
  ref <309>: DATABASE ENTRY DATE: 2002-08-28
ctcatctcatctcctctccacaatcttcggcttcgcttgaagccaccgcaatctccccaacttccgaacaaaaaaaaaaacaaaacaaaaaaatcatcaattacagcgacgctccaccgcctctcctccgcttttaatcccctcgccgcgaacggatcgggcggcggcgggggctagggtttcgcgtttcgaggttttccttctagaagcttccgcgggcggatggccaccgacgagctccactccgccggcgcgccagcgggcgtggcggcggcggaggagggggagggggaggcggcgcaggggttctcgttcagcatctggccgccgacgcagcggacgcgggacgcagtggtgcggcggctggtggacaccctgggcggggacaccatcctctgcaagcgctacggcgcggtgccggccgccgacgccgagccggccgcgcggggcatcgaggccgaggccttcgacgccgcggcggccagcggcgaggccgcggcgacggcgtccgtggaggagggcatcaaggcgctgcagctctactccaaggaggtcagccgccgcctcctcgacttcgtcaagtcccgctccgccgccgccgccgccgccgccgccgcggcgccgcccgagggagaagcccccgctgctccttccgagagcgaggtggtggatccgcagcccgcggaatgagcggctctcagttcgttacaatctcattgcctgagaagatgacttgcatctaagagttcgtttggagaaatgtggctttggtctgggaaccgatgtaggtttcttgctctgattatccgtgcagtttgttctttgatgagtagctcctggctctctttgttcttagtattttacctgtttgcttcccagttgtactatctcgtagcaagattatgttccgtttattatgataatgatcaagatttgaacc

SEQ ID NO: 10422 - DNA, 1065 bp, Oryza sativa
  ref <308>: DATABASE ACCESSION NUMBER: AK107770
  ref <309>: DATABASE ENTRY DATE: 2002-08-28
aacgccaccctctgcgacacggtggcgacacacacgctctctcactgcgtcgtctcctctttctttcaccccgcaggcacccatgactcgtgcgaagctgaagctgagctgatccgcgcacgcacgcgtgctgctgctgcttgttgcttctccacttctcttctccctctagctaccacctcactactgccgggacagtaggccgcgctagctgtaagctgctcgtctcgagatctcgcgagctacgtaccggccatggcctcggcgcgccgcggccgccgacggagagtcccggtcgccgcctcgccgctcctcatcctcctcgtcttcctcctcgcagcttccctcggggcgtgcagttcggcgagaaagaggagcggcgacggcggcggtgcggtggcggaggaggtgtactactccagctggggatcggcggtggcggtggcggggcggcggaggctggtggggccggggtcgtcgccgccgacgtgccggagccggtgcggcggctgccacccatgccggccggtgcacgtggccatccagccaggccggagcttcccgctcgagtactacccggaggcgtggcgctgcaagtgcggcgacaagctcttcatgccctgacggtaatttgggacgaccaacgcaatgcacataagcgtcgttctcgttcaccactccgccattgatgaccattgctgctaagctgcccaagcttgctcttcccggctgcgtcgccattgctgcacggagcaagagacaatactgcagccaagaaggacattgctgcgaagatcgatcaatcacgcaggcttcgatgggttggtgtgtgtaacgacattgttgagttcttggagattgaacatcgagtgtaatgctgctgtaagtagatgcttgtttgttgtgtacaaaaagagggagcggacgagggcgagagatgttaatgctgccattttgtttctcctcctcctctcctttcatttgtttttttttttctctgttgtttgttcttcccttgcgtttttttggggagtggtttccctactaatttgttccatctttgcc

SEQ ID NO: 10423 - DNA, 600 bp, Oryza sativa
  ref <308>: DATABASE ACCESSION NUMBER: AK107771
  ref <309>: DATABASE ENTRY DATE: 2002-08-28
aaccaagcacacagtcgctcgctagcgaagcacgcgatctcgcaattcgcaagcaaaccaaccaaaccaagaaaaccgaggaagaaggaggcgaaagccattagccatccatggaggccaacaagagcagcaagccggagagatcatcatctcagcccacccacgacgccgtcgtcccggcgtcggcgagcggcggcgctgcggcctcctgcgaggcgggcaggacgccatcgtccggtggcttgccgttgtccaccgccgcgtcgagcgagaagaggccgggctccggcggcggcggcgagctgccagggtggaagctggactgcctctgcagggagtccggcatgtcggcggcggtcatcagcgggggattcccctgcttctgatcgagtacaactaggctaggctcctgtatttggacgcaagaatttttgtttggatcgcgtcggaattcaaactattctcggtgaaatctctctgaaattctcgcgtttcaaacagggctttgcaaagcatactttactacgtacttgtcttgtctagtttggttgtgttgctgtgagctatgatccatatatatgatatatgttcatcatgttc

SEQ ID NO: 10424 - DNA, 525 bp, Oryza sativa
  ref <308>: DATABASE ACCESSION NUMBER: AK107772
  ref <309>: DATABASE ENTRY DATE: 2002-08-28
gtcaaaccacaatccaaccaaagcaaagcaaaggagagagatcccggagaagaagtttgcgtgcaaggcgatcgatccatgagcctgaggcacatgagccgagtgggcgcgcgcgcggcgcaggccgtgcgggagggcgcggggaggtcggtgaaggacaaggcgcagtcggcgacgacgtcgacgtcgtcggcggcggcgaggagcagcggcggcggcagcagggcacccgccgcggggtcggtggagaagggcagggtgagcgcggcggcggcggcgagggcggcggaggagaagcggaggcgggcggagcagtcgctgcgcaccgtcatgttcctctccgtctggggtcccaacacctgatgaaggctagtactagtagatgtgtaggctagcgatagcttatctgcatacggtggtgtgaaggttttgttctgcgtctgtgaaaatctcagatgtgaatgaagatgtaattaagtatgtgaatcatcgtctatggatgccgaaaatactgtttattcttgg

SEQ ID NO: 10425 - DNA, 618 bp, Oryza sativa
  ref <308>: DATABASE ACCESSION NUMBER: AK107773
  ref <309>: DATABASE ENTRY DATE: 2002-08-28
accgcagctaagctcgcagcagcagcagctcacgacaagctctcacgaacacgcagccgcatccgcatccgctccccgacctccggcgccgccacccccgtgcgactcaagatgcggctcccgagggcgcaggtggagaagctgatgggggagagcaaggacgcgtccgaggcggccgccaagatcatggagctctgcgccgccgcgggcgccaagagcgccagcgtgaccccggagaggccgcccgggatcttgcggagcccgcggttcgcggcgacgccggagtggggagccgggttcatggtgccaccgccggcgcccggagcggccaagacgccgcagaggtggccgacgctgcctcgcaccaaggaaaaaaaagcaaggttcgtggcgctgccggatgagctgatagcgtgatttgtatttctgaaactgaaatgggttaacattgtactgtcacaaagcatgtttggtgactgtcaagcagaccagaagatatgaaattataaacctatcttctgtgttctgtctgagctatgcttttctgagtaaccaaaaactatagtttgaagatgagaagccgccgatgggcttccaattcatcttggtttgacatct

SEQ ID NO: 10426 - DNA, 671 bp, Oryza sativa
  ref <308>: DATABASE ACCESSION NUMBER: AK107774
  ref <309>: DATABASE ENTRY DATE: 2002-08-28
gatcgatcgatcacaacattttcttgaggtcgatcagtagtacccatggccggtggtggaggcgccgtcggagaacactacatgcgggtgatccgcggcgacgacgggtacggcgacgacggcggccagcaccaggagaagccgggggcggccgtgtccgttgcgaagggcgccgcggcggcggcggcggcggggtcgatgctggcgctggcggggctgacggcgacggggacagcgctggcgctgatcgtggcgacgccgctgctggtgctcttcagccccgtgctggtgccggccgccttcgcggcgtcgctgctggcggccgggctcgcgtcctccggcgcgctcggcgccgcggcggtgggcgtgctggcgtggatgtaccggtacctgcagtcgccgtccggcgagcacgcgcccgccggcgccggcaaggtggagcacgcccgcgcgctgctcgacgccaaggcgcacgacgttggggactgggtccagcaccgcctcgaccaggcacgcacctagaaaaattagctacggattagttcaaatcaactcgcctatagctagctgatgcaatctcacatatgcatatgccttcgtgtttgtgtaatgttccgtgtgtgtacaataattagttgcaaaatgctggattgctggtacggcgacatctg

SEQ ID NO: 10427 - DNA, 1005 bp, Oryza sativa
  ref <308>: DATABASE ACCESSION NUMBER: AK107775
  ref <309>: DATABASE ENTRY DATE: 2002-08-28
attccgcgaggatggataggtgggaggccaccgtcttcttgcccccgccgccgccaccgcagccgacgcagccgcagcagcagcctgcggcggcggcggtgagggctccggtaggcgggaggggtgggggaggagggaggcagtatcgcggggtgcggatgcggaagtgggggaagtgggtggcggagatccgcgagccgaacaagcggtcgcggatctggctcggctcctactccaccgccgtcgccgccgcgcgggcctacgacaccgccgtgttctacctccgcggccgctccgcgcgcctcaacttccccgaccagctcgacggcgcgggtggtggtggcgcgggcgccggcggcgccgaggaccacagggagctcaccgccgccgtcatccgcaagaaggccgccgaggtcggcgcccgcgtcgacgcgcagcactccgtcgtcggcgccgcggcgcccgtgccgctccagccgccgcagcccccgccgccccagcgccgccggaccaagaaccccgacctcaaccgggagcccaccccggacacctccgacgacgagtagtaatccgtgctaattttgcctcccttcttccatccatctagttcgtagtccttagccaccccaagacacagagagagagagagagtagcagctagtagctatagctagtcagcgaagcagatagcgccaaggaggcggtcgtggacggggcgcatgcaaggtgttcggcgaaatgcgattgaggtcggaggagcccacaagtatatccaataatggagccgcgacgtcgccgtcaagccggggaagtggtggttagcaagtaggaatctagagctcagctcgtcgtctgttccggcgacggcgactgtactaggagcgtgcgtgtcagcgtgagcatgtagctaaaagcaagacggctatgtacctcacccttttcgcttaagcgtttgtttgtaaagagaagatacccagcaagcaagacaaaaaaaacagcttcaag

SEQ ID NO: 10428 - DNA, 632 bp, Oryza sativa
  ref <308>: DATABASE ACCESSION NUMBER: AK107776
  ref <309>: DATABASE ENTRY DATE: 2002-08-28
atcaaatcgcattccaccaattctccactctccatcctcctctaaaatccatttcaaattcgcgattctgattctctccttaatcgaatcgcgaatttcgttagctgaatcaaatcacagcattcgctagctgcacaattcttcttatcggaatccaaaaatgcaaccggcggggtggtggacgaggggatgatcgagctgcggcggaggatccacgagatgagggtggcggagagcgggtgggagccgccggcggagtgggcggcgtgggagaaggagtggtacgggagctacgacgccgacgtgtgcgcgctggtgggcgccgtgcaggccttcctcatgagctcccgccccggcgtcggcgtcgggatcgtggcagcggtggcggtgagcgttccgaccaccgccttcgtcctcgtctccggcctcctccatgcctcccagtctctcctctccaacctccaacactagaagcttagcttccaagctaaccatggatgatcacacttgtgttctttctagtttatactaatttaattttatctaaaaaaactagtatatgtaatgtttgatttgattatcgtttcaattacaggaaaagaaatatagattgtcaaattaacatttcgtct

SEQ ID NO: 10429 - DNA, 973 bp, Oryza sativa
  ref <308>: DATABASE ACCESSION NUMBER: AK107777
  ref <309>: DATABASE ENTRY DATE: 2002-08-28
gaagcaagccgagcactgcagtgaagcgatcgagccaaagatggccgccgcgaacctccacaagtgcatcgccctcctcgtcgtcgctcttgcggcggcgctctcgccgtctcactgcaccgccaccgccaccgcctccccgcctcgctacgcctccccgccggtggaagcaccggatgaggaggctccggctccctatgccgccgaggcgccattgacggggcaacaaggacctgagcacgggaagcatcaccaccacgagtcgtcgtcgtcgtcgccgccggctgaaccgccgtcgtcctacaacgcgacggagcacaagcaccacggccaccaccaccaccgccgccgccaccaccacggggaagctccacaggcgcagccaccggctcaccgctcgccgccgcctcaccacttgccgccgccgccccctgctcacccctcgtcaccacccccggctcacgcctcgccgccgcctcatcacctgccgccccctgctcacgcctcgccaccgccgccgccgccgccgtcccgttacccgccgcattccccacctcctccggcgcacaagtatccaccgccgccgcctcacggcaaagcagcagcagcaccgccgccgcgcggccacaggaagctcccgccgccgtctcctcattcggtgaatttggcaatggcgccctcgccatcttatttcagtgctgatccaccatctaactaattaagcagagctgatcacatcagcagctctgatcgatcggcgacgctcagaatggagcatcgccacattgctatcttttggaatctttgatatgcaaggccaagataaacaccttagctaattaagtaaactcgaggtgaaatgaaactgttaggcaaataatcaaaagcccaggagcaactttctgagggcgttcgtgctttttgtaacattttctatcttccaaaatttaacgagaaagttactgagtaaagt

SEQ ID NO: 10430 - DNA, 722 bp, Oryza sativa
  ref <308>: DATABASE ACCESSION NUMBER: AK107778
  ref <309>: DATABASE ENTRY DATE: 2002-08-28
aggccaccaccatacgagcggagaggagaatacggcggccatcaggaggagcgcgcgcgtggcgggtccggtgcccaacgggagcggcctccggcggcgcaagcgcaagaaatcggagttgggggcagaggggagcgggtgggcgtggccgtggccgaggcgactctggccaaccagctggaacggtggcgcgagcttttctgaggggccgctgactccacgcagaatctacgacgtgattgagaacgccatcgtcgtcgccgtcgccgacgtgccgcaggagctcctgcaccgccgcgaccgccgcttctcgcctcccccctaaggcgacgcatgtctaggcaaagcaggctgtgtagatcgagccgccatcaccccctgctcatcagccgatgcaggtgctggcgatgtggatagaggcagggcggaggcacggtgagtaggagataggaatttatatttttcttgcgattttttttttctggattcatgtccaatactccggactcttccaatcttccagatgattagatcttacgttttgtaaataactcatccagacgatttttcaccgttgatgtaccatctaacggtcctgggattggtgggaatacgtggcacattctccatcgagaattcgaatggagcgcaaagcttgatgccacgtggccctatctgaggctcgggatcggaccctgaaatcgtatatagagatttgcagc

SEQ ID NO: 10431 - DNA, 1113 bp, Oryza sativa
  ref <308>: DATABASE ACCESSION NUMBER: AK107779
  ref <309>: DATABASE ENTRY DATE: 2002-08-28
aacggctatctatacactatagcttagctagctagccggccatggcggcgtcggcgcttcaagcggcggcgatcgccgccgtcctcttcctcctcccttccctcttcgcggccgtcgcggcgcagtccaaggccaaggccttctgcatcagccagttcgccatcgccagccaggcgtgctccatcctcccgcctagtccccccgacgagcacgacgacgacgacgacgacgacgacgacgacgatgatgacgacgacgacgacgacgacgatgatgaccacgacgatgacgacgaccacggtggtggtggtgacgacgacgaccacggcggcggggatcaccaccgtgtgcgccaccgccaccgccaccaccgcgaccgcgggcgccgtggccacgccgccgtggtcgacctctcgacgctcgtggcgggcaacggcagtggcagcacgcagatcgcacccgccgtagccgggaacgacaccgcgggccaccgcggcaaccgcaccgcccgtggcggccgcggcggaggccgcggacggcgccgcggccatggcaggcgcggccgtcttcgcggtgacgacgacgacgaaggcggcggcggcgacgacgatgaccaccatgacgacgacgacgaccacgagcacgaccacgacgagcaccacgacgaggagctgagggcgtaccgcgactgctgccggtggctgcaggaggtgtccaaggactgcgtgtgcgacgcgctgatgcggctgccgccattcctggtgaagccgcagcacacgtacgtggtgagggtcggaaggacgtgcaagatcacctaccgctgcggcggtgtctagccggcggcgacgtcgccgccggcgaggcgaatgcaagctactcgatcgtggttgattaccgagctgagtttgggttggcgtcacgtcgttgctcgcgtcgtcgtcgtcgtcgtccctctgttttaactgtctgtttttccattatggttattcatgtttgggcatttatttgttctcctaattagattattattatcaggtagatatatatgaaatatgatgaggtccttgactatcagctagattttaaaaatctgaacttcgggatttatgtttc

SEQ ID NO: 10432 - DNA, 545 bp, Oryza sativa
  ref <308>: DATABASE ACCESSION NUMBER: AK107780
  ref <309>: DATABASE ENTRY DATE: 2002-08-28
agagccctcgcagaaccctcactctctcatgccgcaatcaccatgagcgccgccacccccgactccgccgccgccgccaagcgccccatcgacccctcccacgccgacccgtcgccggcggcgaagctccagaggtcgtccccgccggatccctcgccgccggctgaggcgcagggcgacgccactgacggcggcggcgaagtggctggggtgagaagcggggagatggccggcgcgcggaaccctcaggcgcagcggtacctggtcgccgtggagtacgtcggcacccggttctccggctcccagcagcagctcaaccagcgcaccgtcgtcggcgtcctcgaggtgaaatgcttctaatctgagctgtggattcgaaatggcgaccgtaatctgcactgctacggatgtccctggtactaggtagctacacaaattttctgaaatcggtaggggcttggggcagatttacgaaggatgaaagtccgtgagaatatgaagcatgtatactcgtcttttgctggtctaactgaatcgttacactt

SEQ ID NO: 10433 - DNA, 879 bp, Oryza sativa
  ref <308>: DATABASE ACCESSION NUMBER: AK107781
  ref <309>: DATABASE ENTRY DATE: 2002-08-28
ttgaacgcaagttgcgcccgaggccatccggccgagggcacgcctgcctgggcgtcacgcatttcatcatcgaggtgtatttcaacacgcgttctccgcagcgtcgacgagcagaacgcaagccgacgacgaggatggctgcggcggcagcgccgacggtggtggtggtggacgcgcggcactgcgcggcggaggcgacggcgttcgcggtggcgagggtgatcggcacgacggagcgcgacttcgcggtgacggacgccgccggcgcggtggtgatgcgcttggagggcgccgtgttcagcctccggaagcggacgctcctcctcgacgcggcgcgccgcccggtgctcaccatgacggactcgacctacctgatgagctcgatgtggcacgccttcagaggggacagcaccagccgccggagcgtcctcttcagcgtcgtcaaggagtccgtcgtccaggtcaggaccaagatcttcgtctacctcggcggctaccgctccgccgaccaggtccccgacttcgtcatcggcggcaactactacggcggcgcatgcactgtcttcgccggcaactccgactccgacgccgacgccgccattgctcagatcactcgtccaaatttggcgggtacattggtgggattgacgaggtctgtgtatacggctaggatcaacccggggatagaccaggcgttcatcctgtcgctcgttgtgattctgcacgagatgcatcactgcaacactagtagtaggaattggggactttgaactctgaacttgtgacattttttcttcttttatttttcagtacaggttcatcaaatgtaaatcagtaaacgtatgtctctcatttttctatgaatcaactgcgttcaat

SEQ ID NO: 10434 - DNA, 797 bp, Oryza sativa
  ref <308>: DATABASE ACCESSION NUMBER: AK107782
  ref <309>: DATABASE ENTRY DATE: 2002-08-28
gaaacaaacacttcaaaaagctaaaataaacacatgtgaagagctccgattctgaaaaggttgaaacaaagccgggggagaaggatgccatgccgagctcggattcttccgccgccgctagagctccatgtccggcggcgccaccccgcgccgggcgaggtccgggcggcgccatcgagctctaggccggatccacgccggacaaggttcgggcggcgccgtcgagctccggtggaggctaagctcccgcaccgcttcagatccacgccgccgccaccacctcgaaggagcgctgtcgccgccgtcttcccaccgttgcttctacgccaagccccgaggatgccgctcgcccgacgccggatccgtcgtcgagacactgccgggggtggaggggcccggtgagccctcgcgtcgccgcagccctccgcgccctcatcgccggccagaagtggaggggccggtgagatctcgcgccgccgccgccgaactcgtcaccatctcccactcctgtgcccccgcgtcgccgtctcccgccccgcgctctaacccgcttcgtcgagttcgtcgccgtccttcgctggaggagaggagagccggcgccggcggaggagaggaggggagccagcgccggcggagagaggaggggagagagccggcgtgaccgtgagggaggagtagttgggggatttgggtaaagtagtatgggtggagatttatattcttctctcgattttagggtggttactgtaaaatttggacttctttgtaaattgataaacacgtgagggctgaaatgg

SEQ ID NO: 10435 - DNA, 608 bp, Oryza sativa
  ref <308>: DATABASE ACCESSION NUMBER: AK107783
  ref <309>: DATABASE ENTRY DATE: 2002-08-28
aaagaaaaggaagtctgaacttacatgtatcaggcatgggtgagatcatggtgctgcggcgcgcgcgtggcgcggaggctgaaggagctggtcgacccgccgctgcacgccgcgtcgttccgcggcggggcgctgccgcgctgcctctcgctcccggcgaggcggcgcgcgctgtcgcagcagcgggagatgcggcggtgcgcccgcgcggcgctgctctgcatccaggagagccccaagcggcgacccgccatgccggaggttgtccacatgctgcgccccagggggaaggccacgccgccgctgcccggccggtctcgattcaccgcggcgagggcgagctcgatccacggcggcgagacgagcagctgattgatggattgttcatcattggaagagagcaatttgtagtattcatgaactgaaaacagttcagagtttttcagacgaacacaagagcactgaactgaatagctgaagaggttcaggaatgatcaaatcttgatatatggaaacattttggtgggttttcactcattttcactggtgtaaactaatgccgtcaggtgaaatgctgatacgaaatgaaatccttttgtagttgcagt

SEQ ID NO: 10436 - DNA, 1042 bp, Oryza sativa
  ref <308>: DATABASE ACCESSION NUMBER: AK107784
  ref <309>: DATABASE ENTRY DATE: 2002-08-28
actcctctctcttcccaaaccctcctcctctcaccgccgacctcggcccgctcctcgaccccgccgcgccggtctccgccctcgccatccactccctcggccccgtcccgcgcaacctcctcgccgcctccgacgacggcctcctccacctctacgacgccggcgaggggttcccgctcctcgcctcgctccgcgtcttcccgcgccaccgcgagcccgccgacgccttcgccgtgcaccccacggggcgtgtcgcgctcgccgtcggccgctcggggggcctcgccatgctcaacctcctccgcggccgccgcagcttctcctgccgcctcgagcacccggccacggcgatcgcctacgccgaggatggcgccggtggggaccgcttcgtgatggccgccgaggagaaggtgaccgtgcacgactccgaggatgctaggatcatccatgagatcgactgcggcaaaagggtgctcgcctttgcgcctgcaaagaagggaatactttacactggaggagaggaacgcggtattactgcttgggatctttccagtggcaaggttacatcacgcattgaggatgctcattcaactcgtgtgaaagggattgttgtcttcgacgacaagaacgatggatctgaactgtgcaacctaattgcttcggcctcatcagatggtataataaggatctgggatgctcggatgattgcaaaagagaagactactccattagcagaggctaacacaaaagcaaggctgacttgtcttgcgggatcatcattgaattgagctaaggaaagcagaaatgaagcggacgtggagctaaattgttgaattgaggccgtggtaccaattttgtactctttagtttttagtctagtctctataacatatttgtgttggagaaacaaaccgaggagctcgatgtatgggacatgtatgatagccataagttatgcatcaccatagtctggcttgagggcctaaactgcttaatgtttatgcaagcgcatggttctattgtatcaccagttttctatacc

SEQ ID NO: 10437 - DNA, 633 bp, Oryza sativa
  ref <308>: DATABASE ACCESSION NUMBER: AK107785
  ref <309>: DATABASE ENTRY DATE: 2002-08-28
acccttactgaaaaatcacaaacatcaaaacgttataagagttctctagcatccatcacatagccatgaagatctttgtcatcctctctctcctcgccctcgcagcgagcagcgcctcggcacagtttgatgcttgcacctatgggcaatgccagcagcagccgtttatgcaaccgatcatgaacccgtgcaatgagttcgtgaggcaacagtgcagcccgatgagcctaccttgggagcagtcacgcaggctacaactgagcagctgccaggtgatgcggcagcaatgctgtcagcagatgaggttgatggcgcaacaatatcattgccaggctatttgcaccatggtgcagtctatcatgcagcaagtgcagtttgatgctggctttgttggcgagccccaagctcaggcccaggcccaggtggctctcaatttgccctccatgtgtggagtctaccctaggtactgcagcactccatgcaaagttgctactggtcattgcggttcttggtagtgtgtaccatcatatatatatagttggataaataaagtgtcacacatcatcgtgtgtgtcatgtaataaaatttggaatagtctttggctgttcgtatgaataaatgaaaattataac

SEQ ID NO: 10438 - DNA, 507 bp, Oryza sativa
  ref <308>: DATABASE ACCESSION NUMBER: AK107786
  ref <309>: DATABASE ENTRY DATE: 2002-08-28
gcagcaagcaggttagctgcttaggagcaatagacaccggaggccagggtcgccggcgatcatgtggccggagaagatgagggcttgggcatccatggccgaggacccgctgaggcgcgcgtcggcggcatcgtcgtcgtcgacgagcccgctgcggcgctacagcccggccacgctcgccgccggcggcctcctcgtcggcgccgtcgcctacttcatgttcaaggggaagcagggccaaggaaggcaaggcgaccaaccggttcgccgtccttaactagaaggagatcgcttatatcacctagcttatctagtaatcgcttgaataataatctcctctccctttgcctagcggtcggcatccatgtataaaccactatctttgtgcttaggtttatgtatccgttttatccatgaactgtcaaagaacatgaacagaagtcctctctttcctgtcatcccttgtaacagtgtcatttcgatttcaactgaaaaatgcctgtggtt

SEQ ID NO: 10439 - DNA, 672 bp, Oryza sativa
  ref <308>: DATABASE ACCESSION NUMBER: AK107787
  ref <309>: DATABASE ENTRY DATE: 2002-08-28
aagtgagtgaggttggccgcgccaccctcaactgcgacggcaaccttgtcttcctcctctaccgcgaaggtccaggcccaccacccaccggaggccggaggtgatcgatggcgccgcacgagacggagacggggacggagtctgcggcggcaaggcaggcgaaggagtcgctggagctggcgttccagatgtcccagatcctggacaccggcctcgaccgccacacgctctcgctgctcatggcgctctgcgaccgcggcgccaaccccgaggccctcgccgccctcgtccgcgagctctcctcggcggctcctccgaccgccgcaactactcccgcgtccaccgccaccgccgtgccgtcaacaaaagccgcctcgcttttcccctccggtcttcgccaaccctagggtagtgaaaaccggtggaaccaatttgcttgatcggtagagcagactcgagatttgattgctggaagaaaggtattgtcaaacttaaggaagatgctaaatcttgctgtagaatgcatttctgatgctgtggtggcctgtttccccgaggaaggtgtggttcatggaacgctgcgtgatttgcttgagttgtggaagataagagtttagtaatcgtgggaacgttgcctttcctatttccaatagccaattgtatgtatccacc

SEQ ID NO: 10440 - DNA, 642 bp, Oryza sativa
  ref <308>: DATABASE ACCESSION NUMBER: AK107788
  ref <309>: DATABASE ENTRY DATE: 2002-08-28
actgtcagaaacgagatcgaggcccccctcacagtcgcggccaccgccgataccacgcgctagctcgccgcgccgccgcctgcttccgactcgcgtccgccatcgccaacctagaagctagctagaggcttacgaggtgttctcgtgatcgagggccgttcgatcgcactggattgggagggagggggacggcgtcctgcagtttttcgacagaatgcgtggcaagggatcacacagaactcagggagacgatgcaaattctgcgaggcggacatccagctgtggatactctcaaaacgaacggcaaactgagggctggcacaaaggacaaaagacacatattgctggcagctagctgcttcaggatgtggtgctggtggatttgccaaggcagggggcgtggatatcagtggtggaattcgtcatatccttgcttcttgcgtaattaaggtcgtcaatacaggtcgtagagagaaggttgtttggtctctgggagatagtagtatctgagtattgcagttgccgtctttggtgaggattattaggattagccgtgagtccggaggttttgttgtaggtgacaaacctggagcctaggattttcagttggatgagaacattctatatcttacgtgggttctc

SEQ ID NO: 10441 - DNA, 763 bp, Oryza sativa
  ref <308>: DATABASE ACCESSION NUMBER: AK107789
  ref <309>: DATABASE ENTRY DATE: 2002-08-28
agaaaaaaatcctcccagcagcctccctcctccccgcctccaccgtcggctccctcctcgccaccggcgggctcccttctcgacgatgacgacgatcacgatgccgcctccgcgcgccgccggctcccctcctcgccgccggcgtgctccttcctcgacgacgacgacgactgcgacaccgcctccgcgcgccgacggctccttccgccgccggccacgccgagcgacgacaacggctctcctcctccgctagcttccctcctcgccccctccgtcgccggccatgacgagcgacgacaacggctctcccccgccgccgctggcatccctcctcgccgcctccgccgtccgcttctcctcctcgccccctccgctgccggccacgacgagcgacgacaatggctcgcctcctctgccgcccgcttccctcctcaccgcctacgccaccggccacgacgggcgacgacgacggctcgcatccggccgccggctctcctcgtcgatgcaacgacgatgacgacggcacttatgcagcggctcggctcctccctctcctatgtgggagcagtggatggaggagagccgtggccggagggtgaagccccgcctgcgaaaactgttttggaccgcctggaaaaaatctttttcctagtagtgatcttgtctcgttgttatcgttttattaggttagaaaccatcagtgcgatacataagaaagttgacatgtacttatatggtttttacggcagtttggcactattat

SEQ ID NO: 10442 - DNA, 420 bp, Oryza sativa
  ref <308>: DATABASE ACCESSION NUMBER: AK107790
  ref <309>: DATABASE ENTRY DATE: 2002-08-28
acacacacatccgagcctcgagctctatccttctctctcttccccaatgccggccgctggtcgatctctttcaccggagccctgccgcccaagccctcgcgccactaccttcgcctcgatgaggcaaatccattcccctactttccccttccttttcccctccgagataagccaccaccgccgccacttttaccggccgaaactgagctcgtattgtcgccgttccggccgttttaaccttcctctctaccagccaccaacctccccgagtgcgcgtcgaccgggaacacgatatgccgccgacgtcgccgcactttggccactggaagcccggcgccccgctcgcccttttctcaccctctctctcggctcctaactgaagaggggaagatgacgggaggaagaagaagaggaggagag

SEQ ID NO: 10443 - DNA, 701 bp, Oryza sativa
  ref <308>: DATABASE ACCESSION NUMBER: AK107791
  ref <309>: DATABASE ENTRY DATE: 2002-08-28
accgccgcagcagagagcgagcgagagaggcaaacacacgcagagctcgagaatgaggggaggagtgaagctggtgggcggaggcggaggcggggtggcggcgacgtcgtcgtcggcggcggcgggtggtggtggtgggcacccggggatgtggaggacgccgacgccgtaccttttcctggggttcgcggtgatgatgggcctcatcgcggtggcgctgctcgtgctggtctgcacgcgccgcaagaaccacggcgacgcggggtcgtcggcgtcggcggcggcgtcggtcaaggtgctggtgccgctcgaccgggagcccaaggtggtcgtcatcatggccggcgacaccgcgccgtccttcctcgccagcgccaagccgctctcctccttcgtcctccccccgccgccgccaccggccgccgccggcgagccgtaggggaaaccgcccgtgctgcaagttgcgcgtgggaccaattttgttcgtgagatttgctactaggaattaattttttccacccctgtaatcatcggctgctagctctagcacacatggagaggagacgagaggtcaaatttgggtcgaattcttggccagcttcggctttggaatctgtaaattcaagtcttttggtttgttgttgcaactgacaaaaggcaaagctttgtgcttccaataaatgcatcaaggcttttcttcc

SEQ ID NO: 10444 - DNA, 703 bp, Oryza sativa
  ref <308>: DATABASE ACCESSION NUMBER: AK107792
  ref <309>: DATABASE ENTRY DATE: 2002-08-28
gagcgaggtttacaacagagccctgtacaacaaggagcgaggaagcggggcgagccgccggtgggatcgggggtggaacaacgcaccgtccatctcgacgatggggttgtggaccttgatgcggtgctgctcggccaccgccgcggcggcggcggcatagcagcggagggaggcgccgccgcggcggagcgcgcggggtccgggggaagaagggacgaaggcgtgcgcggcggcggggtttaagaggagggctttggtcgcggcggcggaggaggaggagccgtagagaggagccatgccgcagcgcaggagcagcaggtggcgcatcccaccgagtcccgcacccgcacacccacccacgaggtcgaagaggcgcggagccgaggaggtcctcccgtgtcgcgtgtggggcacgcgcaccacgcacgacaagggtggtggtggtggggtgggggcgcgcggcagggagggtggagggaagagggacgaagcggcggcgccgcggtaggggaagtccgggaccgagaggaagggagcgtagcgactggcgagtggggacgggcggccttggtgcaaacaaaggcgtcgtctccgcgaaaggatcaagcagtccggcaaaagggtttggcaacatgtgatcagcatcgttggtttcgcctattgtaatttgtaccctctcttttaagggttaatagggtttgtt

SEQ ID NO: 10445 - DNA, 518 bp, Oryza sativa
  ref <308>: DATABASE ACCESSION NUMBER: AK107793
  ref <309>: DATABASE ENTRY DATE: 2002-08-28
gtctccgcggccgccgccgccggagtccgcacgctcggatcgcccgcgtccgtacggctgtgctcacaccggcagcggaggcggcggttggtggtggcgttcgtgaggtggaggtacaaggggacggcgaggaaggaggcggcgctgtcggagctgatcgagcggaaggtggcggaggcgacgtaggcgtgcgccggggagccgccggggaggcggggtgccgggtggcgtgggacgaggtggaggaggtgagccaggcgaaggccggcctccgccgccgcatcgcccagggcgccgacgaccccctcgagcccttctgctcccacaaccccctcgccgacgactgcgccgtcgtctacgacgacgatgacgacgaatgatccgatccgatccgtggtccggccatccccatccatgatccatccgccaccagcagttctgatttctgaacgcgcttgtacttggtagcaggagtgtactagctttgtgagaaatggggaattttagagactttgatt

SEQ ID NO: 10446 - DNA, 743 bp, Oryza sativa
  ref <308>: DATABASE ACCESSION NUMBER: AK107794
  ref <309>: DATABASE ENTRY DATE: 2002-08-28
acttcccattctcgagggctcgtgtcttgtccgagtcgccggcggcggcggcggcggcggcgatgttgcggtcggcgctgcgccggggaggggcggccgtgaggcacgccgcgtcgtcgtcgtcggcggcggaggcggcagcggacggatctccgggtgcccttctccggcggaaagtggcggagcgggagcgcgcgcggaggcggccacgggacccgtcccgcgacgagttcttcgtggcgacgccggagtcgctcgcgtggctcgactcggcctccctccccatggtgctcacggcggccgccatcgcgctcttcaccaagctgctcatgatggaacatgatgcagcagatcaagaaagaggagaacgcaagataaagaatagccaccctgatcaaggaaaagtaaggatgcttacgcgtgaagaatgggatgagatccaagaagtcaggccaaggaccccttttgaatcgaagttagctcgtccgcatgcccgtataagaactggggaaccagtacggctggaggatgtcaaggattgggctaccgatatgatcatggatgcttttactatagcagaagaaagtgctaagaaaaaatgattcagaagaaatggacaacactaaatacgtatgctttgaggttcacctgaatgcatagttagttaacttttcttttaatttcggttcctgtaaatggccacttttgtgagtcatgatatccgtgtagaataatatttatgt

SEQ ID NO: 10447 - DNA, 899 bp, Oryza sativa
  ref <308>: DATABASE ACCESSION NUMBER: AK107795
  ref <309>: DATABASE ENTRY DATE: 2002-08-28
gttggccatatatccaaaaacacatttcacttcatcgtctcgatcgatcgagcttcgagcagagtgatttagcgagagtgattagttagccgctgacaatgagacgccaggctgtcgtcgagctcgtcgtcgtcgcggcggcgctcgccgccctcgccgccggcatcctcgcggcgtcgctcctcctgctctggcgctgccgccgccgatcagcggcagcaaacaggcagcaaccagccgtcgtcgtcgcctccgacgccgagctcacggtccagagcccgaagaagccggcgccggcccggcgccgcggcggcggcagcgcgctccggcgagcgctgctccgcctcctgttctgctcccgccgccgcctcacccgcgtggagccggccgactccgccgccgccgccacgcagggggaggaaggggagcaggcggcggggcccgacgaggaggaggtgaacacgtggagggatcggtggttcgggccagccaccgccgccgcctcgcgcgcgctctacaccatcgacgaggagtccggcgccggcagcgagggcgaggaggagccggagcccgagacgccgttctacacgccgccggcctccccgccccggctcggcggcggcggccactcgccggaagccaccgtgtgaaggtgaagctagcagctggtgttcgtccacggtccaccgcgacatgattacccgaccgttttcttgttttcttgttggctagtagcaggcttggatttttgttgtcttctttgatttttagttttttgctcatgtcaaaacgacatttttttagccaggttgcatggtgcacaggtacagtgcagttagtactagtgcttagtgtagttgttactacttaatgcacgagcaggatggtgattaagatct

SEQ ID NO: 10448 - DNA, 663 bp, Oryza sativa
  ref <308>: DATABASE ACCESSION NUMBER: AK107796
  ref <309>: DATABASE ENTRY DATE: 2002-08-28
ctcacattacccccggccgcaccacccccttcttctccaacctcttgcagctgcagacacaatcgttaaatcgcgatcaccgcagcaagccatgtcgtcgcagcggcccggccgtcaccagcggagggcgtcgcagagcgtgttcgtgctcccggataacttcgccgacctcgacgacgtgccggccggcgccggcggcgccggcgaggacggccggaagggcgccgccgcgacggcggacgcggccggcgggcagcagcaggctcgcccatcgccggcggcgcgccaccggagggcgatgtcggtggccgtggcgtcgtccagggagctggagatgatcaaggaggacatgggcagctacaagatcggcgcctgatgcagcatcgatcgcacacacaggggcgccgtgcttagtacttgcggctaaatcgtcatgtgtatggccggttaattttcgtggttaagcgcggcacgcgtcgcgtcaaccgatgtctcgcttgttctctctcttcttcttcttcttcttcttcttcttcttcttcttcttcttcttcttcttcttcttcttcttttctctcttttggtgaggacatgtaagatgggagatgtaatattatgcttcctttttccacacgatgactgaatgaatcactaaaatgtgtg

SEQ ID NO: 10449 - DNA, 697 bp, Oryza sativa
  ref <308>: DATABASE ACCESSION NUMBER: AK107797
  ref <309>: DATABASE ENTRY DATE: 2002-08-28
actagattgtgccatcatgattgcatgattgattgcacatttgcatcatttccacttgacttgagccgtcatgtctgcttcttctcctgttgcctacgacgccaatgtcctcctggccgcggtcaccgcgctctcggcggccatcgcgttcgtcgccgcgctccacctctacgcccggtgtctcctgcggcggcgcgtcgccggcgccggcgccggcgccgccggcaaccctcacgcgctgcgccgcccggtgaccccgggcggcaactacgagctcgaggtgatcagcgtcgcggcgtgcgcgctggagggcggcggcctggacgccaagcagctgggcgcgctgccggtgttcacgtgggggtcttcttctccggcgacggcggcggcggacgccgccgtgcagtgcgcggtatgcctcggggagatggaggacggcgagctggggaggctgctcccggcgtgccgccacgtgttccacgccgagtgcatcgacacgtggctcgccgtgagctcgacgtgcccggtgtgcagggcggcggtgggggcggcggaggatgatgagccagcggcggctccggtcgctggcgtgtcgccggcgagctaggtgtgttgagtatcagtgtacattcgatcacttgctagagtttgtatctatgcacttgaaaacaaaattcgggtattttttttctttagg

SEQ ID NO: 10450 - DNA, 564 bp, Oryza sativa
  ref <308>: DATABASE ACCESSION NUMBER: AK107798
  ref <309>: DATABASE ENTRY DATE: 2002-08-28
acaggggccgtcggggggtcggccgccccggacggcgccgccgcccaccgccgatcgccgttggtagtggtatggtgtggcagcagcggcggagattggcctcgtcctcgcacgccggagtcgccgagttcatcctgccgcggcccgcgggccctcgctcgggtgctcgggtcgggggaatcctctaaaccgtacggcgtcgtgtccgcgagggccgccgtaccagatgctgctcaagtagcccggcgtgcatctcgttagagatctatacgaaggggaggacatgaacagcttccagcagaggctcgcggggaggttcagagatccgaccacaccacattggtcatccctaagaaagcgtggaggcgtcgagctactagattttctgataatggcaattttattaggttcttaatttctccgtgtttcgagttcatacatggaaatgcaaaccatttttttgatgcattgatagggaacaagaagtcgatataatgtcgtcatgctaactcctggaatcaaaaccaaatggtgaaatggagaatcatagtcgtttccatgttc

SEQ ID NO: 10451 - DNA, 478 bp, Oryza sativa
  ref <308>: DATABASE ACCESSION NUMBER: AK107799
  ref <309>: DATABASE ENTRY DATE: 2002-08-28
gattgtctggagtgcgacctcgcgctgtcgcgcatggcgtagtggcggcgttcctccctccctctcgtctcgacttgccgccgcgtcggcgccccgtgcatatggcccgccgtcgctggccctcgctcgctgagagcgccatccgccgacggcgtacggaccaccctctcctcgccggcgcctttcttttccccgccgcatccccggtttcggtttcccgtcggcaagagatgaatcccacggacaccacgccatcggcggccgattcgagacggaggacgtcaaagtttgcccactggtggaatatgactcaaattctttggatggcatccttcatgaaattcctttgtgggtcaagaatcctgactgtgatagaattgattgggtgagcagatttctggagatgatgtggccttacctcaacaaggctatctgcaaaactgcacaggatattgcaaatccaattattgcagagaat

SEQ ID NO: 10452 - DNA, 641 bp, Oryza sativa
  ref <308>: DATABASE ACCESSION NUMBER: AK107800
  ref <309>: DATABASE ENTRY DATE: 2002-08-28
tagaagccaagctcgccgtcgagacccctcctgctgctgctgacgcgaaggaggcggagcccgaggaagaaggaggaggaggacgacgccgtgtgcaggcaaagaagacgaccgagaaagcggcgtccaaggcggcgatcgtccccgtcaacgacgacgacgacgatgatcaggctcacgaggatgtcgtcgtcgctgcgccggtggctgctgagcatcaggagacggcgaaggcggcggcggcggcggccggcgaggaggaggaagcgccggaggacaaggaggaggatgcgtgtgagaagagcaaggttcatgaggagtagatcgcttgagttttttatcgtatggtgtgcacgcgcgtacgtacgtgtcctttgttatcttagtacttgtcgaaatgctttgcacgcacaatatgcatattatcgttatagtagtagctaagttaattaataaggcagttaatctgctaaagtcattaagtttaagtaattcgatgaagttaactatagtaacgttgatatatacgcgtcttagtgtcaactatgttgtgtactcgtgtttactagtaaaagggatcattagcgttcttgcagtactatctacgaagctatttcaaacaccattatgatgttttacct

SEQ ID NO: 10453 - DNA, 712 bp, Oryza sativa
  ref <308>: DATABASE ACCESSION NUMBER: AK107801
  ref <309>: DATABASE ENTRY DATE: 2002-08-28
tggattgaggcggcagccggttagcgaggggagctcagaccgccaacgcgacgccgtccaattccgggttctccttcggccaaagctggcaaggaggctggcgggtggcgggacggaggaggtctgggccagttcccagggtagcggcagctctatgcagcaagtgtggtggtcggccggtggaggggcgccggcgcggtgtggtggaggcctcgtgctgatctgcttgtgaggtggttcctgagttgatgggcgacgaacctcaagcaaggttgaaaggtttccgggtgaaagcctcgcctgatgattcatcgggctggcagcggctacgcttttgggcgtcgtaacctccttgagggcgctggcaaggatacctttctcccttggcgagttttctctaggtgaaaaccacatctccttagatgggcgatggcggcatccttgatgtcgtgacctccttgggggcatcgcttttagagtctcgtctttgtggtgttgtcgttggcccggcggcgatcggccacgcatagcgggggtcgtctcggtgctaggtttttctctcagtgggttgtgcttgtgtgattagcatgtggctttggttgtgcatttcgatgcaccttcgacctcgacagtctctgtcgagttttttcttctaactttatttcttcttaatatacttggatggcctccttcggccttcccggcgataccc

SEQ ID NO: 10454 - DNA, 635 bp, Oryza sativa
  ref <308>: DATABASE ACCESSION NUMBER: AK107802
  ref <309>: DATABASE ENTRY DATE: 2002-08-28
aagaaccgagaactcggactgatcaaacacatcagagtattagcagataaattttggtgtatggcatcaaagatccttctggtagtgatcggcgtcgcggtggtcagcgtggttgcatcggcggcgccgccggcgcagccaccgcgcatacaagcggacgtcgtcgtgatgggctacgtgccgtgcaacaacggcacctccatgaaatcgggctctgctcccgggttcccaaacgcggtggtgcagctgcagtgcgcgggggacgccgtggcggcggtggcggcggggagcgcgacgacggacggcaaggggtggttccgcatggcgatgaacacgacggcggcgctgtcgagcgtggccagcggctgctcgctggtggtgaccacgccgctggcgacgtgcgacgcggcgctcccggcgacggggacgctccagtccggcctccggctcctcgtcagcatggtcttcttcccgcgtggcttctcctacgtcgtttgatctgttcgtctgggtcccatggtcaattgctctacgtgcagttagtatctacgcctgagaaattattaaactcttcttctcgttttttatgttactcgaatggttataaaaagaattgaagaaaaaccaacattttt

SEQ ID NO: 10455 - DNA, 742 bp, Oryza sativa
  ref <308>: DATABASE ACCESSION NUMBER: AK107803
  ref <309>: DATABASE ENTRY DATE: 2002-08-28
acgccgccgccgccgcatctcgctcccctaccccccaccgccgcaagcctccccggcggcgaaccttaccgcccccgcaatggccgcggactggatgtgggcgcgccggtcgtgggagaagtgggctgggaagcacgtcggcgcttcggggaagccggtcaaggcggcgctgctgctcaactacgacccgacggggccgtctcgcctcctccccgtcgtagcagagcaagaaggaactgaactgaaagctgttgatctgctaccatttctagactttgttcgacggaacaatctgcagatggaattcttctctattggctcaaaccggtatttggtcacctcaatccatgaacactggttctgtgctcgttgcgttaatgcagtacagccagaaggtgaaggtgttatagttatggagattggagcttacttgttagtttgtatgatggttctcttggttctgcttcacaagcaatggtggctgttgatcagtttgcatggcactttaatcgaagaactcactaactgctgatttttgttagtttcaggtgtgagatctgagatgagtctagacattgttgattgaaatcattcttctaaactttagtgtaactgcctaatattactgttctcttgggtttagttgtaatcgctattagctgttttctgtaagacagatgtgtttgaggcaatttaactaaacttattagggcatatctactcggtagtcgtaagtccacat

SEQ ID NO: 10456 - DNA, 493 bp, Oryza sativa
  ref <308>: DATABASE ACCESSION NUMBER: AK107804
  ref <309>: DATABASE ENTRY DATE: 2002-08-28
gcgatgccaccagagacgcggctgcagcagcgcgcttggttgccgtgcgcgggccacaacgtcctctccgcgagacggaagagctgccgcggctgggcggtggcgcatctccttcgccgccaacctcggaggccacgaccgttgccgggcatagcggaggccggtggcaggctggccgctggcaacatcaaagcaaggagctttttcattgtttgcttgagtgcctggccgggtaaatccatgctctttgaacatttcttgcttgaatctgttgggcctttcttgtttttcttaggacaaagtactatcgtttttgttagatacaagtgctagtgcatctagcaattctagtggttactggttagtgcggctgctaatgttgatgcaaagtcatcaagagttatatgattgaactattaatatgtagtttttgggatcttaatcgcttgttaatttgaattgcttatagaaaagaaaattgcaaaatattgat

SEQ ID NO: 10457 - DNA, 699 bp, Oryza sativa
  ref <308>: DATABASE ACCESSION NUMBER: AK107805
  ref <309>: DATABASE ENTRY DATE: 2002-08-28
caagatcgatatctaaaatggcggacaccaagcagactcagaagggcaggaagacccgctcggctctcaacgatgttgtgacccgcgagtacaccgtcaacctgcacaagcgcgtccacgacaccgccttcaagaagcgcgctccccgcgccatcaaggaggtcgtcgccttcgcccagaaggccatgggcacccaggacgtccgtctcgaccccaagctcaaccaggaggtctggaagtacggtgtcaagaacttcccccgccgcctgcgtgtgcgcctcgagcgcaagcgtaacgacgacgagggcgccaaggagaagctctacacctacgccatgcccgtcctcggcctcggcacctgcaagggcctccagaccaccgtcatcgaccaggagtaaatcatactctctctcggtcgtgtctcttggtctcgcaattgcatcttctcccacctcctctccacctcttacgtctaggatctatccagcatcacagtgccacggtctcgcagtcagggccgtcgtctcgcttttttcacactgctgcatccgctgtcgaggcaacgctgcgagcttgcgttgttctcctcgccagtcccatccattcccgatactggggcgatgatctatttaggtctcgcttcatcctgtacctctacaaaaagcaaagctctaccaccaaaacaagtctgtttacgcc

SEQ ID NO: 10458 - DNA, 891 bp, Oryza sativa
  ref <308>: DATABASE ACCESSION NUMBER: AK107806
  ref <309>: DATABASE ENTRY DATE: 2002-08-28
acacagagtacaacaacacatctgcgagactgcaactgcaagcttaggtacacggctcgagaggaagagcaaggacagtgaggtcagggactgagctgagctgagctgctctcatggtcatggtgatggtggccaatcgaagccagcatagctctcgctgaagccgccgccgtagaacctgacctccaggttctcgaggccctggccgtcgtcccaaatggcctcgtcgtcgctcccgacggcgtagtagtcgtcgtcgtcgtcctccatgagctcccacgagtagatggaggagtcgtcggagtagtcggagcactcctccaggtagctgttctcgaagcagtcgtcgacgccggggccgagcaccctcagccccgggtgcctctcctgcaggaacttgtcgtcgacggcccagcagccgcggaggtcgaggaaccggaggtcgcggcaccgcgcgaggatgtcgagcaccgcatccgtcgcgatcaccatgtagcccatctccaggtgccggagcctcggcatggtgcaggcgatggcgcgcgcctcgtcgcgctggcacgccttgccggcgacgtccgtcgggtgcatcacccgccggagccccaccagcgacttgcagttcttgccgaacgcctccagcgcgcgcgccccgatcttggtgcagctgctgatgtccaggaacgtcacgttgggcagcctcggcgccacgctctccaccgccgcgtcgctgatctcgctccgtggaatctccagcgtcctcagtgcccgtgcacttgcaaaaccaccaccaaaattcagcaccaagaattactgctagtaataaaccagataattaaccattgagttacagttaattgctggaaatggattagagcacgcgcggtaatg

SEQ ID NO: 10459 - DNA, 866 bp, Oryza sativa
  ref <308>: DATABASE ACCESSION NUMBER: AK107807
  ref <309>: DATABASE ENTRY DATE: 2002-08-28
gggaaaacgactcacggcactagccgaaccccggccgctgcggggtgtcgcacgtgagatccttcccaccgcctcctagcctgctggcacggcgccctggcgagtctcgccacgggcccgttccgcacggtttttgaggcacccgtgccgccgaaagaacgggacccgctcccgacacctctcccacgcgtggtggccctccggtaggccgtcctcccagcagaccagccgtgctccgcgcggcaggatgcttgggcggccttgccgccgtggctgcgtagcgtatgagcagctttggaccggtgtatgctcgcaggacccccgccctcgtgcggccgactgccggctcccgggccccgtcactccacggccgtccacgcgccgtgccgccccaggcttcaagagatgcttgcgcgctgctacccgtcccacgggcagaggtgctcgcacacgtccgccgcgccgcgggcgccccaccgggcgtcccgcggcggctcgacggcgcgagcggcgtggcctcgcggcgcccggcacccaagcgtgccggcgctgccaaggccacctcgcgcgtgccattggtcccggatgccgcccacgatacaggctcacggcggccccgccccgtgcctacccataagcgagatgctctcggaagacgacagcccgcccggccgccgccgtgtccgccgctcccgacccgggggcggcggcgacgcgcgtcggacggcgcgggctcgtcgcggaggacgtgctacctggttgatcctgccagtagtcatatgcttgtctcaaagattaagccatgcatgtgcaagtatgaactaattcgaactgtgaaactgcgaatggctcattaaatcagttat

SEQ ID NO: 10460 - DNA, 473 bp, Oryza sativa
  ref <308>: DATABASE ACCESSION NUMBER: AK107808
  ref <309>: DATABASE ENTRY DATE: 2002-08-28
ctagccgcttgctggccggaaccctagccacggcggcacggcacggcggcagggcggcacggcgcggcggcgccgtcgcacccccctttgccggcgcgcgcactcacccgagagtgagtgcgccgccgtcgagcggctgtgcagcggcgcccggcaagccggcggcgcggcgccgccccctcttttctctcccgcgtcggcgtgaggacgaccggtggtggcatgactcccgcgcgcgtcggcggcggccggcggcggcggtaggcatcttcgacgcgaatgagaacattcagttgccgcaagcgccatcgcatcaccgagccgcccccatcgatgcgtctaggggagtactatcagatgacctaatttaacctggttttgtaagtttgggtttttggtaaatatgagagaccaaaagtgaacttattgcaagcctgaatgatatattacttgggccggattaagttgctgtc

SEQ ID NO: 10461 - DNA, 855 bp, Oryza sativa
  ref <308>: DATABASE ACCESSION NUMBER: AK107809
  ref <309>: DATABASE ENTRY DATE: 2002-08-28
agatttttcctagaattgaaattatttctattgattttccttgaattatctcttggtacattgtgttttacgcgtagttggttagttgcttatgcaggtagagaaaagagaagggtttattaaagtgtagctttctaactatatatcttgtgctgtagactgtagcagtcctcttgctaattacgcgtgcgcaagagagggacgggcgccggcgctgcgcaggaaattttacataacgcccaaaaatggatgagtggctgccgacgccatatatcacacacaagttgtatttttctaagcttttattatatcaaaatagtaaagtttttgaacatatatgatcacgtaaaagagcaatcgtccatcagtgcttccagttcccccaggcatatgctgcactccatctccgacgactcatcccgccgcgcggcgatggtgcgcgtggtccggcagccagatcttcggatcaggcggcggcgcaccggcatgtcgacgtcggcgatcggcgcagcagaggaggagcacgcacacggcgtacaggatgctgccggcgagggcccctgtgaataaggaaaacccgaacgcttgccagatgggcagctctttcaagaacagcatcgcgcaactatatcttgatagtattgtttattttctgtttttccaattccacttgaattgtgttctgcgccgcccatgcatttatgcgtaataatgtgttgcaagcatcaatcagctatatatgttgcaccctttatatatatgcagatcctaaaatagtagcattccgttcaaaaaaaaaatagtagcatcagtgtattttaggtatctgtacgcacaatatatggatctcttgtt

SEQ ID NO: 10462 - DNA, 747 bp, Oryza sativa
  ref <308>: DATABASE ACCESSION NUMBER: AK107810
  ref <309>: DATABASE ENTRY DATE: 2002-08-28
aaaattgccttgccaaacatgggccccatggcttttcccctctccctccccctcctcccagattgatgacgccagcgccgcccctctgccgacgctgccccttgtccaccgcgccgtcgaccgctgccgaggccgccgccgtacgctacctcatcgttatctgccgtcgctggctcgctcgcatcctccacccctgctagccgtcgccgccgggtcaagcgcctccgcggccgctcgcttgcatcctcctccttcgccgccgctgccgggtcaaccgctgtggctgaccggtgcagcgagcagagtggaggcggcggcgcaacggtgagggagggagtagcaaaggaaggaggctcgacggcggatggctatcgaggaatacagggctggtgaggagtggatccgccgtcaccgtcgccttacgcgcatggattcgacgtcgccatagccgccgctcccaccggccttcgtcgcccgcgcctctcctgccggcgtcgcctccatccccgcgccgcccccgtcgtcctccgccacccgtgctgctcccgccggcgccgcctccatccccgtgccgcgctgcaaagaagaggggagaaggagaggtgggtgaagaacaacacggagattgacatatgggacctactattaaattggagagtgtaaatggagatgctgttggagtaaaacgtagatttggctctctaaatttttgttaagttttcaaataggatatttggagtaaaaaat

SEQ ID NO: 10463 - DNA, 497 bp, Oryza sativa
  ref <308>: DATABASE ACCESSION NUMBER: AK107811
  ref <309>: DATABASE ENTRY DATE: 2002-08-28
ctcgaggaggcggcggtgcagcgaagacgcgacggcgggggcggcgcgacccggaggcgatggcgacggcacggtgctctcctccggccgccatattatctccgattgcacgtgcacctcctccttcctgggaccttgtaccctctccttcctaggatagtgctgtgcttcaggaagatggcaaagaagaagaacccaattgtctttatggatatttcgataggctccttgaaattgactggtaggatgttccatagaatttttttgatggtagcagttttctgatggtgtcatttagactaattaaccatccaatgaatggtctactgatgtgtcattttggggatgttgggagaagtttggattttgatgtgcatttggactaattaatcatccaagttgtcggcagatggattcaacttgcggagtgtaagggaatggaatcagaacaatcttcttattatactgtataaatatctcctgtacttttggctggc

SEQ ID NO: 10464 - DNA, 944 bp, Oryza sativa
  ref <308>: DATABASE ACCESSION NUMBER: AK107812
  ref <309>: DATABASE ENTRY DATE: 2002-08-28
aaaaggcgacaaacctacctaaaggcaactctttttccttccccactccgggcgtctcgccgccgaccacagccctcccccccaaaccctagccctcccgccgccatggccgacccgcggctgttcccgtcgggatccaacttctccggcgacgcctccggccccggccgccggaagtacaacccctaccacgacctcagcaccccctacagctaccagaccctctacgacctccccacctcgccggagttcctcttccaggaggagtccgcggcgcagcgccgctcgtggggggagaacctcacctactacacgggcgtcgggtacctctccggcgccgtcgccggcgccgccctcggcctccgcgacgccgccgcgggcgcggagcccggggacaccgccaagatccgcgccaaccgcgtcctcaactcctgcggcggcggcggccgccggctcggcaacaggctgggcgtcatcgggctgatgtacgccgggatggagagcgccatggtcgccgcgcgcgaccgcgacgactgggtcaacagcgtcgcggcggggctcggcaccggcgcgctcttccgcgcggcgaacgggccgcggtccgccgccgtcgctggcgccatcggaggggtcctcgccggcgccgccatggccggcaagcagctcgccaagcgatatgtgcctgccatatgaggcttcgccgcggtatcccttgttcactctgatcaaaggatcgaatcaatcaatccgtcgaaaaaaaaaatggtcttctgtttgtttgtctgatctccaggttagctcatcgatttgggaatggtttagccatctcgagaaaaaaaatatgtgatgtttagtcgtatgtggatggtttgaatggaaaattttgacctctccttgcaatgttgtaacatcatgtttaatgtataactgcatacattttgctg

SEQ ID NO: 10465 - DNA, 842 bp, Oryza sativa
  ref <308>: DATABASE ACCESSION NUMBER: AK107813
  ref <309>: DATABASE ENTRY DATE: 2002-08-28
atgtacagcgggttcggcagaggggggcaagggtggagcccgttcgacgcgatccgcggcttcccgtcgacgcccgaggccctcatgtcccagatcgacgccgccatcgccgccaccgagtacgcccgctcctgcgcgcaactcgaccccgccaccgcctcctcggagccgcagcaggcggcaccgccgcccgggggcgaggcgcgtgtggaaggggaggcctccgccgccgccgcctgctacgacgcgaaggtcgcggacgaggcgtaccgcgcggcgtgcgcggcgctcggggccgggagggcggacgcggccgtgcggtcgctgcgggtggcgctggcgagctgcccgccggagaaggcggctgccgtggcgaaggtgcggtccatgctggccatcgcgtccgcgcagctgcacaagcagcagcatcaggcgcagcagcagctgcaacgcggcgtcaggaagtgagaagcatcaccggcgtcattgcaggattagccctttccgttcggattaaccttgattgagtttgtgattattaatcagctacatctagtggcgtttaattagtgttgaaaatttgttactagaagcaccatgatttgtggcatttatcatattcactatcacaagatgtcagatgatcgtctattcttggttcttggcttcttgctgcctttcggttacatacttcgactcttcatcaagagtgaccaatggcagattgtagctttgtaagatgaaacttgacacagcagagtgatttaacgcaggtaatgcgcgaattgtgcgattcgtgcctacgtgcacccaatcagtgaatctggagcaacaatttgagc

SEQ ID NO: 10466 - DNA, 527 bp, Oryza sativa
  ref <308>: DATABASE ACCESSION NUMBER: AK107814
  ref <309>: DATABASE ENTRY DATE: 2002-08-28
ctccgcgtctctctccagcttctctctcccccatggctctcgcgtgcgcatcgcgccgcctcctcgccggcgccggaactccggcgagatccttccactcccagccctaccaagccaaggtcggcgtggtggagttcctcaacggggtcgggaagggggtggaaacgcacgccgcgaaggtggaggaggcggtgggaggcgacctccagaggctcctcgagacccgcacgctgcggctcaagaagctcggcatcccctgcaagcataggaagttaattttgagttttgctcacaagtatcgtcttggtctttggaagccccaagcagaagcgaagaaagcgcaatgaagttgagttgtcttgaagtgggtcactatgaaaactatcagctgtcattatacttaactgggaaaatgcaatgaagttattttctgatttctcctgaagtgctctacttgcaaaatgatttgctatcgctggacttaagaacttgtcagacattgagcagttgcagtgcaatttctatgc

SEQ ID NO: 10467 - DNA, 657 bp, Oryza sativa
  ref <308>: DATABASE ACCESSION NUMBER: AK107815
  ref <309>: DATABASE ENTRY DATE: 2002-08-28
aagctccaccacttcctctcccagttgccacgacaagctagctagcgaacgtcgtgtagccatggcgccgcttctcctgctacgcctcttgcttttggcaggtgcggccacggcggcggcggtagcagcggacaacgccacggccacgggcggcagcggcgacggcgccaccgggaacaataataacaataacaatccgaccatatgcagcggcgaaggttgccagccgccgccagggcagccgctgccgatctacggctacccttcgcctccgccgccgtctcaaccggccggaccgtcgtcgcacacgccaccgtgcccgccggcggcggtcgtctgctgcggcggcggcggcggcggcgggcagtacacgccgcagcagccgtactactacgcgccccctgccggctacgtcccgtactacaacaactccgctgcctcgcctccggtgctgctcgctcatgcggccgttggttattattattacgtgatggctgcttatctcttactctggcttgtggtgtagtagtataatactccagtatatatatagcgattataaaggagtaacatgtatacatggacaagtgtgtatttcatatactccagtacatctgtgttttggaatttggaataatacggtcgtgtatcatgatc

SEQ ID NO: 10468 - DNA, 577 bp, Oryza sativa
  ref <308>: DATABASE ACCESSION NUMBER: AK107816
  ref <309>: DATABASE ENTRY DATE: 2002-08-28
gatgacaatggtgctcctggagacactgaggctgtacaacccggcgctcttcatccagaggaagcccacggcggacatcacggtgggatcccgcacgcgctcctgtccttctcgatcgggccgaggtcgtgcatcggccagggcttcgcgatgctggaggcgaaggcggccatggccgcgatgctgcggaggctctcgttccgcgtctcccccgggtacgtgcacgcgcccgtggatttgatcacgctcaagcccaagtttgggcttccggtgatcgtgaggctgccggatgcatgaagtgggggtgtgtttcgatcacgcgtatagcaataataaaaaccagtcaatagtaataccctacgctttgctgcggaatatatgtttatgtttaaatagcgtggaaatgatgtgaagatgatgagttgatattgcttgcatgttaagttctaaaaatacaacaaaattgtaaatgttgtgccgtgtttgcgtgagattgaaatcggtaaatgatgtgtcatggttgtatgagatttaagatactctaaataataattgctagtggatgattatgtgacgt

SEQ ID NO: 10469 - DNA, 569 bp, Oryza sativa
  ref <308>: DATABASE ACCESSION NUMBER: AK107817
  ref <309>: DATABASE ENTRY DATE: 2002-08-28
acaaagctaaatacgcgtgaagtcacgtttcgcacatacaatatccgatcgagatgatgatcgccggtgatggccgtggctggctgctgccgcagatcgtcatggccgtcgcctccgccgccgcgctggcgctggcgctgtggcggcagcagccgggaggcagaggcggcagcggcgggccggcggcgatcctcctcgccgcggcgccgtacgcactcctcctcctgctgctctggtgcctccgcgcgttcgagcgggcggccggcgccggcgacgcggccgcgcaggggaggctcaggctcgccgtgtggctgctcagcagcgcgctcaccgtcacgttcgccgccagggtcgcgccgctgatgcacggcgcggcggcggtcctcgtctgggccatgtcggcggcgaccatttgcggtggtttctacatgctcgatttgtttcctctccatcgtcgactagatagaatcaattgaagatttaacgtcattttatactttttttaatcagaatatctgtgaaaatttgatgaataatttgctttaaaaataatattatcggtttctgcg

SEQ ID NO: 10470 - DNA, 491 bp, Oryza sativa
  ref <308>: DATABASE ACCESSION NUMBER: AK107818
  ref <309>: DATABASE ENTRY DATE: 2002-08-28
atctcttcctcctcccatctcttcctcttcctcctcctctccccattctattcctcccctctcttccccattgtcagcggccgggcagcgtcggtgggggcctcgtgccgtggcggccagccgagcggcagcggcagggccctcgcgcggctgcggccgggccgaggcggaggcggaatcgcgccacggtggggtgaaggcaacctcgcgccgcggcggccgggcggcggcggatccggaggggaggaggctagccaccgccagatctgaaaggggaggcggccgggctgcggcctcgcgtggagggctgcactaggcagcggccgatgcggaggccggtgcggcggcaggcggtggaggccggcgctgccatggattttttttctttttttcttttttccttaatgcgcgattagatctgtgttgattgatacaatctgtgttgaatgtgtgatttgatctatgttgttgttgtgaatgatttggggatg

SEQ ID NO: 10471 - DNA, 515 bp, Oryza sativa
  ref <308>: DATABASE ACCESSION NUMBER: AK107819
  ref <309>: DATABASE ENTRY DATE: 2002-08-28
aggcgggcgaggaggcgcggaagcggacgggcacgttacgttacgtggccagtggcgtacgtcccgtcccgcctccgcgcgcgtggtgcgcggcgcccgaactctcccggcctctcgcgcgacgcgaagaatccaagcgagacggcgacccaggcgacgatcgaatcgagtgatcccgcggcacgcgagcctgtggagcgcgccgaagatacggcacgtccggtacgcacgctcggcgcccttcctttttttggggggagattcgcacgcagcgactcctggcccagcgtgcgggtgcgtagtggctgcgatcacaccggcgacttcctacgcgcgccacgacgacggaggcttcaacgtcttcgcgtagatgattttttttttttgagaaagggagggaaactcccccgttttcattaaagaaaacgcagatgattacaagagttccagacatcaagttcttacagaaaagacgagagaaaaaggaaaacaaacagttattacaggactagaac

SEQ ID NO: 10472 - DNA, 755 bp, Oryza sativa
  ref <308>: DATABASE ACCESSION NUMBER: AK107820
  ref <309>: DATABASE ENTRY DATE: 2002-08-28
gacccagttttaaagacacgggtgagtgaaggaaaacccctgctcccgtctcctcgcctctcacgccgctcccctcccggcgtctcctcgcctcccacaccgctcctcgcctcctcgcctcccacgccgctcccctcccggtccgccgccgcgccggtccgccaccgcgccggtccgccgctgcgcctcctcccggtccaccgccacgcctttcccgacggtgggagaggcgggggcggcggaggaggaggggaaaggctgcagctctggcgtcctcctcgcctcccgtcgtcctcgtcgcctccctcgccgcgcctccttctccggctgctgctgctcaggcggctccaccgcggcgacctcaccgagggacgcctccacctcgagcagccgccgccgccgcgaggaggaggagcgggtgggccgggccgccggcggcggcacggaggaggtgcgggtgcaggtgcggcgggggcttgacctgcgcctgcttcttcttgtcgtcgtcggcggcttccgcggcttcacgttggatctggccggggtcggcgggagtgaatggctcgaagccgacggcggccggcggcgggagcggacggcttctcctcctcgccgatttcccctttcttttctctaccaaattactcgagaaattttgtttgtttggtctacatctgtggtggttttcttcctttcctctaccaaaggattttgtgttctctttctcagattttaatgaagaataattgtgattc

SEQ ID NO: 10473 - DNA, 975 bp, Oryza sativa
  ref <308>: DATABASE ACCESSION NUMBER: AK107821
  ref <309>: DATABASE ENTRY DATE: 2002-08-28
gaatttcacaagggaattgcgtggcgtgtcgacttccaagtcttccgccttcgttggccccaccagtcagtgacccagtcaatctccggcgatgggggccggaatgagcagcggccggcggccgagcttctacggcggcggcggcggcggcggggtcggccggccgagagggatgctgcccctgctggcgctgcaggtgctgctcgagtacggccgcgcgggcgccagccggccccccgtgacggcggcgctgctcgccgccaacgcgctgctgtacctccgcccaggctccctcgacgcgctcctcccttcgctcaaccgcgtcgccttcaaccctcacctcatcattcacgtaagaggagcttcccctccaccaaccctccccttgtgtttggattgatcctgatttctcccctaggagaagaagaagaaacagaaaattcacataggattctgggccatttttccacttcttcgcccattctagtagggctgtagaattgcggctgcgcttcctggcgtgctaattgtgtcgaggctttcgctttagctgatcagtacatggtagattatgcgaatttcagcttgtgggaatttggtagcgggattactgactgcataatgagttgggaaatttgggagtagtatccttctattgggagtaattgctggtagtttcgtggtaatgtttgtatttgcagaggggaacagagaattggaggctggaggagctgatgaagagagaattttctcctctttgagcctgctctgctacaagcatttactctagttgacaaaaaaaaagatcatcctatatgtaattctagttcagtgaaatatacttcctccagttaaaaacacatgtcattttggacttcaacactgtttcgtaatgtagcttttgaccgataatttctattgcaaaacatttgaatcctcataaaatgattatattagtaaagttactttgcgagg

SEQ ID NO: 10474 - DNA, 860 bp, Oryza sativa
  ref <308>: DATABASE ACCESSION NUMBER: AK107822
  ref <309>: DATABASE ENTRY DATE: 2002-08-28
accagcagcaaaccatccagtacgagctgagcagccaccatggcgtcgccggcgccggcgccggtgaaggtgatcggcaccttcgacagcccgtacagccaacgcgcggaggccgccctgcggctcaagggcgtgccatacgagctcatcctggaggacctccgcaacaagagcgacctgctgctcacccacaaccccatccacaagaaggtccccgtcctcctccacggcgacgacgaccaccgcgccgccgtctgcgagtcccttgtcatcgtcgagtacgtcgacgaggcgttcccggccccgctcctcctcctccccgccgaccccggcctcgcgccgccgcccgcttctgggcccgattcatcgacgacaagtgcacgaagccgttctggctggcgctgtggtcgacggacgacggcgaggtgcgggagggcttcgcggcggagatcaaggagaacctgaagctcctcgaggcgcagctcaaggggaggcgattcttcggaggcgacgccatcggctacctcgacctggccgccagtgggtacgcctactggctggaggtgctagaggaggtcgccggggtgagcctggtcaccggcgacgagttccccgacctctgccgctgggcgaaggagtacgccgccgacgacaggatcaaggcgtgcctcccggacagggccaagctgctcgaacacttcacggcgatgaaggagatgttcatggcgacggcgaggtcaatggcggcaaaatgaagcgtgggataatgttgctgtcgcgcgcagaaagtgatggccacttttgttttgtcatggtgtgtagtgtactgggccggaataaataaagaaggctttgctttc

SEQ ID NO: 10475 - DNA, 880 bp, Oryza sativa
  ref <308>: DATABASE ACCESSION NUMBER: AK107823
  ref <309>: DATABASE ENTRY DATE: 2002-08-28
aaccaacctactggaggaggagtactggagtagagagcgagcatggcgagctcccgcgccgccaagcgccccaaggtggatccctcttcctcctcctccgcgccgccgccgccgcccccgcccccgcagcgtggggacgacgactacgtgccgggcaacatcgtggagatcgagctctgcaacttcatggcctacgaccacctcacctgccgccccggtccccgcctcaacctcgtcgtcggccccaacggctccggcaagagctccctcgtctgcgccatcgccctcgccctcgccgccgaccccgccattctcgggagggcatccagcgtcgctgccttcgtcaagaggggagaggactccggccatgtcaagatttccctccgcggcaatacacccgaccacaagctctgcatcactaggaaggtcgataccaacaacaagtctgagtggcagctcgatggcaccactgtccccaaaaaggaagtcattgatctcatcaagaaattcaatattcaagtcaacaacttgacccagtttcttcctcaagaccgagtatgtgaatttgcgaagttgacacctatccaattactggaagagactgaaaaggctgttggagatcctaatctacctatccagcaccgtcagcttatagacaggagtaaggaattgaagattcttcaagtggctgtaaagcaaaaggagcagactttgaataatctaaaggccctcaatgctgaactagaaaaagatgttgaacgtgtccggcagagagacagacttctgaaaaaggctgaattaatgaagaagaagctcccatggctaaaatatgacatgaagaagaaagaatacaaagaagcacaggagaaggagaaaactg

SEQ ID NO: 10476 - DNA, 945 bp, Oryza sativa
  ref <308>: DATABASE ACCESSION NUMBER: AK107824
  ref <309>: DATABASE ENTRY DATE: 2002-08-28
aattcgcctccccatccatcccgacagttgcgcaggcgtgcggctggcggcgcgccgccgagcaggcggggcttgtggcgccggcccggccgcgcgactcgtgtcctcgtgctcgtggtcgtgggatgtggggcgccgcgccgggcgcagggcggtaggcggctgcgccactgagggctgccggcacctggcctggccggctgaccggctcagccgcgcagggcaggaccgcagaagcaggagcaggacagcaacagcaagccgcgcaggacaggagcagcacaacagtgacaacacaaactgaaacatgaagacgaagaagggccagctgttgatttaaactcttttttggagaaacaagatggggcttcattaaaaaaaattcaatttgcaagctaaggacaaggacatcatcgattattttcaaaatatcaagcgtcgaaaagttaatctctaaattgagctatatcgtgggatggcgcggtttttgcgatcctgtacgctcggccattagatgcatgtaacaaactcccaggagaggagaataaaaggagaagatgaacccagaaaagctgtgcaagtttcaagcagcgcatactctatctcagctagctgctctgttttctgaatttcttcagtctactgtagcgaaacctacaaccgtcagataacacagcaccggtgagattgagagtgaaattgaatgtggtggagcatatttcctgacaggtcattgatccaaaatgtatattgcttacatctgcttgcaatccttcttcacgagcttaccatttgcttcagaggtttacatctatttatttgaagggtgagggagggtttttgcttccctccccatgtttttctcctctcttaatgaaatgtttcagcaatcctcttatgtattcaacaaaaaaaatgtttgatgtaattttacacttttatgac

SEQ ID NO: 10477 - DNA, 517 bp, Oryza sativa
  ref <308>: DATABASE ACCESSION NUMBER: AK107825
  ref <309>: DATABASE ENTRY DATE: 2002-08-28
ctctcgagcatctccgccgcgagggagcatgtgccatcctgggctgccgcctctgccgccggggtgcgaggtcaagcggcggagggcgccgccggtggcgcgagtgggttccccgccgcccgtgccgcggcgggagcagcctcatcaggctcagccgcaccactactgcgtgtgctcgcccacggcgcaccgcgggtcgttccgctgccgctggcaccgccgcggctacgagtggggcgctggccgccgcaggagcgtggcgccgtaggcaaaagccgtctggtgacgcgtgcgcggatggtggcacctgctggccgcctcgccggcgtacaagtgtacaactgctattctcagctccctcagggcgtctccttgtgcatcaattgctcgtgtgtttgtacagagtgtatagttgttagaactcaaaaggaaagacaattatacaagtttgtgcattactctctagtagtctgtacagttgttatatttcattcggaagtacgtgcattggtgaatc

SEQ ID NO: 10478 - DNA, 718 bp, Oryza sativa
  ref <308>: DATABASE ACCESSION NUMBER: AK107826
  ref <309>: DATABASE ENTRY DATE: 2002-08-28
tctttgacggctctgactcgtgctgacgtggcacgtggcgaacgaccctcagccgtcgatatgtcgctcagcgagaagctggaggcggcacgtgtcgcggtcggcaagcgcaaggagcgggagctcctggctcaggctccggctaataaagctctagccgagccgggtactaataagccggctccggggccggtccccaacaacaagctcctagccggtcacctggcgcacgagttcctgacccgcggcacgctccagggccgccgggtcgagccgacgaagccgagccaagccgccgccttgcatcccggcgagcccgtgcccgagccggagcccgacgccgccaagcggaggaggtacgccgaggtgtcgtggctcctcatggcgagcggggcccgcgtccccggcgtcgtcaacccgacgcagctcggccgctggctccagataaaggagtgacgtgccggcgaccagacatcacaaccccaggtggttttcccccttttcaccggggagaaccgacacatcatcaaaccggtttcttcgttttctcctcctctttgcctgctcctcctgtttagattttagatctaggagagaaaaagaaaaaaaaaacgttggtgtactagcagctttattcgatgaaattattgttgttattcaaaaccaatgaccagaatggtccagctttctatagaaagcgcgatttcttgttagtact

SEQ ID NO: 10479 - DNA, 911 bp, Oryza sativa
  ref <308>: DATABASE ACCESSION NUMBER: AK107827
  ref <309>: DATABASE ENTRY DATE: 2002-08-28
gcagagcgtgcggcatactgctcgcgccgccttcctctcgctcccgcgccggcgctcaccctccgtcgcgcgagagggcaaggcaacgccgctgctcagtgctgccttcgttctctctcccctttcctcccgtgtgagatcctccatgccgatgtggattccttgctgtccatcgacggttttccgagcttggggggaggagatgaagaacaactccgtttcggatccggcgtccgtgtccgattctcttctcgatcggatcccacacccacacaccacacccgccgccacacagcgagaggagcagaggaattaagcagagtgttggaaaggaacaaggaataatacggcggcccggagatgaagtccggcaagccgccgacggcgggggtccgcgtattcggcgggctacgctacgctccgctggatggcatggtcgtcgacaaccctctactggccgccctcatccgagctgtttacaccttgtacatggctacgacggtgcttctctacatttttggcatggttactgctctcaaggaatacgaattgttagtgccactgtccataattgtagtcatgcagcccttcttcatattgatgtggattgcagcaccattccttaggactgtagcaattgtgaaatatgcgatggggctccctgatggtaacaacgtcaacagaattccaacaggaaggatgtcagccctagcctaaacaaagtgtgcctaagcagggttcttcaagtttatcataattgtgccctctttagaaataggccacttctagttgccgtcttctttagaagacttttagatttaggtgtgtattctattagaatatatcttaaagcaactttgtatgtttctattagttatatgatgcttcatggttcttttgtagtgagtttc

SEQ ID NO: 10480 - DNA, 541 bp, Oryza sativa
  ref <308>: DATABASE ACCESSION NUMBER: AK107828
  ref <309>: DATABASE ENTRY DATE: 2002-08-28
atacgactgggcgaacgcgcccccgtgctcgggcccaaggaagagtggtttagcccgagtggtcgccgtcgacgagatgcgggaggcgccgtgcaaggcgtcggtcctgttcccgcggagcggcggcaacatccactccctcaccgccgtcacgccgtgcgcgctcctcgacgtgctagcgccgccctacgccgaggacctcggccggccgtccacctacttctccgacattcccatcccttctctccctggttttgcagtactggaagaggcagacttgcctgacggtttccgtgttgcaggggccccatatgtaggccccgagctcacaatagacatggacagcatgtataattagatagctgatctctgcttttccagagtatcagatcagatagctctcactgcttttcttaaagtagcatttgcatggacaatacattgcacctcgccatcttgtatatacgattatgcatgtgtgttgtcggtttgtctttctaccatgcttatttaccagttggtgttggaatgcttttttgac

SEQ ID NO: 10481 - DNA, 750 bp, Oryza sativa
  ref <308>: DATABASE ACCESSION NUMBER: AK107829
  ref <309>: DATABASE ENTRY DATE: 2002-08-28
ctttatttctctttctctccccttccaccgtccgcggggagcacgggttgaagcggcgacggggcgggggctggagtggtggtgaccggtgggagctgaagcggcggtggcggtagcgggctagagctaacgcgggtggaggcggtaggagaaggaggcggcggcgatggaaaccgccccacgccacagacctccaacgaggcggctgcggctgcctccgacaagcgcgttggattatccccagcctccgtaagctccagcccactgccaccgctgctccagctagctccggctcccgacgacgccgaaccaggtcaccttcttctgcgcctcgcccaacgtcttcaggaactcctcacgccaccggaagccgcactcccccatgatggcgcgcaacgtcaggttggttagcgtcccggtgatctgcctgctcacgttcagtgccggcggtggcggcgatggcgctgacgaggcgggcgacctgctcctccctagcggaacgagcgcaccttgccgaagagtacccccccccccccggtggcgtcgatggagttcctcactgtacgcccagccatggaggtgggagcccccgggctaggcgccaggaggaggccgagctccatcctcgactttggccatgatggtatgcatgtagcaactcctgccttgggacgaaggcaaggcatatcatcaccttctcggcatgatttgtgatgagcaggaattagtaatcgagctacattggtgtac

SEQ ID NO: 10482 - DNA, 949 bp, Oryza sativa
  ref <308>: DATABASE ACCESSION NUMBER: AK107830
  ref <309>: DATABASE ENTRY DATE: 2002-08-28
aagcttaaacctcactcgactactaccacaaaagtgaaatattcttggctagtctagtctactcgagaacgccaccatcaccatggcgatgtcgccgcacgaccagcacgagcacgagccggaccacgcccaccgctcgccgtccaacggcacggcagcgaccagcaccatcgccaccaacagatggggtccctactccggcgccggcgacttcgccagcaacatggccgtcatcttcgccgccctgctcgccgcgctcgccctcgccctcgcgctcaacgccgccgtcaggtacctgctccgccgccaccgccgggccaggcaacaaccagccgccgccgccgccgccgccgaggacccggagaagccgcctgtgcaggaggccgacccgccgccgccgcccccggctctggtgtactccgcggcgggcaccaagctggccggcgccgcggagtgcgccatctgcctcgccgagttcgtcgacggggacaccgtgcgcgtcatgccggtgtgcggccacggcttccacgcgcgctgcatcgagcgatggctcgccggaggccggcgctcgtcgtgcccgacctgccgcgcgccggccgcgacgccgcccggcgccaccgctaccgagcccgcggcggtggcgccttgatgcatgcatgcggccaactgatttggcccttgttcttggcaagctctcctctctcgctctctctctctctctctctctctctctctttcttcgcttctttctttcttgcttgctttcatgtgtaaatattcgtcaagatcgagatgatggatttgatccaactggatggatcatttggtgtctctctctgttttgtttggctgttcaaggagatgtatgaactgagagttttagattaggctgaaaaagtgaaaatgattcattactctcctgttcgattatcacaacatctgttcagtt

SEQ ID NO: 10483 - DNA, 771 bp, Oryza sativa
  ref <308>: DATABASE ACCESSION NUMBER: AK107831
  ref <309>: DATABASE ENTRY DATE: 2002-08-28
gaactcaaccgtctctccacaccgcgcgcgcgccgcagcttagcctctcgcaatggcgacgaccaccgcagccttggcgccgccgtccacctcgacgtcctccgtcctcctcccctcagccgccgccgccgccgccgcccgatgcctcgggccgctgccccgccgcgcgcgcctccggaccgcgcgccacgtcgccctcaccccccgcgacttgtccgcggaggacgtggccgcggaggaggccgccgtcgcgcccaagatcgggaagcgcgtgcgagtcacggcgcccgtgcgcgtgtaccacgtcatgaaggcgcccgacctggacatcaagggaatggagggcgtcgtcaagcagtacgtggccgtctggaaggggaagcgcatcacggccaatttccccttcaaggtggagttccatctcagcgtggagggccaggacaagccggtcaggttcttcgtccacctccgcgaggacgagttcgagttcatcgacgaatgagatcgatcagtaaccgtgaccaagtaagcctagcgccttttgttatacaataatgaccgcagctgtggcatgtgtatattgtttcggttgtgtggtgagagagatgagagagactgaagagagtagggaacatggcaaggaagttgtttgcttactgtcatgctcttcctcctccagttcgacatctaatttttcagatgtgggaaatgtttggatgatgatgatgatcgatagctataaatagtgatcattctgttgtcttgctggct

SEQ ID NO: 10484 - DNA, 571 bp, Oryza sativa
  ref <308>: DATABASE ACCESSION NUMBER: AK107832
  ref <309>: DATABASE ENTRY DATE: 2002-08-28
acgatgacatgctccggcgggtggcctcctagctcgttgagcaggcggggcgcctacgcctccctgctccaccgcctccctccccggccggcgactgctgcagcgatgatgctcgagcgccatccgccggtccatcctggcctccgccccgcggcggcgacggtgcagcttcggcgcctcccatcaggcctgagggttactccacctccgacagcgaggtggacgggctaggcaagtacttcagcgaggaggacgaggaggaggaggcggcggaggagttcgtcgaggacatcgtggcgtaggaggagtgggagggcttcacgttggagtacgaccatggctccaacgccgacgaggatgctgcggagtaggagaagaagtagcggcgctggaggtgggattctcttccttagtctgtgttgcacgctaggtgcttgcggaaatgcatgtgaggttctacgcatgctttaataaactctttagttgtcgataaatgatcttggatgcccatttgggtcaaacctgattaccgttgtcttaaacaatgtgagtcaaaacctaattctaccgc

SEQ ID NO: 10485 - DNA, 919 bp, Oryza sativa
  ref <308>: DATABASE ACCESSION NUMBER: AK107833
  ref <309>: DATABASE ENTRY DATE: 2002-08-28
ctcgccggcgccgcggcgattcccccacacggcaccaccaaatccgccgccgccgccgccgtcgccgtcgccgccgccgcttgcaccggttgctccgggcgggtgtcgggatgctggcgagggtctcccgcctggggctccatgccctgcgccgcgccactgcgccaggtcaaaattcactcgcttcaaggaggcacgaagcagaagctgttacctctcatgtgaaccatttggggaagactttcttctgttcgaacacaaatgctacatccagtgataggagcagcgagtcagaagctaagatatctgtgacttttgttgataaggatggcgaggaaaagcttgttaaagtacctataggaatgtcaatgctagaggcagcacatgagaatgacatagaacttgaaggggcatgtgagggctctcttgcatgttcgacatgccatgtgttgtaacggatgttgactactacaacaaattggaagatcctgtggatgaggagaacgatatgctggaccttgcatttgggcttacagagacatcccgtcttggttgccaagtgattgcaagccctgagcttgatggaatgcgattggcactgccatcagctacgagaaattttgcagttgatgggtatgttgcgaaatcacactgatttcaacaaaatcatgaaaggtggatgttggatgactccagttttgtagaatacgagatatagttattggcgtatcctcaatcttgaatttctattctacagaaaacaaacacttaatatctatgataattgataacttcccttctctcttttttcgatggcaaatatgccaaattgctttgtaaaacaacacaagtaaaatcaattagaaatatggattattcattgaaaccttttgtggtgaaaaatatggctacttattcc

SEQ ID NO: 10486 - DNA, 683 bp, Oryza sativa
  ref <308>: DATABASE ACCESSION NUMBER: AK107834
  ref <309>: DATABASE ENTRY DATE: 2002-08-28
tttacagacaccaccactgaccaccccctcctctcctcccagttcgtctcctccactcctcctgcatcacctccactcgtcggcgaggccgccttccctggcggctcggatctcgaggcggccaggaagctcgacggcggcgcgtcccccgagatacctgtttacgccaaaggtgtctcagttttaatgccaggacacgatgtaccaacattcatcgctcatcctgccccagcaccctgccctccagaaagggtccagtggccctcacaccagcccactccttttgctggttcctcatcaaatccgagctagtagcattcaaatgctaaatgccatctgcatcacagcgatccgcaaagtaattcttctgttcttctctggctgtatttcctgcctctccagcagaattcaggcaggttctctccacatatgtacaggtcttgtatctttgttctaaagcaagttctgctgcccctgccgtattgtggcgggcgagcagccggcggatcgatggagttggctaccgatcccacttgctctgctagtgttagatgcctttgttttcgctgtcgatcctacacctttctttgctagatccccaatggagggaaggatggactatacacatcttgtagaaactctgtcggggaatgtgaagctagctgttaaagccattcttgttc

SEQ ID NO: 10487 - DNA, 694 bp, Oryza sativa
  ref <308>: DATABASE ACCESSION NUMBER: AK107835
  ref <309>: DATABASE ENTRY DATE: 2002-08-28
aatcgagatgaaacggaggaagccgcggcgcgccgtcgctcgccggcgccgccacggtccgggggacggacgtcggccggcgcgcgcgcccgtcatgcctccgccccaggcgcccccgcgcgcggcctgcgtctccacttccaagggctcttgccggctgcccctgtcggcggcgggcggttgccctcgccgttcccctcgaccggcggcgatttgtggcgaagaagctcctgtccaggtgaacagcaagcatcctttcggccggcgccttggtctatctgttggtgtcctgccgccgacgaagaaaacccaagatcactgtgtcctcaactaagagctaccttcctgtgcttgagatcttaaagattccccttcatattacgcagtgtaactaaatgcagctgcatcgtgcgccactcttccgatttgtagctccagaatacaaaagaggggcgttattggatctcaagacttgcctcacctggtaactataatcacattccctccaacactttcttaaaaaggttgagaagatatcctaagattgagtatttactgagtttatattgaatgtggcgaaggtttgaacgatggcaaagaactgtagaaaaagaacctacttgctcgttttaagttataagttgttttgactttggtcaaagtcaaaatactttaaatttaaccaagtttgtag

SEQ ID NO: 10488 - DNA, 987 bp, Oryza sativa
  ref <308>: DATABASE ACCESSION NUMBER: AK107836
  ref <309>: DATABASE ENTRY DATE: 2002-08-28
agcgaaaaactcaaaaagaaaaaaaaaagaaaaagaagcttcccaccacgacaccatctccctcccctttgacctctcgcctccgcttcgctcactctctcgctcgcctcgcctcagatctaccaccgcccacgacacccaccggatctcgcccgtgctcacgcaatcgcagattcactcgaagcagcaaaacattccaatcaatggaggcgagggcgagggcgaggttacctgcatcatcatgatggtgttgtggggctcgacgccccagcggtcgtcgccggggtaggggacgaggtcctccttggggaggaggagggggcgctccaggaagcggacgtcctccaggctgcagtcggcggcggcctcggcgaagtagacgccgtcggcggtgcaccggatggcgggggacccggcctcgggctccacgatgcgcccggcgagcgggtagaagaagaccagcgccctggcgagcgcgtcgcggatgacgcccggggccgcgtcggcgcccgaccggaagatgtgcatcgactccaccagcccgcggtgggtcgggtaccggtccacccacgccagcggcagcgtctcctccggcgtcgccgccgccggcttcaccgccccctccgagatcctcgtcaccttgaagctccccgtccccgccatggccgcgtctcccttttttttctttttttctctttttttttttttgagcttttacgattcgtcttcgagtagtggctgcgtgcaaacagcttggccttaaatggagcggcggagtgttgggcgagtgggtcgctgtcgcgtgggccccacacggaggtgtcgtagcagccgggggcgttcggtggaatcaacggctcagatcgcgcacggatgccgcttacccgttcaattcaaaaatgcagctggctgtgtgtgatcgcctctccaacaatctcgacgtgatttgagtttaaataaaaagaaacaatgaacgtgatttgcact

SEQ ID NO: 10489 - DNA, 411 bp, Oryza sativa
  ref <308>: DATABASE ACCESSION NUMBER: AK107837
  ref <309>: DATABASE ENTRY DATE: 2002-08-28
caacgccgccggcgccgccggggctggagttggggctggaattggagccgccgccaacgtcgccgggtctctcaccggcgccgccggcgtggcacccaaggtgcatgtgtgagatcgatcgatccatcgatcgatcgagcgcgcggcggcgtcatctccactactccatccgcccgtagcagcgccggccatcgatccacgaccattcgccgtccattgtttttgttgttaataatcaaagtttggttaatttaaccgtcaagtgtttggttgtttattttatactccatccgtactgataaaaaaatcatttagaagaatgtttaattcaaaccttaggaatataaatcatgaataactctcaagttgttgagtttgaaaatgtaaaattatatgaataaatttgtcttg

SEQ ID NO: 10490 - DNA, 585 bp, Oryza sativa
  ref <308>: DATABASE ACCESSION NUMBER: AK107838
  ref <309>: DATABASE ENTRY DATE: 2002-08-28
ctcctctcctcctcctcttcgcgtcgaatcctcctccgagaagaggagagtacatgaatcctagcgcgaggatctcgcaggtagcaatggcggcgatactgccggacctggcgacgcaggtgctggtcccggcggcggccgtggtcggcatcgcgttcgcggtggtgcagtgggtgctggtgtccaaggtgaagatgaccgcggagcggcgcggcggggaggggtcccccggcgcggccgccgggaaggacggcggcgccgccagcgagtacctcatcgaggaggaggaggggctcaacgagcacaacgtcgtcgagaagtgctccgagatccagcacgccatctccgaaggtgagggagggggactgactcacccccgtgtgctgttcgtgtttttttttttggccttttttgggtggatctgagcacgcgcgtagttgtgtagatctcgtgccgtcgcagcggttactggcgctaatttttgctaatttagttgtttttttttggttgcttgtggcgtgaacatgttcaaaagtagcttatccgagcatcaattatggggaatttgcagcacaagattgatat

SEQ ID NO: 10491 - DNA, 746 bp, Oryza sativa
  ref <308>: DATABASE ACCESSION NUMBER: AK107839
  ref <309>: DATABASE ENTRY DATE: 2002-08-28
attgccagcttcttctccttcctcttcttcttcacctcgcaagcgagaaagttcgattccaacgatccgatggggaactcgtacagcaacggcggctcgccggcggcggccgcggggtatgtgcaggcgccggagctgccgcttcacctgtgcttcttcctggtggtgctgctcgtcttcctcggattctcgtggtacacgagctacgggtcggcggcggagcggttcgccgaccaggcgcggctgctgctgatggcgtcgccgctcgcgctgctgctcgccgtgcggctgctgtcgggcggcggcgacggagagcggcgcggggtggaccagctgcggcagctgtcgctgccgatgcccgagcgggactccatccaccgcgccggcggctcgccgtggggcgtcggggtgctcctcgcgctgctcgtcgtcatggtgtcctaccagtccaacttccgcgacaggtggttccccctcgtcagccggtgaccggccgaccaacgccgccatggacgccatgagagattgaggcaaagttgcaaacatacttctgataattgcagtagtatgacattgccagcgacacgatgatgcgatcgagtggtgttcttgatggtttttttttttgttttgtttctgctccttttgtccatgtaaaagtgtaatttatcgccttgaaaaatacatgtctgccactctgtcgattgccaaattcaatgggaacaaacgaatcaattatttgggct

SEQ ID NO: 10492 - DNA, 843 bp, Oryza sativa
  ref <308>: DATABASE ACCESSION NUMBER: AK107840
  ref <309>: DATABASE ENTRY DATE: 2002-08-28
aagtgtcatagctctcctctcccttaggcctcaccactcctctcagctctcctctcccacagcttcctcagcaccggtgatgggagcggcggaaaccgacgacggcgaggcgctgaggcggcggggtcggcggcgacaatgacaaggcggtggggtcgacggcggcaacggcgaggcagcggggtcggcgcggctcccctcccctctctcccagatccggccgaaggggggaggggggcgagaggtggcggcggcggcgcttcccctccctcccagattcggccggagggaggctggggaagggcggcagcggcggcggtgacagtccccctccctcccagatccagccggagggagaccgggggagggcggcgacagcggcgacagtccccctccctcccagatccgaccggagggaggccagggaagggcgacagcggtggcgacagttcccatccctcctagatccggccggagggaggccgggggagagcggcagcggtggtagttcccctccctcccagatctggtcggagggagggggagggcggcggtggcggcggatgtgggtagaggcgcgggtggggtgcggcgaattttttttgttcgtcaagatgattttcacaggcgggtgactgggtcgcaggcgatggcatacagacggatcattcatccgcatgagaggttcctttttggccacctgaaaaaactatttttctagtagtgagtgtaacgatgtttactcagatgacactccggaaaatactctgtcggtgcctaagtgtacttattatagtaactccaaattccaattaatcatgagaggccgcagctagcttatcg

SEQ ID NO: 10493 - DNA, 540 bp, Oryza sativa
  ref <308>: DATABASE ACCESSION NUMBER: AK107841
  ref <309>: DATABASE ENTRY DATE: 2002-08-28
atcgctgaatcccccatcccgtccaatctcttgcggcgcggtggctgcaagccgaccgtcggcctccgggaatggcatggtctctaggcatggtgtggtgggatgcgcaggtaggacgctaggcacggcgtcatgggaggagttggcagggtgcagcgacgggcgagcggcgacgcacagatcatgggggacatccagtctggctagaaacgacggcagctgtgcgacaaggaccgtgtagaactgtagatcaaggggacaacaacatagaaaattacaaagatgcctccagcctgctgtcttaaactctttcatgtttggtgtcctagacttgtagcatttaaaagtgttgtcgtatatatacatactcataatatatcacaatactgcatcagtgataaatttgagcacgtcaattttgtggcaatttcatttgattagatcagctataacttggtattgctacagaagagcatgtagagtcggaaatcatataagaccatagcggcacacttggatataatttatcttcagtaccag

SEQ ID NO: 10494 - DNA, 690 bp, Oryza sativa
  ref <308>: DATABASE ACCESSION NUMBER: AK107842
  ref <309>: DATABASE ENTRY DATE: 2002-08-28
gagagcttctagagagagtgagagggagggcaagatagaggggagggtgcgcaggaagctgatgaggctcctgtcgttcgtgccctgcggctgccgtgctggaccaatcgacgacgcgccgcccgccgcgctgccggcggcgaccgccggcgacggaggcgccgccgccaggaggcggcggaggagggccaggtccctcggcggctcgccgcagtggcgcccctcgctcggtgacatctacgaggagtacagcgccgccggcgccgccgacgccgcagcagccaagctccgccgccccgccgccgccagagccggccggtccgccgcccgcgacgccgccagggttctcccccgcgcacacagcgatgaatacaggcacatcgagacggcggtgtccatgccggcgtttgcgccggcggcgttcctcttctgaacgcggcggcgtcgggtggccggcgatgatgacgaaaagtagagcgacggcgaactgtatcaaacatatatatagactattattttctacttactgcaggactaaggatttatatatatgaatccaggaaataatggtgatcgatctctagctacttgtatgtaattaatatacttgtgtgtgttgaaagatacaatatggaattgcatctgttgtatatagtgtatatacgtcataattaacatcacaattgatgc

SEQ ID NO: 10495 - DNA, 981 bp, Oryza sativa
  ref <308>: DATABASE ACCESSION NUMBER: AK107843
  ref <309>: DATABASE ENTRY DATE: 2002-08-28
tcggttgttcccttctccccggcgccgccgcggcgtcgccgtcggcggcggtgcaaccgtgcaggattgcggccgctgccgtctcgcttcgtgagccgcagcagtaaacgccagctgctcggccgtaggcattgagggagtcgccgaacaacgctagtgttctcctccgctgcgttggtggcggtggtgactggttagggcggcggattggggatggattacaaacacaagcaacggggagccggggagatgggcatcctgtcctgtactttctgcgttgggcgaggcatagatcgagcagatgaactcatcaaaagttcgaaggctgagtagaggtgcccgctgcttcttcgtttcttcagaggaaccgtggaggaatccataaactcccacagcaatgcgcagggtttcacctagtcaatatggaaattgttggcgcctccgaaagtgcaagttattctcatgactcgtcattcaaaatacagtgtggacgacggacagattggaacgaagagggtggcaaaatcagaaggtttgcccgttatgctatatggccgacgagtatgcggatcatctactggcgaaatatagggccacactgacatacaattggataagtgggatgaccgttactcagtcaaacactggtggaacctagtgcttgagtcccctaataaccccgtctaccatttcgaactccggtgatcctagtatcttgggaagtatggtgcaagcgtaatgcaacaatcttccgccacaaagcctcaacgccggcctcaatcctagccaagagattaaggaggaagctggagcataggcgaaagtagaagcaactagactctaagagtttggaattttaggagatatcatctaaggtttctttttctgggtctatcattctttacaagctctgtatatatctttgtatatttttctcctactctatattgataggaggcaaagcttttgccactattggag

SEQ ID NO: 10496 - DNA, 818 bp, Oryza sativa
  ref <308>: DATABASE ACCESSION NUMBER: AK107844
  ref <309>: DATABASE ENTRY DATE: 2002-08-28
gttcgtccgcgtcgtgcaggagggagatggaggggctcgccaagatcggtccatggggcggcgacggcggcgacccgcaggacatcgccctcggcgccggcgcggcgccgcaccgcctggtgagcatcgaggtcaggagcggcggcgccatcgacgcgctgtccttcacctacgctgccatcgacggcgcgaagcacgccgccgggccgtggggcggctccggcggggagaagcacaaggtgaagctcggcgaggcggagcgcgtcgcggaggtctccgggacgctcgggccgtggggcccccacgcgtgcgtcgtcaggtcgctggcgttcgtcaccagcgccgggaagacgcacgggccgttcggcgaggaggtcggcggcgcggcgttccgcgtgccggtgaagggcggcggccgcgtcgtcggcttcttcgcgcggtctgggtggctgctcgacgccgtcggcgtctacgtgcacccgtgacgtgacgacgcagatgatttacttgttgttgcatgcgttctctcttctgtcagtcttctagttttatctgaatattgttgaggactatttccttggctcctgttgcagaactcgtctgatcaacagaaatttcctcagagatttaagctgcctttccccgcttcaccacgacgctagtacattttttcagaacgttccatctagctctctagtttttttaagctgaaccgtttggttgagctttaggtagatctgaaagttgaagttctactaaacatatcctcacctgttaattatgatttaagataaacttttatattgttgttcaatgtc

SEQ ID NO: 10497 - DNA, 900 bp, Oryza sativa
  ref <308>: DATABASE ACCESSION NUMBER: AK107845
  ref <309>: DATABASE ENTRY DATE: 2002-08-28
ttttttttctctctctagctagctagctcgagctaggccctctctctcccatggcgtacgacgggggctcggggccgtccaagcctccgccgccgccgcggtacgtgatgctcacggaggagtacggctccagctcgctggccacggtcccgcctggcgccagccgcaacatgccccggcaccgcatcacggacggtggcagcctgcgcggctgcctctgctggtgctgctgcttcctcctcctcctcgtcgtggcggtggggcgacgtcggcgtacctcctgtacgcgtgcaggcccaaggccccgtcctactccgtgtccgacatgtccgtggcgcggttcgacgtgagctcctccgacctcaccgtgtacgccaagctggtggcgtccgtccgcgcggagaaccccaacgacatggtcgggatcggctacggcgccgggtcgcgggcggcggtgtcgtaccgcggcacgacgctgtgctcggggcggctgccggcgttctaccagggccaccggaacacgacggtggtgagggtggccatggaggggcggcacggcttcgggccggggctgcagggcgcgctggaggagagcgaggaggccgacaacgtgccgctcgacgtgtacgtcagcgcgccggtgacgctccggctgggcgacgtcgacctccgggaggtgacggtcaacgtgcactgcgcgctcgtcgtcgacggcctctcgcccaagaagaagcccgctatcaagtccgccgaatacagggtcaacgtagagttttaattcatcaggaattcaggatgtattgaaatgaccatgattacttgtctaatcgaatttcttaatgtagctatagcttgtaattaattaagtctgtaactaatactaaatgttaattagctagt

SEQ ID NO: 10498 - DNA, 1073 bp, Oryza sativa
  ref <308>: DATABASE ACCESSION NUMBER: AK107846
  ref <309>: DATABASE ENTRY DATE: 2002-08-28
aattcgccgtatcaactcaccaactggggaggccgcccggtccgcgcgcgcgccgccggctccctcctcgtcgccggcgggctccctcctcgctgccgatggctccctcctctcccacgtctgcgcgccgctggctccctccgctgccggccatgacgacgatgacgaccgcgacgccaccgtctccctcctcgccggcgactccttccctccgccaccatccacaacgaatgacgatgatggctcgcctcctccgccacatgcttccctcctcgccgcctcctccaccggccacgacgggcgacgacgacggctcgcatccggccgccggctatcctcgtcgacgcgacgacgatgatgacggcgccgacggcagcggacggaggggagccttggccggcggcgctcgtgaggccggtggcggcgccctgtggtttttttttatttttctgagatgaatttcacaggcgggccacaggcccgattgcgaaaatggtctattttcgcaggcgagatggtaccggcggtcctttcccccgcctacgaaaatggttttgggccacccggaaaaatcttttttctagtagtgaaggaaaggtgggaggcggagtaaaggtgaggtggtaaaaaagggaaaaaccggaaggatggagcattgtgcggcgcttgaattaatattccacgcgcagcgcgtcgattagcgctacagcataatcaatcatttttgttctttttcttggccctgacaactggctacgtgtctaaaaccgcacgaactcaacaaagtgcatagcctcaaagagggatgagacccaagccagcctacagacttacagctcaaggaaatacacgcaaaaactactctagtcacgtggccattgaagagaaatattctagtactgtatgtggcgtaaacaatcaaagtcactttgtaaaaaaaaacagagccattgtatcaattaaaaaaactaggaaggtagcccgtgcattcgcacgggcatgcatcgtagactatgtttgagaacttataatgatgaaatattaatctgaacgtataaaagatcatttttttt

SEQ ID NO: 10499 - DNA, 471 bp, Oryza sativa
  ref <308>: DATABASE ACCESSION NUMBER: AK107847
  ref <309>: DATABASE ENTRY DATE: 2002-08-28
gacaccagcagctagccctagcccgtcgtcctccccaaccctgcctccgcgccgccgctgctggtgacggcgtcgccacagccgtcgtcgtccgccgccgccaatcgattccctgctcggctgcctcttggtgtgctactgctgccaaattcctgttgttgctgctgccgatccgatcttttaattgccgctgctgctaatgcatggcttgatgccttgatgtgctgcgatctggtctcttcatcgctgctgctgctgactgctgctgctgctgctgactgctgctgactgctgctgttagggaggagaagggcgcaggagagcaggaggaagaaggaatttggggatttcggtcattttgcaactagcgggtttgttctcaaattctagtatccacgctgcagcggtacttttggctactccctagaagtataagattcaaatagaaatttattcgatagtcgtttgtgc

SEQ ID NO: 10500 - DNA, 884 bp, Oryza sativa
  ref <308>: DATABASE ACCESSION NUMBER: AK107848
  ref <309>: DATABASE ENTRY DATE: 2002-08-28
aagagctaacccatagagagcaacatcgacataaactatcatcagctagctgcgacagcgagctagtagaagccatggacatgggcggcaatggcatggcgatgccgccgccgccggcgccggtgaagaaggcgcggtacatgcacatgaccttcttctggggcaagaacacggaggtgctcttcaccctgtggccgggcgccaggggcggcatgtacgcgctcgcgatcctcttcatgttcgcgctggccgtgctcctcgagttccgcggctaccgcgtgctggaggcgcgcctcgcccggcggcgcgcgccgcgggcggccgcggcgctgcgcacggccgtccacgccgtgcgcgtcggcgtcgcatacctcatcatgctcgcgctcatgtcgttcaacggcggggtgttcctcgcgatcgtggcggggcacgccgccggcttcctggcgttccgcgccggcctgtgcggcggcgggccggcgccgccgctggaggaggaccgcaagaacgaccccgtgtgctgctagtatggcttaagctgtctcgctcgtcatggtgttcacgtggccttttcgcttaatttgttgatgttttgtgtgtgcgcatataggtttcaggtgattgaaatctttgaaatttgggtcggatgatcgagtttgtttggttgttttgtttttctctcgtaaggtctacagatgtgacatgaaagttaatttcttgatgtcatcttggcttggaatctattactagtggtgtctgtcaaactgtaattgtatagcatatgtcactcatttgattgatgctgcctcccggctttagtttcaattgtctcagattggttattatagtgtacctgcaaaactgttcttcaaaaaaaaaag

SEQ ID NO: 10501 - DNA, 777 bp, Oryza sativa
  ref <308>: DATABASE ACCESSION NUMBER: AK107849
  ref <309>: DATABASE ENTRY DATE: 2002-08-28
atccagtcgctcaccggccagctacaggtgaggatcgaggtcaccgatcgacagataattaaatcgatcatcaaatgatcaatttcatggtgttacgttctaatggtgttcgatcgattgtgttcagaggctgtacgacctcggggcgcgcagggtgctgttcctggggacggggccggtgggctgctgcccgtcgctgcgggagctgagcgccgacaggggctgcagcggcgaggccaacgacgcgtcggcgcggtacaacgcggcggcggcgtcgctgctgcgcgggatggccgagcggcgcgcgggcctccgctacgcggtgttcgactccagcgcggcgctgctccggtacatcgagcggccggcggcgtacgggttcgcggaggcgcgggcggcgtgctgcggcctcggggacatgaacgccaagatcggctgcaccccggtcagcttctactgcgccaaccggacgggctacgtgttctgggacttctaccacccgaccgaggccaccgcgcggatgctcaccgccgtcgcgttcgacggctcgccgccgctcgtcttccccgtgaacattaggcagctcgctgctatgtaggcttcatctcatcttcacggtgtactgatcgatcgagctgcttgtgagattccacttttttcaagcttcaagtacagccatagaaatatactactatataccatgtaaagtatactagtgtatttacttacgattggtacatatagcggtagaatcatataatatagcaaattcataat

SEQ ID NO: 10502 - DNA, 986 bp, Oryza sativa
  ref <308>: DATABASE ACCESSION NUMBER: AK107850
  ref <309>: DATABASE ENTRY DATE: 2002-08-28
gttcggagatgttacgttctaacgtccaaataagtcgtgacaaaataagtgtatcttttttcattcctttttcgataacagaaggacaaactatttcatcatttcataattcatagttaagctgacaccgagaagccaccggtcggccggtaccacgtccaggtggcttctgctctctgtctccattcaactatgagctcgatcgtgccatcgtcgcgcagccgtcgcgcaggtccaaattaaaccgatgtttcacttcattactattctaaccctatcatttttatgttactttacaaaataaaatatattttacaatctctaattaacttactaaactttggaatttaaaagttttctctcacaaaaacaaatacaagactttagaagggtttcaaactaacatatctaacgttaccaaactttcgatagaaccaaaacataccaaattttaataacatcaaatattagtcagattgatttcgataataaaataaactagccccaaatcagacaccgccggcccgtacctccacacagaagatcgatcgatcggctgccacggtatcttaccgttattaccagctcagctagcaataagagttctggtcgagagacaatatgcatcgatccaccaggcagatgctggagaagaaggcccggcaggtcggcacggcagcctgccccgccgcgacccgcgtgagtcgtgacgatcaggagcgcgcccttgcgcacccgttggcatgctatgtcgttccgtgcgctccgcccgaacgcagcaccgctccgctccgggcgcgcttccgtcatccgccgaggcacccgctcaccaccaacgggcaacgggccgcacggcgagagcgagtgatcgtgtacgcccgcgcgtcctcttttggaataagttcacttcatgcccctcaactgtgatcgaaatttaatccatgaccctaaactacaaaaccggatatttcgacccccaaactcct

SEQ ID NO: 10503 - DNA, 764 bp, Oryza sativa
  ref <308>: DATABASE ACCESSION NUMBER: AK107851
  ref <309>: DATABASE ENTRY DATE: 2002-08-28
acaacacacacactgaactctcacataaacacttcaactcatcccttagctagagctatagctagtgtgtcaattagcaatggcggtggcgcacaagaacagtagtagaaacaagcttgcagtcgccgccattgtggcgctgatgagcctcctcgtgttcgccgcggcgccgtcggaggcatgcggcggccgctgcaacggcggcgcctgcagatcgcggtgcgccaaaccgacgccggcgccggcgcgccgcgccgccggcgccaagtgcccgttcgacgcgctgaagctggcggcgtgcgccgacgtgctgggcggcggcggcggaggaggagggctgctgaacctgggccatctgctggggaactcgtcgccgtcgtcctccggcgagcagtgctgcgggctcctcgccggcctcgccgacgtggacgccgccgtgtgcctctgcacggcgctgcgcgccaacgtgctcggcctcgtcggcgtcgagccgcacgtccagctcagcgtcctcgtcaaccgctgcagcaggaagctccccaatggcttccagtgctccagcaactagctaattaagctagctaatttgattatatctgaattaattagtgcttgatgagcagctcatgcagctattgttattgttcgcttatttgatttgttgttaattgctttcggtgtcgtgtgtgatcgtgtagcgcatgcttactactttgatgaccgatgttgagttaattaattcctgtgcttgagtgagtgacatt

SEQ ID NO: 10504 - DNA, 992 bp, Oryza sativa
  ref <308>: DATABASE ACCESSION NUMBER: AK107852
  ref <309>: DATABASE ENTRY DATE: 2002-08-28
atgccctcagcaagatcaagtgcacgttcgatctcgacgtcgccacgcgaaatcccactggacggacagcgttcttgaatataatcttgatcgatgcggccgccggcaatggcggcgctcttcgaggccgcggagacggcggccatcgtggctgcgctgacgcgcgtcattgccgacggcgggcgtggaggcggcggcggcgtctgcgtgccgccgcccgcgccgtcgttggtcgtgccgccgcgggcgggaacaggcggcgggcggcgcgtcgacgttgcgcgggaggaggagatgcgggagatcacgccggcggggcaaacgtggccgaggcggcggcggcggtggtggtggcggcgccggcgacagcgcgcaggtaccgcggggtgaggcggcgaccgtggggcaagtgggcggcggagatcagggacccgaggaaggcggcgcgcgtctggctgggcaccttccgcaccgccgaggacgcggcgcgcgcctacgacgccgccgcgctacgcttccgcgggcgccgcgccaagctcaacttccccgaggaggtgtcccgcccgtggcagggtcacgatgtcgatcacatgtcctgctcgccgccgtcgatctcgaacgctcgctttctgggttcgtggaccttcggaccgccgcagccgccatcgcggtccgtcgcggcggcggcgacgactctgcttggtgggagccatggaggcaacggagcagagaacgggagggaatagcgcgcgagacaaaaagggctggagagatgggaatcgtcgtcccgggtactcctagtccacagaacttgaattagactcgcatttcgttttttttcggcatagtagtatttattttgttttaagttggtggtgtagccttttcttttcttcttcttttcgttcttcttggataatgctgctgcattttgttcgatattatcggtagtactgtttggtgatgttttaatatatttctaaataaaagtt

SEQ ID NO: 10505 - DNA, 779 bp, Oryza sativa
  ref <308>: DATABASE ACCESSION NUMBER: AK107853
  ref <309>: DATABASE ENTRY DATE: 2002-08-28
aacggggaaagcgagagcgagagagagatgagcccggcggcggagatgggagcaccttggccggtggagttcatgggcgcggcggagggcgggttcggcggggaggcggtctactgcgccgtcatcctgtggctgtccgtcgtggcgtggatcatcttcacctccgtcggcgacggcgacgagggcggcggccgcggctcgcgccgccgccgccgccgccgcagcagcccggtgttcgtcggcgccgccggcatctgcgacggcaccggccccgggtgcagcggcgggttcggcccctgcggcacctgcgtcgactagcgtcgcgatgtcgcgaggcgagtactagtagccttttagctctagctgatgctgctgcgagccatggggattttgattaggtgtgtgtgagatcatcagctcccctttgtgaaggcaataagagggagctcgcgtccaatcctttgctttagccgctgcagtaatcaagctctaagctttctccttttttttctcccaaatcgatcgatcctatgtaaatttcttgaaatcttgatctttgatgctcttgctttgaactcgcgatcatatgtaaattgatcgatcaagctgatgtgctcttggtgttcttgagtattagcatggaagctcatcagttcctcttcgatcaatcctatgtaaattccttgaaaccttaatcttaatgttctcttcctcacttgatgctcgtgctttcaacttgcaattctatgtaaattgatcgatcaagtagatgttcttgg

SEQ ID NO: 10506 - DNA, 827 bp, Oryza sativa
  ref <308>: DATABASE ACCESSION NUMBER: AK107854
  ref <309>: DATABASE ENTRY DATE: 2002-08-28
aagaagaaattaacccgagattttctccgaacacctcgacgaccccatcgagagcaagcagcggctggttgattttgatcgatcgatcgatcgatcaccggtgatggcggcggaggcggcggcgacgagcaggttcgcggcggcgtgcggcgcgctgagccagtacgtgagggcggcggataacgtccacagggcgcggacggcggcggcggcggcggcggtgcggccactcccgctcatgccgggggccgacgtcgccggagacgagcgggaggaggaaggaggcggcgccgcggcatcgtcggcggcggcgcagatgaccatcttctacggcgggcgggtgctggtgctcgacgagtgccccgcggacagggcggcggcgctgctgcggctcgccgcctcgtccaggggcgtgccccgcgacgatctcgccagcactgccgccgccgccggcgagtcggcggacctgccggtggcgaggaaggcgtcgctgcagcggttcatggagaagaggaagggcaggctcgccgcccgcggccagccgtaccggcgccacgacgccgcggcggcggcgcgcggcgaccacctcgcgctcgcgctctgatcagtacacgtcagctttaatcccataattaacgaggccgtgaggatgcttatgcttgcagcatttgtacagtgcacgattattcctatctgtcacaagtagtagtagtagttttagtagtagtacatatgctagggatcatataatttcattggaaagagttgaaatgtacagaaaaaaaaatactgaaagaacgatgatggaattcaaacatctctatgtt

SEQ ID NO: 10507 - DNA, 767 bp, Oryza sativa
  ref <308>: DATABASE ACCESSION NUMBER: AK107855
  ref <309>: DATABASE ENTRY DATE: 2002-08-28
gtggggcgtcggcattggcatctctcgtcgccgcggcggcggtggcgctgctcctcctcatcgacggctgcggcggcgccatgtacaaggttggcgacctcgacgcctggggcatcccgccgccgtccaagcccgacgtctactcgcgctgggccaaatccatccacttcgcgctcggcgactccatctggtttctgtacccgccgagccaggactcggtggtgcaggtgacgccggtggcgttcgccgcctgccaggcgtcggacccggtgctgaagctcgacgacggcaactccgtcttcaacctcaccacgcccggccgcgtctactacatcagcgccgcgctgggacactgccggaagggccagaggctggccgtcgacgtgcccatggccaacggcacctacctgccgcccaccgccaacgacctcgccgccttcgcgccgatgccggccgaggcgccggcggggttcgagtcggcggcgctcggccccgccggagcgcgacagtcggcggcgccccgagccgccgccgccggcggagctggatccgtccttcttgctgctcttgccttcgccgtcttcttgctgtgagagcatcttgttgattgtggattttatcttagggagtttattattaactttggatgatcagagcttggatctccatattcttattttttatccgtttgtattggattgtacaatgaaatgatggtgatgattctttttttttttgcatcgatcaactcagctggcatccattgc

SEQ ID NO: 10508 - DNA, 998 bp, Oryza sativa
  ref <308>: DATABASE ACCESSION NUMBER: AK107856
  ref <309>: DATABASE ENTRY DATE: 2002-08-28
atagatccggagattcccaaataggtcaaccttttgaactgcctgctgaatccatgagcaggcaagagacaacctggcgaactgaaacatcttagtagccagaggaaaagaaagcaaaagcgattcccgtagtagcggcgagcgaaatgggagcagcctaaaccgtgaaaacggggttgtgggagagcaatacaagcgttgtgctgctaggcgaagcggttgagtgccgcaccctagatggctaaagtccagtagccgaaagcatcactagcttacgctctgacccgagtagcatggggcacgtggaatcccgtgtgaatcagcaaggaccaccttgcaaggctaaatactcctgggtgaccgataacgcgttcacgtttcccaggcccatctaaccgtagggttttagcgtctcgcccccgtcctctgccggcgtagcgccaccgcactgcgcacccgccccgacgcaatggccaccgccgccgccgcgagatcgttccttcgatcgggagtcgcctcctcctcgtccatccgcggcgccgccgcgagagccgcatcccgagccgggccggctccgctcccgaggaggctgcccgccgctgctccccgtctcatcttgaggtcgccggtggagatgagcagcgtctgcttggagacgctgatgcccatgcacagcgccacggcgtcggcgctcatgacgtcgctcctcgctgcccctgcgtgcaggagctttggctggctctccgaagatggatgatttgttgttatcggagcctgatgtgacgatagctgctacgagatacctcctattcaatttaaagtactttccgtcggcgtcttctgagcgacatgttcagtattctgggattttggtctgtgtaagcgtctacaagattgttacctgatcgttgcgacgcttacctccggttgtccaactgattttactattgatggcctactactgattaagtcccgctgagaaaataatgctgagttgg

SEQ ID NO: 10509 - DNA, 643 bp, Oryza sativa
  ref <308>: DATABASE ACCESSION NUMBER: AK107857
  ref <309>: DATABASE ENTRY DATE: 2002-08-28
caacagaacagcacaagaaacacaacgacacagtagctcatcaaagttgaaacaaactagcagaggaaatccggctccagtttgtggttcagttcatcgatcacacagtcgtttttgtagtaactgtttagtcatgggaggcaagaagaggaaatccggctccagtttgtggttggccgtggcgtcttggttcgcgcgattgggctcaaaggtggtggcgagctctggctccgccggtggccgcgcagggtatgatgcggctggcgagatggtcagggcggctaaacatttctccagcgctcataagataaactttggttgagtacaatagtactcaagtatcatgtttttgtacataatagatttatatatgtggttttcgctttgactttattgtagcacaagtgtacatgtatagtgacaatgcattagatttggggttaaaagttgtttgcttggagcacctgtaattaattgtttgctgtttaatggacaaataggtcctcaaattactacagtatttgtgataaatagaaaggcaccgatgaaaaacttaaatattataggatttcagatgcacttggggagcatcatcggagcgaggattgcgtgtttcacactgataaataaaacatttttccag

SEQ ID NO: 10510 - DNA, 766 bp, Oryza sativa
  ref <308>: DATABASE ACCESSION NUMBER: AK107858
  ref <309>: DATABASE ENTRY DATE: 2002-08-28
gcacagctcaaagcaaagcaaagcacaacacaatcaaagcctcatacaagaagctagctagctagtactcaagctaaatacctagctagcagtagcaggcgaccagctgcatttttccagaggaaaaatctctcagtttagcttaattaattagctcttgggagaagaaggcaagaagaaaatggacagggtgaacaggctggcggcgcagcgggcggtggtgatcttcagcatgagctcgtgctgcatgtgccacaccgtgacgcgcctcttctgcgagctcggggtgaacccgacggtggtggagctggacgaggacccgagggggaaggagatggagaaggcgctggcgaggctcctcggccgcagccccgccgtgccggcggtgttcatcggcgggaggctcgtcggctccaccgacaaggtcatgtcgctgcacctcagcggcaaccttgtcccgctgcttcgcaatgcgggtgccctctgggtgtagcaccaacgacgcaactatacctaccagcgactggttcttgatttggactgataccgtggcgcagaataattttatacgggtactttggtttgtatcaggcaggtcaggtatatctaagggaaaataaatagtacgtgcaggccttttttgcactgcaatactagtaaatctatagagagtggggaattaagtgtgtcatgtcagccgcctgtaaggctcttttgagatgtaataatgacacatatccgtttaatggagtatacctcttttgtc

SEQ ID NO: 10511 - DNA, 1082 bp, Oryza sativa
  ref <308>: DATABASE ACCESSION NUMBER: AK107859
  ref <309>: DATABASE ENTRY DATE: 2002-08-28
agattcctcatgctcttctcactcccatccatgtaggcttagctccgctaaaaccctagcaggttacattcccagccagcggcagcacgcacgcgccatggaggctaggcgttgccggcgccgcaccgccagcgcagcagcggcggcggcgaggaggcggctgtgcagcctcctcgccctcgccggcgactacctcaagtacctcctcacgaagcggggccggttcctcggcagggtggccaggaggtccctcgccgccctgctcctgtcatccggcggcggcggcaagccatgcctcgccacggcgccgtggccgccgtgcgcgctggcggagcgcgagttctcgtgcagcaacagccccagcccggcgttcctcgcggcgaggaggctgcggtcacggctgaagcgccgcgcgggcgccgcctcctgcttcggcgcgctccggtccccctgcggctgcgggccgtcggcgacagaggcggcggaccaggaggaggaggaagaagacgaggaggttgatcagtacggcgcgtgggagtgcggcggcggggagctgatcgacgtggactacagggcggaggagttcatcaacatgttctacgagcaactcagggcgcagagcttccacccgcccactgttctccagtgccgctcgccatgaccggccggtgccatggacgtgcacgtgttgaccagagcgagctagctctatcctcctctctactgcgtacgcgtgggcgtcgtgtattgtgtggttccaaccttcgaggagtcttcacttttgagcgttgcgctgtaccggtggtatctaaggttaaggtaaaggtgtaggtggctaacccgcgaatccatttatagattaaatgtttatttatttaatttataagtaggttcctggattagccacttacaccctcattaatctacggtacttactttcgtcttcttctcattcctctatggctctcagtaatatccctcctcctcggtgttgtaatttgtaagctattatttacatgtgtagagtgtacgtcacctgcgtcagtatatatgaataaaagagtagcaatggagtttgggac

SEQ ID NO: 10512 - DNA, 505 bp, Oryza sativa
  ref <308>: DATABASE ACCESSION NUMBER: AK107860
  ref <309>: DATABASE ENTRY DATE: 2002-08-28
tattctccccggcggcgagggcgagctcctgcgagagatcctccgccgcctcatgcctcgcgcgcgcgctcccgctcccgctctcgcctgcagtatttgttccattgccgcgcaccactttccggtgggcggcgggcaatgctaggggttaagagaccttctctccccgagatggaggcgccgggcggcgcggcgggggacgcggaggaggaagttgatgcccggatccgctgggttccatggtggctgctatggaatggtggaattgcttggatggccacgaaggggatcgacgccaattgtttggcgacctctacgatagaatcgcgtcgagtcggggtgttctttcctgttattactagaagtagttgaatttcgtgattgaacacacaaggaagcttgatatcgcgtcgggggtgttctttcctgttattactagatgtagttgggtttcgtgattgaacacctaaggaaaggaagcttgataaatggaagatagtccagc

SEQ ID NO: 10513 - DNA, 1078 bp, Oryza sativa
  ref <308>: DATABASE ACCESSION NUMBER: AK107861
  ref <309>: DATABASE ENTRY DATE: 2002-08-28
aatggaggccggctacccgggcacggcggcgaacggcgctgccgccgacgggaacggtggcgcgcagcaggcggcggccgcgccggctatacgtgagcaggaccggctgatgccgatcgcgaacgtgatccgcatcatgcgccgcgtgctcccggcgcacgccaagatctcggacgacgccaaggagacgatccaggagtgcgtgtcggagtacatcagcttcatcaccggggaggccaacgagcggtgccagcgcgagcagcgcaagaccatcaccgccgaggacgtgctctgggccatgagccgcctcggcttcgacgactacgtcgagcccctcggcgtctacctccaccgctaccgcgagttcgagggggagtcccgcggcgtcggcgtcggcgtcggcgccgcgcgcggcgaccaccaccatggtcacgtcggtgggatgctcaagtcccgcgcgcagggctccatggtgacgcaccacgacatgcagatgcacgccgccatgtacggtggcggcgcggtgccgccgccgccgcatcctcctccgcaccaccacgcgttccaccagctcatgccgccgcaccacggccagtacgcgccgccgtacgacatgtacggcggcgagcacgggatggcggcgtactacggcgggatgtacgcgcccggcagcggcggcgacgggagcggcagcagcggcagcggtggcgccggcacgccgcagaccgtcaacttcgagcaccagcatccgttcggatacaagtagtaacagcagcagaatggcgatcggtctgcacctgcatgcacacgtatcgcatgcagatcgagctagtagtgcaactggctaacttgaaccagttaaaaacttaagacttagtgatcgtgtgtggtttaattaatttgctacgttcaggtagtgatcgatgagattttaatttcctactgtcagtttaattcaccgttcatgtactcgatccagctagtactactcctagttacccttgttctaatcttaacgcaattgtgtcgatcggacgatcgcacgtttatcttcaagtggaatttgtcttataacact

SEQ ID NO: 10514 - DNA, 842 bp, Oryza sativa
  ref <308>: DATABASE ACCESSION NUMBER: AK107862
  ref <309>: DATABASE ENTRY DATE: 2002-08-28
tcatactcgctcgtacgaaagttttacgaagcgaaaatctcgagcagaacagtccagagaggatatggacgccatgaccaagcaggagattttgctcgagaagaagcgggtgatcaccgtccagggccgcgacaaggccggccggcccatcgtccgcatcgtcggcaagaacttccctgcgcgggagctgggcggcggcgggcacgcggaggcggcgctgaaggggtacgtgcggaggcgggtgacgccggcgatcggggacgcggagttcgtggtggtgtacatgcactccggcgtggatcgccgcgagaacttccccggcgtcggcgcggtccggacggcgtacgagtccatgccggcggctgtcagggagaggctacacgccgtgtacttccttcacccggggctccagtcccgcctcttcttctccacccttggccggttcctcttcagctcaggattgtatgggaagctgaggtacgtgagccggttggagtacctgtgggcgcacgtgcgcaagggggagctggacgtcccggaggcggtgcgccggcacgacgacgagctcgagcaacggccgctcatggactacggcatcgaggcgagcgaacggtgcggcgtgttcgacgccgcgtccatggacaccaccgcgtcactgcattcgctgcgctgcgcctcctagtgggcaccggtcgtcagtcgcggccaccggtagttgctctggtttcgatgaccattatagctgctctgttttggtgtacctgggaactggaaagtctgtacaaatcggagtgttggcgggaagtgcgcgaatgataagatgaaatggtccgagttttgtc

SEQ ID NO: 10515 - DNA, 799 bp, Oryza sativa
  ref <308>: DATABASE ACCESSION NUMBER: AK107863
  ref <309>: DATABASE ENTRY DATE: 2002-08-28
gcgaagaaaaatcctcgacaccatttcagcccaaaactttagggcttagcaggccggcctggtgcggagtgtcaagtccacggcggcggcggcggcggcggcgcgacacgagtgcatgacgacatgctccggcgggcgaccacctcgctgagccgccgcgccgcctgcgccaccctgctccgccgcctccctccccggccggcgacgacgcttgagcgccacccgccggtccaccccggcctccgccccgcggcggcggcggcggtgcagcttcggcgcctcagcgacttcggcgtgtcggtcccccggcgcatggcgcggcggagtcctcccaccaggcccgagggttactccacctccgacagcgaggcggacgggtggtccgttagcgaggatgacgaggaggaggtggaggaggttcagttggagcccatgtccgtcgatgacgtcgcggcggggaaggagtgggaggggttcacattggagtacgaccacgagcacgacctcgacgccgatgatgaggatgccgcggagtaggagaagaagaagtagcggcgctggaggtgggattctcttcctttttctgcgttgcacgccaggtgcttgcggaaaagcctgtgaggctttacgcgtgcttcaataaactctttagctgttgatcactgatcatggatgcccatttgggtcgaacctgattaccattgtcctaaacaattttagtcaaaacctaattctactgcagcatcgtgggcatgcattgttggtttattggaatggcgtttccacattttaactgcac

SEQ ID NO: 10516 - DNA, 450 bp, Oryza sativa
  ref <308>: DATABASE ACCESSION NUMBER: AK107864
  ref <309>: DATABASE ENTRY DATE: 2002-08-28
ctctcggcttccactcccgtctcctcgtctcctcgcgtgttcgcccgccgccctgcgccgaccagcgcagccgcagcggcgccggcgtcctgctgcttccgcccgcatcctcgccggtaagaggcagaatcacttcgttaggcaaggatgagcaaaggcccagctccgttcctcaacattgggaagagagcaaaaggcaagcagtgtctatgtctcggaagactgtagtttattttccgtctcgcttcgtgccactttgtgcattttgcgggtcaaattttgtttggtagtttaactttgttgtcttaaaaaaaattattagaagcagtgtgtgttttcttagtatctcttttatgctgctgtgtactgtctgtatgtgatacttttggcacaacttggaatccagtgaggtcaaatgactttgctgggtatcacaggatttatgtgatc

SEQ ID NO: 10517 - DNA, 503 bp, Oryza sativa
  ref <308>: DATABASE ACCESSION NUMBER: AK107865
  ref <309>: DATABASE ENTRY DATE: 2002-08-28
aattccatctcgatcatctcctcagctactactgcttcatcgaatcgtcgaagcatcaacagctatagatcaagttcgagaggttgattcagagaggcattgcaaattagcaatggcgagcgcggcggcggcggtggcggcgaaggcgtggtggacggcggcgatgagcgtgggcgcggtggaggggctcaaggaccagtcgggcctctgccgctggaactacgcgctccggtcgctgcacggcgccgccatggacaccctgatgctgcaggtgcatggcggcgccggcgcctcctcgccggcggcggcgatggcggcggagaggccggaggaggaggggatgaggagggtgatgtacctcagctgctgctggggccctagctaagattgtcatttagattgatactatcctgcttcttttgctgcttgatttcgtaggtagttttgaacttttgattacttgggaatctgaagctggctttgcaagcatcaagatgctgatt

SEQ ID NO: 10518 - DNA, 573 bp, Oryza sativa
  ref <308>: DATABASE ACCESSION NUMBER: AK107866
  ref <309>: DATABASE ENTRY DATE: 2002-08-28
catatccaatctactagcaaatgaacaaggcccccatcattgtacactacctaagaaaagctaacactaatccggacgatcatggcgatgcagcgttcaggacgctcgaatatggctctcttcttcgtcgtcaccatcgtcgccgcgccgctgctgatgcatgatgatctcctcgccgcggctgcgcaggcagccgatggcggcggctccggctccggccagatgcagccggaaggtattctgtatgccgggtgcttcagggccggcggctgcaagctgacgccggagtggtgcccggcgaggtgtatctacttgggtttcagccccggcgccggctgcgaggtcatggacgacggccacatctactgctgctgtggcccaagccgtacatccacaaacgctgatccatcgaccaatgcttgacgcatgtatatctccgtgcttgggtttactatgctgattaataattcagacatgcgtgcttggtgaattaagctagtacaaaatacaaaatttgtaaggcacacatgaagtctttcattatgcatggtatacttaagatctgtttgagac

SEQ ID NO: 10519 - DNA, 872 bp, Oryza sativa
  ref <308>: DATABASE ACCESSION NUMBER: AK107867
  ref <309>: DATABASE ENTRY DATE: 2002-08-28
cagcaatggcgggcgttggattcgtggaggacatgctgcgggagcagagcctcctggaggcgacctgcggcgacctcttcgaccacatcgacgacctgctcgacttccccaaggaggagtcggccgccgacgtgctcctgctcgacgcgccggcgccagggagcccgctgtcctcgcgcatcatcggcggccacgccaccatggcggcggcgccgccaccgccgccgcagatgatggcgctccccccgccgccggcccccgcgaaggacgacgcgtcggcgctgttcgacgcggccggcgcgctcggcgccgaggtgttcgaccgcaaggacgcccacattggcccgtgtgatgagctggacatggacatggcgcagctggagtggctgtcggggctgttcgacgatggaaccatcccgcacgagccgagttttccgggcgtcaactgcgcggcgccgatcaaggcgtcggcgctgacggcgaacgccggcgtcgtgctgccggacaaggcggaggaggcgctgttccgcagctccagccccatctccgtgctggagcacagcggcttcaacgtggcaaccaatgggggctcctcctcgtcgtcctcctcgtcggcgtcctcctcgtcggagtcgttctccggcagcggccgcgcgtggtccgcgcccgtgtcgccgcgcccggagccgcccgtgctcgtcatcccggcgcgcgcgcgcagcaaacggtctaggccgtccgcgttcccggctgtccgcggcgcgccggcggcgacggagaccaccatcctggtgccgacgccaatgtactcgtccacctcgtcgcactcggatcccgagagcattgccgagtccaacccgcacccgccgccg

SEQ ID NO: 10520 - DNA, 523 bp, Oryza sativa
  ref <308>: DATABASE ACCESSION NUMBER: AK107868
  ref <309>: DATABASE ENTRY DATE: 2002-08-28
accatgcatccgcgcgccgcaacccgtctcctcgctctcgccgccggcgcggcgccgcctcgacgactcgatcacaatgacagaaccatcgatcagagcggcaagagctaggtggaccatgaaggctatgctaatgtcagcaaattaagaccttgattgcaagctattgcaagacgaacatttcttgcatctagtgcaaaacctggaaagtgtgtttccatgcttcgccataaaatgggtggaccacaatatcaggattatcacaagcactctccttgtgaaaccgcatgtgcttggccgttactggctccatgtacatctgctgcattcatggtataaatggtaaataacgtataactttgtgtggcactagctttcattttgtcccttgatatccctcttccacggctacgtaacaactttcgttacaaatatcatatttttctttctctgaatcctctttgtagtatatcatgcagttatttatgcaaacatctattttgacatatggcatttttaaacc

SEQ ID NO: 10521 - DNA, 553 bp, Oryza sativa
  ref <308>: DATABASE ACCESSION NUMBER: AK107869
  ref <309>: DATABASE ENTRY DATE: 2002-08-28
acgctgaatctcctcttcaccacacagttcggattcgaggacaacagcaacatccttgtctttggggagactaaaccgatcgcagccttcgtaagagactattttggtttccaccgcgagctgctaccactttctgccataatattggcagcataccctgtcctcttcgccatcctgtacgggtacagcatctcaaggtttaacttccaaaagagatagacagatcaggggtgtaaataggaaaatttgaacaggataataactgaaccacatgtccattaccatataagttgagccggattcgaatacgaaccggatatctgttgaatgtggatatggatacagattcagattagatattggtctgtttcaatcagattcggttatccactaattgcaatgatgacaaaaatttaatagtccaagagacttatatactattgtattaaatttaagtgagaagaaatgtaatggcagtcttgtttggttacagcaatatgaaggctgaacttccaaaagtaaaaacacactatcatggcaaagtcttatcttc

SEQ ID NO: 10522 - DNA, 653 bp, Oryza sativa
  ref <308>: DATABASE ACCESSION NUMBER: AK107870
  ref <309>: DATABASE ENTRY DATE: 2002-08-28
aagaactccaatactgcactgcataagttcagaaaactagagcagatcgagaatggcatccaagaacctcctcctctcggccgccgtgcttctgtccgtgctcgccatcgccgcggcggcggctacggccagcgcggcgacgacgtcctgccagccgggcatggcgatcccgcacgacccgctccgcggctgccgccggtacgtgctccggcgcgcgtgcggcctcgccgccggcgggcggctgtacgactggtcgctgaaggagcgttgctgccaggagctcgccgccgtgccggcctactgccggtgcgccgcgctggcctacttcatggacggcgcgtccgagggccgcctcctggaggacctccccggatgcccgagggagacgcagaggggtctcgccgccgtgctcaccacgcccggcgagtgcaacctcgagaccatccatggcggaccgtactgcctcgagctcaccgacagggagatgcccaaatattgaattgaagtgatggattaattagtagtgtgttcaccgtgaataagtgttgctaatcgcatcaatctatggtccatggatcatcacatgaatgcatgcttgagtgcatcatcagtgatgtgtgttgaataacaagcatatatacaatgcttttttt

SEQ ID NO: 10523 - DNA, 498 bp, Oryza sativa
  ref <308>: DATABASE ACCESSION NUMBER: AK107871
  ref <309>: DATABASE ENTRY DATE: 2002-08-28
aatcaacaagaacaaacagctatcaccccgcgatccatttgcccaatcagatcaaggcgtgtagatttgattttggttttattactcgcaacctgcacgttgccctcagtcacctggcggcggagagagagatcggagatgagctcggtgtgcgcgaggcccgtcggcgtggggtaccttgtcggcgaggcgcagctcgccgggctccagtggcgggccgcgtcgcgggagacgtgggggagcaggatgcgccaccgtcagccgtctccgtcctgagccgagaatcgcagaattcgcagtggctttttttgaattttgaatttgtgttgagttttctctttttctttcactttttttttcctcttctgtagccttccttgggatgtgtatataccatacggagtattaggatatgatctataggtggtacatggtagtagtatagaagaatgtacaaatttcaaacattttgaattctgatacctactttttgggagg

SEQ ID NO: 10524 - DNA, 474 bp, Oryza sativa
  ref <308>: DATABASE ACCESSION NUMBER: AK107872
  ref <309>: DATABASE ENTRY DATE: 2002-08-28
cacagccttaaagccgcggccggagcggcggggcccgccgcgccaatcaaccgccgtcggccaccggaaagccggccgccaccgccgccgctcttcccacttagcccgcatcgcaacgccacaaggggacgcgaccgccgcctccccacacctccggcaacgccgcccggagtcgcggccgcatcagccgctcgctgccgggggcgccaatggcgacgatttcggagacactgcccaactcggaggccgtctcccacgcctacaagttcgcctccacctgggagaaggtcggtttcctcgcttcgctgcgtggtcgggtgggtgtgtggtccagtggtagcactggtggatctggtggatctgatctgatctgatggtgatccagtgtgtttgatccatagtccctgttgcttgcgatgactaaatgttgtgaactgatgctaccatggtttggtttagtttagtttgtcgtgc

SEQ ID NO: 10525 - DNA, 745 bp, Oryza sativa
  ref <308>: DATABASE ACCESSION NUMBER: AK107873
  ref <309>: DATABASE ENTRY DATE: 2002-08-28
attcattcattcccatttccaaattaccagcacgagatagagatatcgctgatgttctccaccgcacgtttcttcctccccgtccggccccggccggacgccacgatctccggcggccgcaagccatacctggtcgccgtctcggcgaggccacgccgcggcggctcccgccgcaaccgctcgtggggagacggcggcggcgacgacgaggacggcgccgccgacgaccgcatcgacgccaacttcttcggtgacgcgcgggacgagccagacccggagccggaggatgcggctgcctcggggcggcggccctcctcgccggcgccggagcaggagcccgcggggcagctgcgggggtcggacgtgctgcgggcgctggagagagcggcggcggcgaaggaggccaagaggaggaagagagcgggggcgcggccagcggcgcggcggcaggacgccggcgagcggcggggcggcgagctggcggcggcgggggcggcgaggccgatcgagataaggcgcgagtgggcgacgaggatccgggagctggagctccgggtgaagcagctcgtcgacaagcaccatcactcaccacccccagtagaagcgaagcgtagatcacagcgctaatttgaattcatatttcaaaatgcatcataggattcctccagattgtattggtaaatcgcatcgagaatttgagagttctggctgctttgtttcaaaggagattggggagattgtgact

SEQ ID NO: 10526 - DNA, 564 bp, Oryza sativa
  ref <308>: DATABASE ACCESSION NUMBER: AK107874
  ref <309>: DATABASE ENTRY DATE: 2002-08-28
atcgtcaagttatccatttctcgatatcatcacatagtcacaatggcttcctccgatcttgccgccacttacgccgccctcatcctcgccgacgagggcctcgagatcacctccgagaagatcgtccagctgaccaccgctgccggtgcgcccgttgagcccatctgggccactctcatggccaaggcgctcgagggcaaggacgtcaaggagctgctcaccaacgtcggtgccggcggtgcctcggtcgccgtcgctgcccccgccggtggtgccgccgctgccggtggtgccgccgaggaggccaaggaggacaagaaggaggaggagaaggaggagtccgacgacgacatgggcttcggtctctttgactaaacgtccttccctcccgcccttaccttccccccgcaagaccctcgctttcgctgtatcatcagatcacaaaaagttcacccccctttcggtgttgtaaacccggaaactgtgtgttgaggcggttctacgatgcgctcacgctcgcaccgctgatgcactaatctcaaaaaaacctcactttcgatctcg

SEQ ID NO: 10527 - DNA, 601 bp, Oryza sativa
  ref <308>: DATABASE ACCESSION NUMBER: AK107875
  ref <309>: DATABASE ENTRY DATE: 2002-08-28
ggagacaaacaaaccctaaatgccaagggcgagcgatggcggcccaaatcgggaagccttggcgattcgacggctacggccggcgtcggcggcgctggatcggtggcggtggtgattcgtcggcgacagcggacgcgacttttctggatgcaacggcggcgctgcatcggcggtggcggcggcgaatcgtcgccgactgcgggcagcggcctcgatgcgtaggcggcgctgcatcgttggcggcggcgattcgtcggcgggagcccggcaatggttgaagctatgattcgtcggtgacggcgggcggccggggctgcatcgtcggcggcgacggtgaatcgtcggccactgcgggtagcggcctcgatgcgtggcacaacatgcagagtgagggagaaaactgatccataaggtgtgtgttaattggttgctttttgtggttttttattcattgtatgggtattatatatttcccccaataaatcggtggtgatagattgaaattgtcaaaatagttcatacagttgggacaatcagaaccgatagattcaaagacatggttggaaagaaaaattgagatgtagacacagtgttgcaatat

SEQ ID NO: 10528 - DNA, 944 bp, Oryza sativa
  ref <308>: DATABASE ACCESSION NUMBER: AK107876
  ref <309>: DATABASE ENTRY DATE: 2002-08-28
tcgtgcaaaatacacgaagcttctcatcatggaggagatgaagaagagctttgctcggagagtgagccagtgaggcagtcaagctagcattagcaagggcggcgacatggacggcgagtcgccggcggcggcggcggcggcgctgcggctggccgccgtggcgaggaggtggctggagaacccccgggactcgctggcgaggagcagagaggaaggctgcggcgacgcgttcaacacggcggccatgtcggtcgccacgccgtgttcgttcgcactccgattcggtctcacctgcttgttcttggtttctgctgctgcggcggtggcggcggcggcgcaggacgcggacgggaggtggcacgccggggcgatggcggcggcggtggacaacctgtgcgcggcggtggtgtacacggcggacggcgtgcacaggttcaccatcagccaggccatgtccttcttctccccggccgcgcacggcgtacggttcctccatggatcatcatcttcatcttgctctcttctcctgtgaatcggccagccgccattaacccgctcttctccggcgaatgatgattgcgcgcgcaggaggaggtggagatggatgggagggtggcgcaccggaaggggaagctgacggccgccgtggtggaggtgcggaggaaggcgtccggcgagctggtggcgatagggaggcagtggatgacctctactcgggcgaggccggagaagaatggcgagagcaggagcaaactctgaaacgaaaatttcctctaaaaatcgctttctcttcttttctgatttcatcatctcaacacctaaagaaaactgttgtaaattctcaagatagtgataatggcgtccattcgaaagtgccagtaacagtaagtaaactgttgtaaattctcaagatggtataaaagctcttttcttctattaatatt

SEQ ID NO: 10529 - DNA, 387 bp, Oryza sativa
  ref <308>: DATABASE ACCESSION NUMBER: AK107877
  ref <309>: DATABASE ENTRY DATE: 2002-08-28
tagcgaggaccgtaaaatcactcataaataaaatattatcgggtaagagataacagtatatatagtgtgtatgttggcggagctacaacataataaaggggttccacttgcttaatttactctggtttgagtcgaatttagcttgatatgggtgactaagtttaaactgacggggtatatatatggtgaaaatatataaactatagctatttttttaaccgggttcgtgggcaccctcctagctatacatagctctgcccctgcgtatgtagaaaaagtaatgtacaattgcggtggaaatataattaggatcgaaatggtagggaccaaagagacggtgtaactggagggggaagaagatcacaccaatggatcaaaaggtgcaat

SEQ ID NO: 10530 - DNA, 755 bp, Oryza sativa
  ref <308>: DATABASE ACCESSION NUMBER: AK107878
  ref <309>: DATABASE ENTRY DATE: 2002-08-28
accacaccacaaacgtatctgcggactgcggcgatcgatttgggaggagaggattcagacgacgatcgatcgctcagaattcagatgaccagcgtgaggcgagcagacaaacgcagctgattcgacggattcagaatggcatcatcagttgcaggctcagtgactcgtcgtcctcctcccgtgctgctggcttgccgatcgcgaccaaataatcgtcgcctcatcagattgttaccgctcctcttcgccgtcgtcgtcttgcttgctcttcttccaccatgcgttcatggagctcgtgctctgaatgatgccaaagaagccaaagttgcagaggccagcgaccagacgacgacgacgacgcacgccgcggcggcggcggtggctcggtggtctgtcaccgtgagggaaggaggaggtggtggtggtcacggcagcggccatgccggcgccggccacggccacggcagcggccacggcaggccggagccagccgagcaccacacgggcaggcgcagcgcggcggccggatccgtgcgccctcccatggcggcctcctgcgccgccctccttgtcgccgccgtcgtcgctctgcttcgcttctgaatgaatgaattctggacccgaatcgctcccgatttcgcatttgaatttaaatcgattcatcttgctgtgtgtacatagaatgaaatgaaatgaatccaaatgaatcgccaagaatccgcccgattcggggattcccggcgagatttttccgc

SEQ ID NO: 10531 - DNA, 1104 bp, Oryza sativa
  ref <308>: DATABASE ACCESSION NUMBER: AK107879
  ref <309>: DATABASE ENTRY DATE: 2002-08-28
gcacatccactcctcccccccaaaaccacacaaacacccgctgcgccgctcgcttcctcctcccccccctcgtgctcgacatggcgtgctcccacctggccgccgccgccgccgcggcctccccggcggccgcgcgttcaccggcggcctccagcgccgcaaccgcgagcgccttcgcgcgcctctcggcgacgccccgggtcgcgagcggcgggttggccgttaggggccagaggggtgtagccgctgttgtcgccgccgccgccggggccgccgcggcgacgcccgtggccgacatcgaggaacgccgggccaccgagaagcagcccatcattgtcatcgataactacgacagctttacctacaacctctgccagtatatgggggagcttggattgaactttgaggtatatcgcaatgatgaacttaccatagaggatgtaaagaggaagaacccaagaggaatatttatttctccagggcctggtgagccacaagattcaggtatatcattgcagactgttctggaacttggacctaccatcccaatttttggtgtctgcatgggtctgcagtgtatcggggaagcttttggaggaaagattatccgtgctccttctggtgtcatgcatggaaaaagctctccagttcgctacgatgaggagctagggaaggccttgttcaatggcttgccaaacccatttaccgctgcaagataccatagcttggtgatcgagcaggagaccttcccccatgacgctctggaagccaccgcgtggactgaagatggccttatcatggctgctcgccacaagaagtacaggcacatccagggagtccaattccacccagagagcatcatcaccccagaaggcaagaggatcattctcaacttcgtgaggttcatcgaggagctggagaagcagcgtgccggagagaagaactagtagacgctagctgttcaggcaaaagtagaaaggggcttaagccgggtagattcagggcagaaagtgaaaaagggtaggagtaataagggaaaaagagctctccttttgtcacattcgtttggttcgttgtaatatatatcctttgtggatcttgaat

SEQ ID NO: 10532 - DNA, 513 bp, Oryza sativa
  ref <308>: DATABASE ACCESSION NUMBER: AK107880
  ref <309>: DATABASE ENTRY DATE: 2002-08-28
caattcacccagagctggattatgatctcaagaagaaatggctcccgcgcaaggtggcgccatggagcggcatctcgctcaagaagtgggtcaaggagcggaagcagaagcgcaaggaggaggcgcgcctgcacaaggccgaggtccacgccgcggtgtccgtcgccggcgtcgcggccgcgctcgccgccatcgccgcggagagctccacgccggcggcgacgatgaaggagaccgcggtggtgtccgcggccgcgctcgtcgccgccgccgccgcctcaccgtcggaactgaccggccggcgaggcgacgccgccgacgcactgcatgaaccagacgcggtttagctgatgaaacgaaatgttcaggcttaactacggccacttcagtcatataacagctgcgaaaatctgtcatgcatcttatcgattggagcttgttattttttttagttctaattgttcctccatggtttataataaataatgcaactaaccgccccccttctctgcc

SEQ ID NO: 10533 - DNA, 819 bp, Oryza sativa
  ref <308>: DATABASE ACCESSION NUMBER: AK107881
  ref <309>: DATABASE ENTRY DATE: 2002-08-28
ctctgaagtcccagtgccatctgctccatacttcgcaggtaggagggagcatggcggggagcggcggcggcgtcgtctccggcggccgccagcgcgggcccccgctgttcgcgacggagaaaccggggcggatggcgatggcggcgtaccgggtgtccgcggccacggtcttcgcgggagttcttctgatatggctgtacagagccactcacctgcctcccggtggcggcgacggcgtgcggcggtgggcgtggctcgggatgctcgcggcggagctctggttcggcttctactgggtcctgacgctgtccgtgcggtggtgccccgtctaccgccgcaccttcaaagaccgcctcgctcaaagctacagtgaagacgagcttcccagtgtggacatttttgtctgtacagcggatccaacagcagagccaccgatgcttgtcatctccactgttttgtctgtcatggcttatgactacctgcctgagaagctgaacatctacttatctgatgatgctggttcggttttaacattctacgttctatgcgaggcatccgagtttgcaaagcattggattccattttgcaagaagtacaaggtggaacccagatcaccagctgcttactttgctaaagtagcttcccctcctgatgggtgtggacctaaagagtggtttaccatgaaggtagagttgaaactgttgtgatgtaatgtagttcatcttcaactaaattgctgttgtgcactattacttttttttcgccgggaaggccgaaggaggccatccaaatatattaagaaggagtaaaagttacaag

SEQ ID NO: 10534 - DNA, 967 bp, Oryza sativa
  ref <308>: DATABASE ACCESSION NUMBER: AK107882
  ref <309>: DATABASE ENTRY DATE: 2002-08-28
gtgcccctcctctctctctctctctctcgcacacccccaccccgccgccgcctccgcctccgtacccctacgccgtgccatcgcgcctccaccactcgtcgcgccctccacacgccgccgcatcagcgcacgcgtcttccccctctctcggtcgctccctccgcatctcccctcctcaacccctcgatccacgtcgccgcagccccctccctcggtcgctccctccgctttcctcccccgcatcgctcgcgctcgctatccaaccgccgacgccactcctcccacctcttcgccgcgccccgccacgcctccaccgccggcgcccccatcgccacgctgcgctactccgcggtgctcgggattgaggccgccgtgctcgttggcacagctcgggactccacctcgtcgccgatcccgccctcttccacgggagctccctcgctagcccgatgcaactacataaatgcaaataaatgcaagctgcagtagtaaacattactttcggtgggattttggcaaggcctatatacaccattacaggatgctagcggacaagttatccagtgcctgaactctgctttatctaacctggtggctgacattgacaacaaatctatttacaacactctattattagtctattacctgactctggaaaacaaccatcaactgcaaaaccatttgattcacatcccttcacctgatcccacctggtttcttgcttaggtagcttcatgactatgacaaaggaaatttggatgcaggcatgtcacaaactgatttcatcattatggaatctgcagaaattccaggctttggtggtactagctggactgaccaggagaccttgcttcttttggaagctttagtaattttgcaagcaaaatggggtgacattgcagagcatgttgatacaaaaaccaaagcacaatgcatgctgcactgagcaagagcgttctatttgttc

SEQ ID NO: 10535 - DNA, 744 bp, Oryza sativa
  ref <308>: DATABASE ACCESSION NUMBER: AK107883
  ref <309>: DATABASE ENTRY DATE: 2002-08-28
aagaaacaagcagaaacagcaaagacgtagacattgttggagcctagacagcaatggcggcggtggcggaacgggaggttcttggaatggttgcagcggtggcggccatggtggtgatgatggcgccgccggccgccgcgctggtgccgtacggctacggctacatgctcgacgacccgttccgggttctggagcagtcgccgctgaggccggcgggaggtgtcgccgccgccgccgccgccggcgagccggcggccgtggcgctggcgaggtgcgactggaaggagacgccggaggcgcacgtggtgacggtggacgtgctcggggtgcggcgcggcgacgtgcgcgtggaggtggacgaggccagccgcgtgctccgggtgtccggcgagcggcgtcgcgccggcgccgccgaggaggaggagggggagcgcgacggcgtgcggtggcaccgcgccgagcgcgcggcggggaggttctggaggcggttcaggatgccgcccggcgccgacgtggggcgcgtcgcggcgaggctcgacgacggcgtgctcaccgtcaccgtgcccaaggtgcccggccaccgcgggcgggagccgcgcgtcgtcgccatcgacggcgccggcgccggcgacatggaggcggaggtggtgaaggcgtccaaggccgagatgtgagcatgtcagtgaatagtgatcggcgacacctatgtgtaatactatgatcataatgaagattattttatgc

SEQ ID NO: 10536 - DNA, 604 bp, Oryza sativa
  ref <308>: DATABASE ACCESSION NUMBER: AK107884
  ref <309>: DATABASE ENTRY DATE: 2002-08-28
gtcgaagcgccgccgggctgcgggcgagcgcgacggcgggcgagcacggcagcggagcggcgggcgtgcgcggagccacggcccacgggtcacaagaggttcggctgccggcggcgccggccggtgacgcaagagaaggggagggcgtcgtcggcggcaggagcactgggccgcggcggaggtggccggaggcggaggcaccatcgccgtcgccgtgctcttgttgttgcagccgctgcacatgcgaggacctagccattagttgagcaccatatatatatgtttgtgtattgctatgcatgcatgcatgcttccggcgagggagacgtagcggagcctgggcgtgaggccagggaggttgggcttggaggcgatggtccatccgagcgcgaggaggtggtacttgatcttggtccggagctcgtcgtcccggcggcggaggagggagagcaagggtgcgcggtggtcggagaggagccggctatgcagctccggcgacagcagcccgccggctctccgcccgccgcctgcgtccacgcttgcccgccggctctccgcctgctgtcggcctgaagaagagaagagagaagagagaatagagaag

SEQ ID NO: 10537 - DNA, 671 bp, Oryza sativa
  ref <308>: DATABASE ACCESSION NUMBER: AK107885
  ref <309>: DATABASE ENTRY DATE: 2002-08-28
acgcacgctacaccccaaagccaaggagaaaaccacacatcgagagtgcaattcgtacgtacgcgatggcgaagagcggcacggaggagtggcggcgcaacaccgacacgcacaagatgagcgcggaggaggtccgggcggccggggtggaggcctccatgcgcccgcccggacgcggccacggcccaggggaggtgctacaccagcgcggccggatgccgtacgggcccgggaccatggcgctcgccggcctcggcatcttcggcgtcctcggctacctggtgctctaccacaaggcgaggcccggcacgcccgccaccgaggttgccaaggtcgccgtcgggcacggcgaccccgtcgccggccgtgacgcccacaagacccccgacgacgcggctgctgctgcggctgcggcacgccaagggaagtagctagctagctagctgctagttactgtactcatccactgacagaagatcgacgtacgtggtgcttttgttttctactagcccatcacccgatccatgatcttcttcttgtgtgctgcttcgtttcacacatctttggtttggtgccgttttgtttcgtggatcaaccatgtatgcacgcatgttttgatgattttgtatggttaaacaagcggtagaaaataaaaataaagacgttgtgtt

SEQ ID NO: 10538 - DNA, 674 bp, Oryza sativa
  ref <308>: DATABASE ACCESSION NUMBER: AK107886
  ref <309>: DATABASE ENTRY DATE: 2002-08-28
gtgagctcacgcacactgcgactgcgagtgaagtgagagatctggaccgtccgatccgatgaggcagatgatccgacggctctcccgcgtcggcgactgctcgtcgccctcctcgccgccgccattctcgccggcgccacgccgcggaggcggcggaggtgggagcagcgggaagaggtcgtcgtcggcggcggcggcgcacgagggggtacccgaggtccacgtgccggtgtacgtggtcggggagggggatggcggcgaggcggcggcggcggagcggttcgtcgtgcgcgccgagctgctcgggcggccggcgctggccgagctcctccgccgcgccgcgcaggagtacggctacgaccaccacggcccgctccgcatcccctgccgcgccgacgtcttccgcgccgcgctcgccgccgccggcgacgaggacgacgacagcgagtagccgcgcgcggccggccgtcggttgggcttgtgggccgggccgggccgggccgggctggacccatttgtaaatagctcggagaactttgtggttctttgccttttaatttgagttttttttcctttttattttccctgtctaagggaattttgatgagagagtgattgagtgagtgaagacgatgtaaaattgataagtaaataagtacgagtgatgtttaatt

SEQ ID NO: 10539 - DNA, 509 bp, Oryza sativa
  ref <308>: DATABASE ACCESSION NUMBER: AK107887
  ref <309>: DATABASE ENTRY DATE: 2002-08-28
tcggtaggaaaaataaaatcttccttctcgaaatcgccggccgcaccgtctcctctctccccggccgtcgctgcgcctcctctctcgctggcgcgccacgccgccccagctccggtcgtcgtcctcctggcccctccgcgtccgcgtccccaagcgagcgctcgagctttgctttcaagctctcgctgagctccggagggtagagatgtcgtcctcctccgccgccgccttagccagaggcaaatccggaatctctgccgctaaattcgaagcgtctaagggattgggcgccaagccgaagcgatccgcctccgccaccggcagcagagggaagaccgagaagaaggtctactcgctgccaggccagaaattcgacccccctgaggagagagagcctctcaggatattctacgagtccttatccaagcagataccctccagtgagatggctgaattctggttgatggaacacgggttgttatctcccgaaagagcaaagaaagcatacg

SEQ ID NO: 10540 - DNA, 971 bp, Oryza sativa
  ref <308>: DATABASE ACCESSION NUMBER: AK107888
  ref <309>: DATABASE ENTRY DATE: 2002-08-28
agctcatttgcatttgaattgaaagatcaagagagaaatcaagaagagatcgagaggatcgaagctgtaatctccgtagagatggcggcggcggcaatggatgactcgttcaggagggcgggggcgataccgttcaagtgggagatctgcccggggacgcccaagcacgccaggagcgcgagcgcctccgcggcgtcggcggcggtggtgtcgccggtgccgccggcgctggccaaggtggcgacgaggcagcagctggcgctgcctccctgcatgacgtcgccgcgcgcctcgccgtcgccgtactaccactccccgcgcctctcctccgccgccgcgtgcaggtcggcggcgtcggcctcgccgtgccggagcaggtacgccggcggcggcagcgcgtaccgcccccgccccaccgccttcctcgacctcgctccccgagccaccacggcgccggacttgtacggcgccgcccacgaagctgatcacgacgagcccgcggcggcgccggcgtacgggtgcttcctgctcccgttgctccggaggaaaggcagcagcaagaaacgcggcggcggcgggtattcgtccggctccggcggctcgagctcctccggcagcttcaggtcggacggcgagccgggcggtgggctgcggcggtcggcgtcgtcgtctttctccttcgctcgcggcggcggcaaccggatcaggctcgccgccggagcgaggcagcaggaggaggtggaggcggccagtggcagctggttcttctgatcatcatgtcgccattgttgatttgatcaagttaaagttgtgaaggatttattagctaggagaaattaaaggaattagcagctttaatttttgcgttttgttgcgtggtgaggatgagagagcccagttcgatcgattacatcagactggtggctgtttgtgtgtgtcatgtgtaaagaagatagacatgaacagtttac

SEQ ID NO: 10541 - DNA, 888 bp, Oryza sativa
  ref <308>: DATABASE ACCESSION NUMBER: AK107889
  ref <309>: DATABASE ENTRY DATE: 2002-08-28
acaacgcgcgaggcatggagctcctccccctgctgctcttgctgctgctccgcatcgtcgcctccgccccggcctcgccgctggccaccgccctcttcgtcctcggcgactccaccgccagctgcgccgccaccacactccccctcaacctctccctcacctcctcctccggcaactgcctcttcccctccgcccaccgcctcctccccgacctcctcggtaaccaaccacctagctcctcctcgccgaccgcgtcgcccgcgccgtcgaggagctgtacgaggccggggcgaggaggacggcggtgatgggggtggcgccgctggggtgcgcgccgcgggtgatgtgggaggggctgcacgccgtggacggccggagctgcgtggaggaggcgaacgagctcgtccaggggtacaacgcgagggtggcggcgcggctggcggcgctgcggccgcggctggccggcgccgacgtcgtcttctgcgacatctacaaggggatcatggacatcatcacccatcccgccagatacggatttgatgagacgaggaaggcgtgctgtgggctgggcccattcgggggtacggtggggtgcttgacgaaggagatggtgtgtcccaccccgcagagacacgtgtggtgggacctgtatagccccactgaggtagtcacctccctcctcacaaactggtcgtggtcagcgccatctcattccaacaccaccatctgtcgtcccatcaccttggagatgttgaccggccatatatccctaatttctcctagtatgttctaactttagctaccaatctgtagcagattaaaaagagttttagaagtttaaaattagggccatggtattattaaaaaaaatatgtttaaattttcgct

SEQ ID NO: 10542 - DNA, 833 bp, Oryza sativa
  ref <308>: DATABASE ACCESSION NUMBER: AK107890
  ref <309>: DATABASE ENTRY DATE: 2002-08-28
aatacgtcaagtccacacgaaagcggtattcgatggggacaaaccaggataaggcgaactttccggcgggaagccaagccgagctctcccgcctctcccacggccacagccatggcggccgccgccgccgccgccgccgcgaaacccaaccttcttcttccagtctccgtggctatcccctcttctagggtttctcttcccaccggcctcgtatgcagcgcacggtccccgccgccacgcctcagggccgccgccgccgccgccgccgcctcccaggccctaacgtcgcctgtcgcggcggagactccggaggcgaagcagatgcgggtagagacggaggccgccctggaatggggcggcgtgtgcgcgcggctggccgggttcgcctccaccgccgcggggcgcgccgcctgcggagaggggcgggtgcccgtcgggcggagccgggaggagagcgagcggctgctcgaacagacggcggcggccgcgctgctgcctgctccgctggatttcggcggcgtggaggacgtgtccgccgccatcgccgcggcggctggggcccggctgcttgcggtgagggagatatgtggagtcgggcgcagcatccgtgccgcacgcagggtgttcgaccaattgaagacgctctcagaggagacaccagatggaaggaggtgaggaagttgcttcctcgaactgaatttcgtagcactgagctaaactgaatgcataatttcgagttaatgattgtaactgtaagtgtaactttgattagcactcctgtcctgcagctacactcctcttctggatataatgcaagactgtgacttcttgac

SEQ ID NO: 10543 - DNA, 515 bp, Oryza sativa
  ref <308>: DATABASE ACCESSION NUMBER: AK107891
  ref <309>: DATABASE ENTRY DATE: 2002-08-28
aaagatggccgtggtggtgatgtcggtgttgatgatggcggcggcggcggcggcgaactacgcggcggagccggaggaggactgcgcgacgcagacgacctacttcaccaactgcctgaggcgcgggatcagggaaggctgctgcggggtggtgaagaaccactggtgcctgtgccaggtgaggcgggaggcggaggtgaaatgcatccccgggcgccgctgcgacgtgcccaaggccctcaagatcgccgacatggacctcccctgcatgagaaacctcaggtgcagcaagcacgcctgatataaccaaatctgctacgctatatccaacttaattagatgcctactgcctccaagttatgttactctgtttgttactgcatcctatgttttttttctagatgattttgttgaagcaatcaatcccaacctgatgtatactgctcattgtcctatatattattattatggtcggctccggatctcatattcaaaaaaaaaaaaaaaaaaaaaac

SEQ ID NO: 10544 - DNA, 735 bp, Oryza sativa
  ref <308>: DATABASE ACCESSION NUMBER: AK107892
  ref <309>: DATABASE ENTRY DATE: 2002-08-28
gcaattaaccagcaagatcagtcatcagtgtgcgagtgtgtgattggtttctttgaattgaccgtgattcttgatggaggacgtcgccggcgtcgttgatgcagcggaggatgtcgtcaagccggcggcggcgaggcagccgatcagaaggcaagggagcctgcggctgcgcgccctcgcgccgggatccatcgacgtgcgagccggcggcgccggcgacgggagcgccgcgtcggagtactgccacgacgccgtcgccgccgccgccgaggtaatcccgctgctcacgccgctccatgccgtccctgcggcgccggcggcgtccgatcaggtgtccggcggccgtactgcgcgccatctgacggaggtggtcgccggcggcgggcggtgcgtcgccgtggagaagacgaggttaccggcgtggtggtggcacccggcgatgccgccgttcgtgaacgatcagccggcgtcggcgtcggcggttgggtttgtgtttcagaactgcgtctgatcgatcttcagttagtacagtgggctaatattgttcaatctgacgtttctttctttttcgtcttaatttcaatctctctttttctcatcctattagatttgtacatgtattttccgaccatatctgtatataccgagctactgcctccgtactaatatataataattttaatttctgattatgtatatagagaaatcctaaaatatagtaataattttctgatg

SEQ ID NO: 10545 - DNA, 542 bp, Oryza sativa
  ref <308>: DATABASE ACCESSION NUMBER: AK107893
  ref <309>: DATABASE ENTRY DATE: 2002-08-28
accgctctctctatctctctctctctccctgccaggtgcttctgcgtcgcttgccgtgctcggtcattcctgcgatggcatctagaggcgccgtgttggtcgccgtggccgcggcggtggccgtgatgttcgcgtcggtggcgtcggcgcaggtggacgggggcgtgccaccggcgccggcgccggtcacgggcgcggccgcggggggcgcggcgtcggcggcgctggccgtggcgtgctctgccgtgctgtccatcctcgtcgcgggtgggatcatgcactaggcaggcgcgcgaggtggtgatggatggaattggttcgttgatgatctccgatttggacacggctcgtttcgagtcgtttccggctatagagtagtactagtagcagtggttgggttgggtgcgtttccgagtgaggcatgttgtgtttatttcttattcatttgtatcatacattggtctgtgtgtgtttgtatctctcttgttgctgtggattctatgaataaagatggatgatgtgtcttcgtctcattcgtcact

SEQ ID NO: 10546 - DNA, 744 bp, Oryza sativa
  ref <308>: DATABASE ACCESSION NUMBER: AK107894
  ref <309>: DATABASE ENTRY DATE: 2002-08-28
gaccagccgccgccccccaccgccaacttcacccagctctcccagatgttcgccgccaaaggcctcgacgccaaggacctcgtcgtcctctccggcggccacacgctcggcacggcgcactgcgcgctcttctccgaccgcctctacaacttcaccggcctggtgaacgacggcgacgtggacccggcgctggacgcggcgtacatggcgaagctcaaggccaagtgccggagcctgagcgacaacaccaccctgtcggagatggaccccggcagcttcctcaccttcgacgccagctactaccggctggtggccaagcgccgcggcatcttccactccgactccgcgctgctcaccgatcccgtcaccagggcctacgtcgagcgccaggccaccggccacttcgccgacgacttcttccgcgacttcgccgactccatggtgaagatgagcaccattgacgtgctcaccggggcgcagggcgagatcaggaacaagtgctacgccatcaacatataataaagtaactgcatctgcatgcatgcgcactaatcaaaggttcgatttatttggtttcttccgtcaattttttttaattggtttcagtttatttgcaaaaaagatcgtgttaatttggtttgggtacagtacagatgaacgaatccatcactgcgtactatgtatatgtgtgtaactgatgtactatgtacgtagattgcatgccaatgggtttcttgttttgct

SEQ ID NO: 10547 - DNA, 431 bp, Oryza sativa
  ref <308>: DATABASE ACCESSION NUMBER: AK107895
  ref <309>: DATABASE ENTRY DATE: 2002-08-28
atgtcagcgccgccgtcgtcgcacgccttcctccgcacttctccgtgcccccgtcccgtccgtcgccgacgacgctcaccctcgcacgccgattcacccctagcgtcgtcgccgattcgccgcagccagtttgcatccatcgtctacccgatacaccggcgctctccggtcccatcaccatcgccatgccgcttgggatttatgtggttattcttctgatgaaatgtctgttgtctatacaattactctgtctacgcgttggcatgtggttcatttgtgggattcggtttcagctgtttttgcaacaattcagtgctagatcaatcggggatgttttcctcttcattagttcgtatcgggtgcaagtttggggggtcacgttttccttggattctggtgtgaattgaacagagaactttatctgaatgctc

SEQ ID NO: 10548 - DNA, 608 bp, Oryza sativa
  ref <308>: DATABASE ACCESSION NUMBER: AK107896
  ref <309>: DATABASE ENTRY DATE: 2002-08-28
agcagctccagtacactaattaacccaaactccctccacacacattaaccactgcacaaacgcagccagcgacagcgaggatggccggccgagccagctgcgtactcatcctcctcctcgccattgccggcttcgccgacgtcctcgccgccggcggcgcgacgccatcgtcgtcgcaggtgagcacgacgacggcagcggagttgaaggaggtgaacgggatgcttgcgtgcatgatcgggtgcttcacgcagatgttcgggtgcgccttcgggtgcatggcgaagggccccgacacgacgctctgcgtcgtcagctgcaaccagaacagcatcgtctgcatggtgcgttgcgccctcacgccgccgccgcccaagcccaagcccacgccgccgccgcccgcgcccacgcccaagcctcccgcgccctcgccgtcgccgccgccgcccaaagccgccggccacggcgtcgctggcgaccccttggcctagacatgtacagctcagctcactctactatacccctacaagtgctagctcctgatacgacattataaatgtgcctagctacgtgatatataatcaagaatcaagaaaatacaaactgat

SEQ ID NO: 10549 - DNA, 789 bp, Oryza sativa
  ref <308>: DATABASE ACCESSION NUMBER: AK107897
  ref <309>: DATABASE ENTRY DATE: 2002-08-28
acgcctcgactcgaaatccttccagaaacaaattgttgaacacccagcgagcgagcgagcgagcgagcgagatggcggcggaggtgtggaaggcgcagttcgggaggcttgtggaggaggcggcgatccgcgtcgatggcgtgcgtgagagcctccacgccttgctgccgcaactgacgtcgtcgtcgtcgtcgatggtcgcgggcgatgcgaacaccgtgcgagatacgatccagctcgcgctggacgcgctcggcctcggggatgagagctcgtgcagcaatctcgcctccgcgatttccttcacggtggcggccaggctcctcgctctccgcggcgacggcatcaaccctgctgtctgtgcgtcttctcagggtgaactacctcgcggagcagagcgccgcaatcaagctcagctacgccgagagtgacgcccggaaggcgtacgcccttgtggacgggtgccgcggccacctcgacgcggccctcctcctgctggaccatgtaggtcgtctaccagacgtgcagggcatgatcaacgccgagcgcctcgccgccgtcgccgacctcgaggccgcgatagtggccgttcagcggagcgccgagatggccaccgccgcccggcaggacgtgtccggcgccagttgattccgttgagtcttcgtatgcttgatacgtacctcgttcatctgtccatctctttttcgcgcttgccgttcgacctgctcctgctttgttactgttcgtgtgatcgtgtcgtctgatcgatgaattctgaaacattgtttg

SEQ ID NO: 10550 - DNA, 713 bp, Oryza sativa
  ref <308>: DATABASE ACCESSION NUMBER: AK107898
  ref <309>: DATABASE ENTRY DATE: 2002-08-28
cgtcaaggagctggagcagctgctccagtcgctagaggcccagaagcgtcgcgccgagcacgcgccgccggcgccgccgttcgccgggttcttcacgttccctcagtactctaccacagttggtgacaacaatgcggccggctctggcgccgccgacggcgagggcggctgcggcgcgcggcccggcgcggccgacatcgaggtggccatggcggagagccacgcgaacgtgagggtgctcgcgccgcggcggccgaggcagctgctgaggatggtggtggcgctgcaatgcctcggcctcaccgtgctccacctcaacgtcaccaccaccgccgaccatttggcgctctactccttcagcctcaagatggaggatgaatgccggctttcgtcagtcgacgagatcgccggcgccgtcaatcagatggtcacgaagatcgctggcgagtgcattagttagttaattagcttgaaaaaaaaagaggtgtttttgtgcgtgtatgtgtttgtagcaattaattccgtcctagtacatggataattcaggcgatttgagccattgtcagggtagtacaatactagctgcccgccatgtttgcgtgcaagtaattaaacatgtatcaatcagcggatcagatctgcttaactgaattttcaaagtacatatgtaagcatccagctcgtcgagtcacatctcgcagcaccaattattt

SEQ ID NO: 10551 - DNA, 584 bp, Oryza sativa
  ref <308>: DATABASE ACCESSION NUMBER: AK107899
  ref <309>: DATABASE ENTRY DATE: 2002-08-28
actctcacccagtatagttctccattgagcaaactaccaaagggtactcacctgaaacagagtccagtgatcgaccagcatggatgatcgtaggtacggctactcgtatccaccaccccaagggtactacaatgggccgccggtgatggcgccgccgcagtacgcggctccgccgccgaggcggccggagccgagcttcctcgaaggatgccttgctgctctctgctgctgctgcctcatcgacgagtgctgctgcgacccatcggtcatatttgtgacctaattacggtcacagtggcgtctcgactggttgacgaggacgaacagtctgagttgagatatacactgtacacgtgcttgccttttgttaaatgttgataattgtatcggtctatagctagattacagtacaagtcctccgttaagttcaggttcttcaagtatcagatgcatgcgtgatccacctgcagtggaaatatttatattgcatgcactggttgctcgattaaccaaaggacgtatacgtttctatgtgtatgtctgcatgatcgactataaagaataaacgaaggtaaagtgaagtt

SEQ ID NO: 10552 - DNA, 804 bp, Oryza sativa
  ref <308>: DATABASE ACCESSION NUMBER: AK107900
  ref <309>: DATABASE ENTRY DATE: 2002-08-28
aacacaaacacctcgttgcaatcgctggtcgccgccgccgccgcagccgtcgacggcgaaggggagatcagagccaaaggattgatccgtggctgctccgtggggggcgatggcgatgccgcggtcgccgggcgcgggctcgctccggtttcttggcctcctgaagcagccggagtcggggcccgacggcgcggcgccgccgttcgagctcgacgagagcgacgtggtgtggccggccggcggtgtcggggacgacggttactgctgcccggcgccgccacacccggagggcccaccgcgcgcgccccgccgcgcccacacggtgccgcagagcttcgggctgtcgtcgctgctcgccaacggggggcgcggcggcggcagcgacgacgggcgtcaggatggagtggccgtgcccgtgagggccgcggcggcgccgggtggaggcgccgcggcaccgaggcggtcggcaccggtgagggtcccgatgtggccgggcaagggcgccgccgccaacaacgtcgtcggcggcgaggagtccgacgacaacgaggacgacgagatggggccgccgcacgtggtggcggcgcggcggcacgcgcggtcgtcgtcggtgctggagggcgccgggaggacgctcaaggggcgcgacctccgccgcgtccgcaacgccgtgctccggcagaccggattcctcgacctctgaagaatccaaagcatcccatcgccatcatcatatcttgattagccatttctcatcatcagttttccggtgtgactaaaaaaaaaaactttgtcatttcattt

SEQ ID NO: 10553 - DNA, 469 bp, Oryza sativa
  ref <308>: DATABASE ACCESSION NUMBER: AK107901
  ref <309>: DATABASE ENTRY DATE: 2002-08-28
atagagagaaacacaaaggcatcaatgatgatggggaagtcgtcaccatcaacgtcgccggtgtacgccgttgccgccgcgctgctgcttgtgtacttgatggtggccatgggcgccggcgtggtggaggcggcggtggtgccaccgtcgaggtgcaacccgacgctgctgacgccgtgcgcggggccggcgctgtttggggggccggtgccgccggcatgctgtgcacagctgcgggcacaggcggcgtgcctatgcgcgtacgcacggagccccaattatggtagctacattaggagccccaacgctaggcgtctcttcgccgtctgcggccttcccatgccgcagtgctcttagatcttaattagcttgcttcgatcacacccatggctatggctttggagctctagcatcatgtgcacagtgtaaaatgttgtggcatgaataaaatggttgtcatgtttagttc

SEQ ID NO: 10554 - DNA, 773 bp, Oryza sativa
  ref <308>: DATABASE ACCESSION NUMBER: AK107902
  ref <309>: DATABASE ENTRY DATE: 2002-08-28
gcacagatcgaggagataattagctcactccatggccgctgctcggtttcctctccttgtcctctgcctcctgccgatcatcgtctgcagcgtcgtggacgcggagctgacccatctccacttctacttccacgaggtcgacgccggcacgcccaacgccaccgtcgtcaacgtcgccagccttcaccggaactcgtcgacgttcggcgacgtgaacgtgttggacaacgcgctgcgggaggggccggacccggcgtcgcggctgatcgggagggcgcacggcctcgcggtgcacgcgtcgctggacgagacgggcggcctcacggccatcaacttcgtcttctccgactacggcgcgtacagcggcagcacgctggccacgcagggccacttcatcacgacgggcccgtcggagcggagcatcgtcggcggcacgggcaagctccggttcgcgcgcgggtacatgaccagcaagcttctcagctccacggacaccgccatcgtcgtcgtcttcgacatgtacttcaccctcgaccattgaatactactccgtggtgtgttatatatcgtgcagtgcttgctttggtgttcggttgaacatatgtatgcacggcgatcgtgacgaatactggggttcggagaattcttttccgacccatcgtctcataggcccaattcaccactcctacgctgtactgacacactcatgtaaaaataaactcggtgttataattgctcagggcaaagcatccttataaataacatttcgcctc

SEQ ID NO: 10555 - DNA, 540 bp, Oryza sativa
  ref <308>: DATABASE ACCESSION NUMBER: AK107903
  ref <309>: DATABASE ENTRY DATE: 2002-08-28
aagtagcaaccaacctgcgctccacaagtatactccagctagtaggcgcaggtgatgcaggagcccgcaatggcagggtcgaccaacaccgtcgtccaaaccatcagcgtcaccgccgcggcaacaggggtccacgacttccggttcgtacggctattccctcaccaaggcggtcgccggcgaagaggacttctaccagtccgaggccttctccgtcggcggccacaactgggcaatccgctactaccccaagtccccaaccgcgtcagctccagggtgtctctctaccccgttctcctgagcagaccggcggacgatgatggtcgcgtgcacgcgtcgttcgcgtgcacgctgctggacaaatccggcaagccggcgtcgccggagtccaaggacactgcggacagtgctcacacgcattccgctccggcgccggggcggaggcttgtttagatgggactaaaacttttaagtccctatcacattcgatgtttggataataattataaatattaaacgtagactattaataaaacccat

SEQ ID NO: 10556 - DNA, 618 bp, Oryza sativa
  ref <308>: DATABASE ACCESSION NUMBER: AK107904
  ref <309>: DATABASE ENTRY DATE: 2002-08-28
gagggtgaggtacggcgagtgcaggcggaaccacgcggcgaggatgggcggccacgcggtggacgggtgccgcgagttcctcgccgagggggaggagggcaccggcggcgcgctccggtgcgccgcgtgcggatgccaccgcagcttccaccgccgggtggtggtggtgcagcaatgctgcgcctgcgacaccgcggcggcggcggcggcagccgggggatgggagtggcgggactgctcgccggagtcgtcctcctcggcgtccagcaccacggccagctagcaagaaagagatcaattcgtgcggcgcggcggcggcggcggcggcgaccagcatgtcacgcttcgtccatggcgagatctctcgatcatcaccaggtgttcgactgcatcatattcatatccatccatgaaacttgttgtctcctcgatcgtcgatctccttttgcacgctgaatttgttactgccgcctcttgtgttcttctctgactgggctagctagtgagtgatgagcgtatgattacatccttacttattattattgtttctcataatttagtctactgctactggttatattgatttaattgtacgtaactactccctattatcaagtc

SEQ ID NO: 10557 - DNA, 800 bp, Oryza sativa
  ref <308>: DATABASE ACCESSION NUMBER: AK107905
  ref <309>: DATABASE ENTRY DATE: 2002-08-28
aattaacagaagcactttaagcttgtgtgctacttatccatcttccattctcgcttgctgctgctgctgcaagaacacagtgctagctagctagacacttcttgctcggtaacaatggtgagggcgttagctgttactgcgggcaatggcttcggcgccgtccctactgctcctgctgccggttggatcctcatcggcttcggctttgccgcggccttagccgtcgtggcgatcgcggtgttcggctgtgccgacgggcctaaagacagcccaagaaggaagaaagataagcgccgccgccgcagggaagacggggatggtggcggcggcgacggaggcgatggtggtggcgacgggccggacggcggcggcgatggcggtgatggcggcggcggcgaccagcctagctcggatgctcacggcgggcatcaccaccatggccacggacatggcggagacaatggcggcggacaccaccaccatggccacgggcatggcggggaccacggcggcggcgggcaccaccatcaccacgggcatggcggagaccatggtggaggaggctggcaccaccatggcggagaccatggcggcggcggcgggcaccactactccggtgaccatggggcaagcagcggattcagcggtggcggctgcggcggcggcggcggcggcgggggtggtggtggtgggttctgacgtcacgggagttaactcggccactgtacgtgttgcttgctactaatatgttgccattatgtacattataatatgagatagattgtgaaaaaatcagagct

SEQ ID NO: 10558 - DNA, 832 bp, Oryza sativa
  ref <308>: DATABASE ACCESSION NUMBER: AK107906
  ref <309>: DATABASE ENTRY DATE: 2002-08-28
cttgctctctcgccctcttcaccaagaaagaaaacaggcgcacgcctcgcctcgcctcgccgccggcggccaccgtctccgccgcctcctgcccccaacccaggaacccccggcgagagagctcgatggaccaggcggggtcgatggaggagcgggtcatcaccgagcggatccggcggaagctggaggaggtgaacgccgccgcgcagaagcacctcgccggcgtccaggaccacgtcaacttcaccatgcagcaagcgtacttcaagtgtgcgtatgaatgctttgatcgccgaagaagtcaagaagggatcaacaattgtgttgagaactgcagcgtgcctgtccttactgccaacaatgttgttgagactgagatggctaaattccaggagcggctgaatcgatctttgatggtgtgccaagataaatttgaagcagcaaagctccagaagatgaaaacacatgcgactgaggagctagaagcatgcgtaaacagatctattgatgacagtatcagggtcctgccccatctggttgatcagatcaagtccaccctctccatgaattagagagatcagaagaagttcagaactaaacagtagaatcttcctcgtaaactatttcagcttttacaaaaagcattttcactaattttggcaccaagatcgttggccaaattactgccctttgttaacatgagtatgacatatgagcggcatatcgtattttgtgtgccttgagcattttgttcggaaccacactttgttgcagagctgatttatcgaaagatggtgcaataatagaagatgatatcctcatgttgctcatc

SEQ ID NO: 10559 - DNA, 751 bp, Oryza sativa
  ref <308>: DATABASE ACCESSION NUMBER: AK107907
  ref <309>: DATABASE ENTRY DATE: 2002-08-28
aagcgaacccagcggaattcgttgggcagcgggtgcgggagcagtagaggaggagaggtagatggattgagcggcggcgggtgttcgtgcagacggagactgggtgcgtgctgggcatggacctcgaccgcagcgacaacgcgcacacggtgaagcgccggctgcagctcgcgctcaacgtgcccgccgccgccgccgccgctgccgccgggcgatccccttaccctcgctctgtgcacccgcaccccgcacttaccccctccatggcgtgatccgatgatagcaacgagagcggtgcttcccctctccctgacggcgtcggcctccggcctgtacggcgcgcgcaccaagaagaggaggaagctgctgctgctgccgcggctgccatgtcgcccgcgctgcccgggtcgatgccctcgtagccggcgatgctgacggagaaggcgtcgtggtcgtggtagtacctcccgcccagcgtgggcgtcgccgccggccgcgtcgtggtggagaagaaggcgaacgtggaaaggaacatggttagccccagcaaaccaagtgtccacaggaggcaagcttgggagcaacgacggccagacgcctcgtcgtgttcgcgcagatcgccctggagagcatggtatggcgccgcggcctccgcagcttggaggtcgaggtcttccccatgagccatgattagcatgcaattagcacgttcaacaatgctaccaggtttacgttcgactggagatttttt

SEQ ID NO: 10560 - DNA, 465 bp, Oryza sativa
  ref <308>: DATABASE ACCESSION NUMBER: AK107908
  ref <309>: DATABASE ENTRY DATE: 2002-08-28
atacgggtggaggaagtgttcgaagagccaggagcggaggatgttgacggagcgctcggggaggccgcgctgggggcgccacgcctcctgctccatgatccccatgtggtggaaggcgcgctgctgccggaggctctggtcgatggcccgcagccgcggcgtctcccccttggtcagccccgaccccgtgccggcgtccttctcccccagcgcctcgcacgtccccctcagctgcgccgcgatcgcgtccttgaggcaccggaagtgcctcgacatggccttctgcgccagcgccgtgtacggcgtcgccgccccgaaccccatcaccgagtcgaagaagttcaccaccatctgcatctggtcgcagtagtggttgtacctcctgtccacctgcatcgatccacatccatccatcatcaccacaccatcccaaccatatcaatcatgcatttttttttgttcatc

SEQ ID NO: 10561 - DNA, 770 bp, Oryza sativa
  ref <308>: DATABASE ACCESSION NUMBER: AK107909
  ref <309>: DATABASE ENTRY DATE: 2002-08-28
tggcctggtctcagccaggctccctaggtgcaagattccctccacagcctggcccgagaggaacgcaagaaatgagcttcgctcctcagcctggctgagcggatgcaggcgcgggtgcaagcgtgtgtctgggcgatgcacgcgcctgcagtccactcacctccacagtctcatttgcatcttccctatcctcctacccctctcttcttgctgttcgccttcgagtattcacggccaatcgaggagcaccaaggaccggcatggtctttctgcgctgggaagaagaaggggcttcaggaggtcagctggggaagaaggggcttgaagttgaagaggaagaagaagcccggtagaaaatgccggatccggtggccacaagctcctaggcagcagacctggtagcctggagcttgtcgccggccacaacggcggggcgagaaccatccggcgaatggcagagtccgaacaagcaacgggattcggtgggaaggcaggcgatgggatcttgtggggagctcggctgcggagtcgagcgatgagcatcttggagttcggcggtggggagcgagccgcgtggtccggcggtgaggattgagcgacgatgagcagcgtggactccggcgtcgataggaacgagaaaggcaactcttttcttttattttttttctctaaccgatcgattacttttaagcccgatcaaatactgtagttgagtggttttttaatgattatctaatccgggctactgttgatcggattagtattgaacc

SEQ ID NO: 10562 - DNA, 523 bp, Oryza sativa
  ref <308>: DATABASE ACCESSION NUMBER: AK107910
  ref <309>: DATABASE ENTRY DATE: 2002-08-28
taactagttaaaccaaaagcctagctttccaagcacaaacaccgaccatttcttcactctctaagctagctcgatgccgccaccgccggcgacgacgccgctgcctcgccgtcgcctcgcgctcatcctgtgcctggcgtgggcgctctggctccacggcggcggcggaggcatcagcctggcagacgcgttccaggcgccgacgccggcgagactctcgtcggggtcgtcgtacgccgtcggctcgcggccggtccccgcggcggcgccgaggtggagctcgtcgtcggcttctgaagctgccgcccggttcgccgacgacaagcggcggattccaagctgccccgatgccctccacaacaggtagaatataagatacatacatgcatcgatcgattcagttagctagacatgagtacgctcgatcagatcgatcgtagctagcaatttgtagtagcttgtacgagcagagaatgtgtgtgtgtcatactgcttggctgttcttccaaagccaactcgatct

SEQ ID NO: 10563 - DNA, 762 bp, Oryza sativa
  ref <308>: DATABASE ACCESSION NUMBER: AK107911
  ref <309>: DATABASE ENTRY DATE: 2002-08-28
ctctcttctctctccgcatccgcctccgcaactgcaaaccgctgcggtctcggaaaccctagctctcgccccctcccctccctctccgcccgtcgccgcgcgggtcgcctcctcctctccgccgccaccgccgccgctgacatgggctccgatgcggacatggaggattacgggttcgagtactccgacgacgagccggaggagcaggatgttgacatcgagaaccagtactacaactccaaaggtatggttgagacagaccctgagggtgcacttgctggcttcgatcaagtagtacgtatggagcctgaaaaggctgaatggggtttcaaagctctgaaacaaacagtgaagctgtattataagcttgggaagtacaaagaaatgatggatgcctatagggagatgttgacatacatcaaatctgctgtgacacgtaactacagtgagaaatgtataaacaacattatggattttgtctccggatcagctagtcaaaacttctctcttctgcaagagttctaccagacaacactgaaagcacttgaagaggcaaagaatgagagattatggtttaagacaaacctgaagctttgcaaaatttggtttgacatgggggagtatggccggatgagcaagatactgaaggagctgcataaatcttgccaaagagaagatggttctgatgatcagaagaaaggcacacaacttttggaagtctatgctattgagatccaaatgtacactgaaacaaagaacaac

SEQ ID NO: 10564 - DNA, 735 bp, Oryza sativa
  ref <308>: DATABASE ACCESSION NUMBER: AK107912
  ref <309>: DATABASE ENTRY DATE: 2002-08-28
atcgatacaagttggttcactgaagttcatgcatgtaactgaagttactcgacaaaggcgccaccccaccagcaaacctacccacctccgaccgatctagggttacgggaaatatgcaggagcgccgccaccgccaccaccctctctctccctctgtccggatctgggagggaggggtactgctaccgccgccaccaccaccaccgccaccgccctcccccggcctccctccgtccggatctgggagggaggggtactgccgccgccgccatcgccctcccctggcctcccttaggtcggatctaggagaaacgggaaccgccaccgccgccacctccaggggtagccaccgccacccctcctccccctccccccttcggccggatctaggagggaggagaagggagccgtgccgggtgtggatgccaccgtccccgagcgtcgccgtcgccgaccccatgcctcgccgttgccgctgccgaccccgccaccaccggtcgctgatggagctaaggaagagagggtagagggagaggagagctgagagctgagacttagaaaaattcttgcttccatgtcgtgtctatttatattcacgccaatttccgcaggtggatcacataagattaacaaagggttttttttcaaggatatttttccgcctgtgtggatataaatttccgcacggtattttcgcaggatataaaaataccatttccatcgtgtctatagatt

SEQ ID NO: 10565 - DNA, 833 bp, Oryza sativa
  ref <308>: DATABASE ACCESSION NUMBER: AK107913
  ref <309>: DATABASE ENTRY DATE: 2002-08-28
actaccttgtcttccatttttcacaaatcgcaagcaaagccccacaccaaaatccacccacgaaggccgaagacgacgaggcaaggcaacgtcggtgttgtgagggggacacacacaaacactcgaccttcgagagatttccgagcggcagcaatggatctctgggagagggcgcgggccttcgccggggaggcggcgaagcggtcgcaggagctgtcggcggaggcggccaagcgctcgtcggcgctggtgtcggagacggcgaagaagtccaaggagatcttctcggagaccgcgaccaagtcgcgggagatcgcggccgaggccaccaagcaggccgacctcctcgccggccagatcaagcgcctctccaccgacctccccgtcccctccatccccgcgatcccgcccatccccaccgccgtcgcgccggagccggacgccgcggagctcgagcgctacggcatcaccgaagacctccgcgagttcgtcaagggcatgactatcagcaccttccgcgacttccccttgcaagatgagccggagatgtcggatgtgcccacggtatcgaacgtgcgtcaggatctgaatgagtggcaggccaggcacgccactctcgtcctctccgccgtcaaggaaatttcaaagttcagatatgagttgtgtccacgatacatgaaagagcgtaaattctggagggtttatttcttgctagtaaacaactacacatccctctatgagaacaaatattttgaggagctgaaagtaaaagcagaggaggaaaaaatggatgccaagaaggaagtaacagagacctcacaagctacaactgc

SEQ ID NO: 10566 - DNA, 872 bp, Oryza sativa
  ref <308>: DATABASE ACCESSION NUMBER: AK107914
  ref <309>: DATABASE ENTRY DATE: 2002-08-28
atcgtctccgcggaaccacgcctcgtcgccgccgccgccgccgccgccgccgcgcgacgtcctagcttcccggaccgcctccgcgtggttggatccggcgagaggggagaactgttgtgttccttggaagcgggagctggatgaaagctgggaggaagaacctacggcgggcgtgcagcgagggcgccgtcacgctgggggagggcgagagcatcatgcaggtcctcgcgctgcgcggctccaacgtcatcgaggtgatggacgccaagggagtgaagtctctggccttgttcccggccaagttccagaagagcttttggatcaagaatgggaattttgtggttgtggatgctagtggccgggatcaggcgctcgaatcagggagcaagatagcctgtgttgtgtcccaagtcctcttccatgaccaagtccgggctatggagaaatctgaggaatggccagctatcttcaagtcaacttctaaggaaggttcagaagctggaacacaagaaggaacaaggccacagattgaggaggaaccggattctgatgaagatgatgatctgccaccgcttgaggcgaacacgaatagacaaagaccatttgaactgtatgccgactcagagagtgattctgactcttagactagtttacatttgaacacgccattgatgatgttgtggtttgtgatggaaaaatacacccggtgtacttatggtcaagtcttacattctgccaaaaactgctgagtgtcaaaatattctgaagaagttcgatgtcattcagtagcaggcacaaggcctttcacttgaaactatgatcaactccatatgttgctttttattgttctcaatgatggtgcattaattgtc

SEQ ID NO: 10567 - DNA, 467 bp, Oryza sativa
  ref <308>: DATABASE ACCESSION NUMBER: AK107915
  ref <309>: DATABASE ENTRY DATE: 2002-08-28
aaaacaacaagacgcccggcacgggtggaggacgagatgaccaggacgattccgcaactgatcgatggccagtggcgcgacagccgctcccgcgagctgatcgaagtcaccgaccccgcgacccaggccgtgctggccctggcgcccaaggcgacgcccgaggaaatcgaggccgccatcgccagcgccaagcaggccttcaccagctggcgcgaggtgccggtgccggaacgggcgcggctgatgctgcgctaccagcacctgctcaaggagcaccacgacgagctggcggagatcctcgccagcgaaaccggcaagaccttcgccgacgccaagggcgacgtctggcgcggcatcgaagtggccgagcacgccgccaacatcgccagcctgatgatgggcgagacggtggagaacgtggcccgcgagatcgacaccgccagctggatccagccgctcggcgtggt

SEQ ID NO: 10568 - DNA, 947 bp, Oryza sativa
  ref <308>: DATABASE ACCESSION NUMBER: AK107916
  ref <309>: DATABASE ENTRY DATE: 2002-08-28
gttttatatctcatcaaacttgcaggcttcttctttagcaaagttggctttatcagcaagggatcctggtgaattggtttttccttttggtcctgactatttggaggtatgaagttatccatatattaatttgggttatggcgcatttattgtgtaatttatagaagcaccaccaattttaccagtaattgattgactcgtcattttacaaatttgaaaccaactgatctaagtcttcattaagttccatttcatgtaaaattctactttaacaggtgctgtgatcaatctcatgttatcttttcaataatggtgtatctgtatttaagcccactacacactaccttttcaaatagtatggattcagtgtgctgtactgatagagatattaagatacttgtgatcatatttatgtaacacccaccacacagctgcaagagcatccagccatccacctgactaaatcaccaccacgaccaccaccacccccaagccaatccagtcggggatggttgatacgcgattggtcgcgcgccggcacacccgcgcgaccagcgctacccatctagtctcagtatttatacgtttgtatatataccacaatacaaagtttatacgcatgtatatgaggtatatatacatacgtatatagacgataaaatatgtgtaaactttgtatatataccctacattttttatatgtatacgcatacacttttgatgtataaaaaatatgtatacatgtatacaaagtttgtatacaacgtatacaaaatatacaaactttgtatacatacgtatacaaagtttatatacgtatgtataaaaaaggaaaaaatatacatgtatacaaacttagtatatgtgtatacatagtttgtataacaaaccgaaaaaaaaaaacccgaaaaagtgaaaaagaaacagaaaaaaaaggaaagaaacag

SEQ ID NO: 10569 - DNA, 606 bp, Oryza sativa
  ref <308>: DATABASE ACCESSION NUMBER: AK107917
  ref <309>: DATABASE ENTRY DATE: 2002-08-28
aatcggccggctaagggccaaggctcgccagctcgccgccgccgccacagccgccgccgccaccgccaccgccaccgccctaggtcctagggcaactcgatgcgcttgccatggtgccgcccgagtagcggccattaccctcctctccaccgcctcgcacgcgcggaaccccgattttgtcgccgttcgtgcgccatggcgcggccccggtgcccgcttccaccgagcgcgcctaccggtcgccggtagggttgcacctccgcctccgagggacgccgccacgttcaacgctgtcgcgtgccgcaccgcctctgcctgctcgtgctcggccgcccccgcatcgccgccgcgcgcaggctgttcgacgcaatgcgcggcccagcgtcgtgtactgcaacacgctcgccaaggcattactagcctccaagggcgcctcgcccgacacgctcgacgtcctactatatcatcgatggtgacatgctggcagcacgaactgctttggtgaaaggattctatccaaccggtcaagttgatcttgcaataaacatgacagtttgaaactgtaggtgtaacctttcgctcaatactaaaatctacaattgaagc

SEQ ID NO: 10570 - DNA, 632 bp, Oryza sativa
  ref <308>: DATABASE ACCESSION NUMBER: AK107918
  ref <309>: DATABASE ENTRY DATE: 2002-08-28
accaccacgacacacacgcacgcaccgtgcaggcatcgacgacgagcgagagcccctcggcggcagaagacactcacggcgatggcggtgacgaggacggcgctgctggtggtgttggtagcgggggcgatgacgatgacgatgcgcggggcggaggcgcagcagccgagctgcgcggcgcagctcacgcagctggcgccgtgcgcgcgagtcggcgtggcgccggcgccggggcagccgctgccggcgcccccggcggagtgctgctcggcgctgggcgccgtgtcgcacgactgcgcctgcggcacgctcgacatcatcaacagcctccccgccaagtgcggcctcccgcgcgtcacctgccagtgatggagatggtgtgccaaggtaattgcgtttgctcgtgcgaggatgagaagaggagattgaataagatgtttgatggcaacaagtcatcaggcgatccgatccctgcagctatgaatgggagtatacgtagtagtggtctcgttagcatctgtgtgtcgcatatgcacgccgtgcgtgccgtgtctgtcctgcttgctctgctgatcgttcaatgaacgacaaattaatctaactctggagtgacaagtcgttcgagatatact

SEQ ID NO: 10571 - DNA, 666 bp, Oryza sativa
  ref <308>: DATABASE ACCESSION NUMBER: AK107919
  ref <309>: DATABASE ENTRY DATE: 2002-08-28
acttttctttcctctcacagctctctctctctctctctctccctctctcagctctatctctcgaggcctctccctcccccgcgcccggcgacggcgatgggaggctcggagttggcggtggcccggcggctcggaggtggcagctgcggcgcacaaggcggtggcgggcggcagcggctgttgtgggaggggatgtggcgggcgccccctccgtcggatccggcgtcccctccgccggatctagcaggaggggaggcggcaggcggcggtgaccgttgtgggaggggaggcggcggcagagccccgtcaagcggcggtgggcgatgtgggcggcgggcgcccatgaggcacgaggggggcggcaggcaacgacgaccgttgtgggagaggaggcagcggcagagccctctcctccactggatgtgatgggaggggaggcattaggcggcggcgggcgatgtgggcagcgggcgatgcacgaggcgggctgcggaggtattgatggcggcagatttttttcgtgatgtttttgtgaatccctctccattgtatatttttgttatgtttttgtgaataattttgttgttgaggatgttatgaattggatctgtaatgtcaattagatctgtgatgttaatttgatttgggactttggggatttcaatt

SEQ ID NO: 10572 - DNA, 570 bp, Oryza sativa
  ref <308>: DATABASE ACCESSION NUMBER: AK107920
  ref <309>: DATABASE ENTRY DATE: 2002-08-28
gtctcccaaggcaagagcaacgcaaagcaaagaacagatacttcttctctccacctgcctcgcaagcttcttctgtttcttggatctcacctcgccacgccattgacgccataaggagcttgtgagaggtggtagccaagaaggaggaggaggagatggggttcgtgctggtgatctcgctgcccttcatcttcttctccatcctgctcggcttcggctgctacttcctcggcaggcacaagggccgcgaggagatgcgcaccggcgtcggcgcccaggtctacggcacgccgctgccgccgcccggcgtcggagcgccgccgccggagccgttcacggcgaagaaggacggccccgagaatctcgtctgatcagcctcggctgctgctgctgctgaatcggctcatttctttttcttgctatactgtactgttcgtgccgcggtggtgtacatgaagtggttaatttggttgttcttcatgttgagttcagtgtgataatttgtaatcacaatctatgtgtttctttttttcttttggcaaaatgggttcgaatccaaaatttgtaatc

SEQ ID NO: 10573 - DNA, 502 bp, Oryza sativa
  ref <308>: DATABASE ACCESSION NUMBER: AK107921
  ref <309>: DATABASE ENTRY DATE: 2002-08-28
aggaaggtgtcggccgccgccgccgccgccgccagcgccgggctgggcagggcgacgtgctcgtcgacgatgaaggaggccaagttccccgacgcgctcgacctcgcccccggcgccaccgacgccgagggccccgccgcgacgcgggtctgcccctacacctactgctccctcaacggccacgcccactcgccggcggtgccgctccggagcttcctcgcgtcgcgccgccggctcatcaagacgcagcagagcatgaagctcaggggcgtctccgccttccgcaagggcgccgcccaccagaggccggaggacaccaacggcgctggcggcggcgcgagggtggcgccgccgccgccgctcatcgacgaggaggcgctcggcgacttcttcgtggaggtgtacgccggcccgcgtgtgagcacggacatgagctgcagcgacatgtccctggacgagatggacgccacggaaaaaaaaaaaaaagaaaaagaaaaaaaag

SEQ ID NO: 10574 - DNA, 785 bp, Oryza sativa
  ref <308>: DATABASE ACCESSION NUMBER: AK107922
  ref <309>: DATABASE ENTRY DATE: 2002-08-28
ctccttccttctcccctctcctcacgccgccgccggccgtgtcgccggagtcccaacgatccaggggcttctccgatcggcagcgagacgcgccctcaccctcgtcctcgccgccgccgccgccccatgagacgacgtccgctgtttacctctaaaacacaatgatgtcaaggtctgcactgcttatttttctgctttttgtacttatagtcacatcccagcttgaatggaagcaacaacttgttaatgagttggaatctacgtctcacaagcagaaacatatttcaagtagaggagaacttgtcaaggaaaagataatcttatctcaagaaaagatgattcggctattgaatgagcacatccagaatcttcagcaacaattgctgcaatgccgtgtcaataataggacggccaattcttctggatcttctttgacatcatatattggtgagatccaaaggcagcagatgatggatgattgataaggcgagaagccgacgaaccatgtataacaatccagtgggatgtgcgattccagatcgtaccggtagtcatttctcctagaaatgatgtagtgttagtctgtatagaatagtgatatagtcaaagcaaaggacaaggctttgtcgattaaaagaacattggtttaacaggattaaattcattttctttactcataagtagacctttgtatgtctattcagttattttttttagaacacatgtctattcagttataatttacatatgtgtttacaatgtaagcattatgttgctttgttcat

SEQ ID NO: 10575 - DNA, 596 bp, Oryza sativa
  ref <308>: DATABASE ACCESSION NUMBER: AK107923
  ref <309>: DATABASE ENTRY DATE: 2002-08-28
aacagcaacacaactacgcaagtacacctaaccgcagattagagctagctcaccggagacgagatgttcggccggtctggcatcacggcggcggtgaaggtggaggaggaggacgacgggaagacgccggcggccaagcgtgccggagagtacgtcacgctgaaggtgcaggacaccgacggccgcgccgtctaccgcaccatgcggtggacggagcagctgcagggcctgatggacttctactacgaccgcgcgcatggccgggtgcagcgcggcacgggtcggttcctctacgacggccgccggctgagcggctggcagacgccggcggagctcgacatggaggacggtgatgaggtcgacttcttcgaggagctgatcggtggcgccgcttgatccggatgggctcctgctccatcgtcgatgatcgcgtcgtagcttgttcctggcagttgtggacttgtaattgtgtactggttgtggagaaccagagtacactaggtttggatgataagtgttttttcattttggtgttaagcagatgcgacgcttgtaatttttccagtacttctgtctcatccaagtaatctcgaact

SEQ ID NO: 10576 - DNA, 640 bp, Oryza sativa
  ref <308>: DATABASE ACCESSION NUMBER: AK107924
  ref <309>: DATABASE ENTRY DATE: 2002-08-28
aattggacctggaagcaaagcatcagcaatgggatttcgctgcttctgctcgaaagctcaagctcagctcatcctactgctaccactactagtgctagcttcagcctcgtcatctgcagccaagcagcagcctcacaccgcctgcagcaacacttcaccagcgacggggcagccgccatgctccggccaccgtggtcaagtccctgcgccgccaatcttgggacttcttggtcgtaggcgagcaatcagagctccgcctccgccgcagccacatccaataacgtcgcctacctctccattcccggggcggccagtcccgccaccgccgccatcgccgtgcttgtagccgtcgactctgccgttgcaggttcagtagaattcagaactttcaatcagcaagaaagttccatggatttactctgtttcagcgcacttcagctctcggcccctcccaggctctcaccattgtaaagtacgttctgctcgtttctgtcaagactcaagaccctttttttctgctcatttcgaacgagttagaagatcacaaggtttgtagtggatctttcgttttttttctatttttccggaagatgttttgtaattttaatctttactcctgagtacagtctgattatcaatc

SEQ ID NO: 10577 - DNA, 568 bp, Oryza sativa
  ref <308>: DATABASE ACCESSION NUMBER: AK107925
  ref <309>: DATABASE ENTRY DATE: 2002-08-28
ctaccacgggccgccgcgcctcccaccctcccctcgcctctcctctccccaccgcgtggcgcagtggcgtcgcttcctctcccccaccggcgctctccctcaccccccaccggcgctccctttcctcctcgtcggggtgccgccgccgcccccctcctctcaagatccggtgggtcggcggctcccgacggcgcggcaagtcagcggctccatggcggcgcggttgatctccggcgtagcggcgacgcggcggcgcggcagctccccagcgcaacgacgcgtcgacggctccccggtggcagcggcggctcaggatctagctcccgagcttggcacctccacggcagcgaggcggcgaggtggtggttcggcgaggagcagcggcgcctccggctcgaccttccctctcctctcctcatcttcttgtgttgatattttgtctcgttgatattttgcgatgattccgattgggattttgtttttgtgttggattgcgatgtgatgatttgggatttggagaagcaaagcgagggttggggggtgctcggctgctccccttttcttttcc

SEQ ID NO: 10578 - DNA, 823 bp, Oryza sativa
  ref <308>: DATABASE ACCESSION NUMBER: AK107926
  ref <309>: DATABASE ENTRY DATE: 2002-08-28
aacatcaaagctacacaggtagaatcatcgaccgtaagtaagtactactcctacgtacattaagtgtgagcttgattaactatggaggtatccaagctggccattgctttggccatggtagccgccatggcactcccctcccaagctcaaaactccccgcaggactacgtgaggctccacaacgccgcccgcgccgccgtcggcgtgggtccggtgacctgggacacgagcgtgcaggcgttcgcggagaactacgccagccagagaagcggcgactgcagcctgatccactccagcaactggaacaaccttggcgagaacctcttctggggttcggccggcggggactggacggcggcgagcgcggtgcagtcgtgggtgggcgagaagagcgactacgactacgcctccaacagctgcgcgcaggggaaggtgtgcgggcactacacgcaggtggtgtggcgcgcgtcgaccagcatcggctgcgcccgcgtcgtctgcagcaacggccgcggcgtcttcatcacatgcaactataagccggccggcaacttcgtcggacagaggccttactaagttatttatacacacgggcgtacgtactggctagtactacgtatagtagtgaataaataaagacgtgaaaatgtaaacaggtcagtgtctgatccacgccttcacggtccataccgaggattctataaagcgtcatgtcgtacaagtaaaaataaatagtactccctctgtttctttctgtttcaggttataacacctattaactttggttaaagttaaattgctttaaatttaactaagtttgtag

SEQ ID NO: 10579 - DNA, 490 bp, Oryza sativa
  ref <308>: DATABASE ACCESSION NUMBER: AK107927
  ref <309>: DATABASE ENTRY DATE: 2002-08-28
acaagattgcattatttagctaacatcgcaggccgccgctgactgctcgttcggcaccgcgttcgcgccaatggtcgccgtcggctactgatgagtggctgagcgcgttcatgtctacatcaccgtgctgggcatgaaggacatgaagccatggagcagtagcaccggcgacagtgggcgagcgaaggaggagcggcaacggcaggcgagcctgggaggagcagcgacagcaagcgagcgcggtgggcggagcagcgacagtgggcgagcataggaggagcggcggcggccgcgggcgaggttgaaggcgacggttgagagcagagagagagagagagagagagagagaacgagagagggagaaaaggataaggaagaaaaaagaaaaagaaaaaaaaatcaaagggtagatctgtacttacacagctgtttctctctccaattcttccggatataataaaataatcccgagggtgtccagtagctaatt

SEQ ID NO: 10580 - DNA, 681 bp, Oryza sativa
  ref <308>: DATABASE ACCESSION NUMBER: AK107928
  ref <309>: DATABASE ENTRY DATE: 2002-08-28
atccgcttcttcccccttcggatcgagaaaaaagcgaaaggacctcttgaccccccaaccacaccgaggccgccgcggaggaggaggaagaggaggagatcgaggatgtttttcagccgcttcgatccgtggccggtgttcttccggagggagtggaagcgctgctggcccttcctcaccggcttcgccgtcaccggcgccatcatcaccaagatgaccgccggcttcaccgaggaggacctcaagaactccaagttcgtccaggcgcacaagaagcactgatctgatccgtgcctccatggtaaatccccccgcgcgcctccttcctcgatctcgtctcccctccggctgagatctggttctttccgctgtcctgcggtagatctggtttgtagaaactatttgggggttattattgtttgttcctgctttaagctgggcatggtatggtgtgatttggtttcgatttgaatcgaatcgctaggattgcagcaacatcacttcccgcgaaacgggagagtaatttggggggaatcaggagataggattaggggggaaaatgtaggaatcttctggcggcacattctctatgatgtgattattaattagtccatgaaggtgaggattaggcaactttgctcatcgatattgctccgtgatcaagatagcctaagttttctg

SEQ ID NO: 10581 - DNA, 582 bp, Oryza sativa
  ref <308>: DATABASE ACCESSION NUMBER: AK107929
  ref <309>: DATABASE ENTRY DATE: 2002-08-28
tctagccaagaaatcagactggacgaccggccggcgccacgccggagttcgttcacaagttctcgccggtgagcctgcgttcgatgttgaaaagacgaggagtggctgcgcagcagcgggcgccggaagcgatggttctggcggcggtgctcctcctgatgatcgcctacggcgtggcccggaacgaggcggcggtgcccgactccagtctctcctgcctctccatgcctcgccaacaagacggcgcgacaactccaaatcggcgttccttatccgtgcacccgtcgtgctgcactagtagccccccgccgagctgctataaacctcaaccctgcccaccgtcctaatcgaccgaaaaggccaaaatatatacatacacaaaagttaccatatatatttcaagatcggtggaagtacttacaatatatattaacgtgttgtgtcatactatgtcagaatttacaagctagcctactactccttccgttttaggtttttaagacgtttttaactttggtcaaatttaaagcattttaaatttgactaaacttatagacaagtatagtaatatttataaaagag

SEQ ID NO: 10582 - DNA, 724 bp, Oryza sativa
  ref <308>: DATABASE ACCESSION NUMBER: AK107930
  ref <309>: DATABASE ENTRY DATE: 2002-08-28
aacaattacaataatcatcaagcttcttcttatgttcatccaaatccacagccataaaagtagccatacttgagtttaggtagccagcatgcaggccgggaagaacgcgatgcagtcgaccaaggaggccgcggcgaacgtgggcgcgtcggcgcgcgccgggatggacaagtcccgcgccgccgtgcagggccaggtggagaaggcgacggcgcgcaacgcggccgacaaggacgcggcggaggtgaggcggcaggagcgcctgcaggccgccgaggaggagaagcagcacgccatggccgccaacgcagccgccaaggagcgcgccacgggcggcgccggcgcgtaccacccgtcgcagggcgcccccggggtggacccgcgtgcggcgcagccgacgggagggcacgtccaggacggcgtcgccgagagccggccggtcgggacggccaccggcacggcgaggcccagcgccgcccacaacccgcacgtcggcagcgacttctcgcaggcccacggcaccggcggccagtaccagtgatctcattctcatatcaatgtgacaatttatgatctactagtagctgttcatcagttcatgtagagttcacttcgctactatgagttgatggggaataaaattgtacgtgttagaagtggtatcatgttgtgggagatgcttaattatgaaataaaacagagtactctcttcgtttcacaatgt

SEQ ID NO: 10583 - DNA, 641 bp, Oryza sativa
  ref <308>: DATABASE ACCESSION NUMBER: AK107931
  ref <309>: DATABASE ENTRY DATE: 2002-08-28
accgccgccgacgaattccagggccatggcgttgcgcggtgccgcctcccgctgcttcctcgccgccgtccgcggccgcgccgcctccgcgtcgcgcgtccgcgcggctccagctccactcccctccgctccaccacgccgggctgccttctcgccgtttgccgctgccgctgcgaggccgatggcggcggcggcgatgatggggtcgccggcggcggtggcggcgaggctgaccgggcacccgtcggcgagcgtgcgggcgtgctgtgagctctcccagggaaatggagatgatgcatgacgcctgggaggccagtttaaagaatagtgaaggtaattgaggcttgaaaacattactgttccttttgctgctaggatgcgaggtttacagaagctttgtggctcctctgttttttcctgcctaatgggaagttaaaagaaactccctatttttagtttcctagtcccgtagtgaaaacaacagtcaacatgattactacattaataatcctctgttaaccggctactcgttatgttctgtaaaagttgccgccatgctttcatgttctttttactgcataacgatgcaacctgtttcctaatgcggatcatttgaaaatcgtgagaagtgaacataagtt

SEQ ID NO: 10584 - DNA, 653 bp, Oryza sativa
  ref <308>: DATABASE ACCESSION NUMBER: AK107932
  ref <309>: DATABASE ENTRY DATE: 2002-08-28
ctctcggtttttcttcttctcccctccatctccgtccctccccccatggcggcgtcgctccccgtggcacccttcccctgagacggcggtgcccttgccctgagccggcgactcagccgtggtgcctcctctctccctctccttctacatgcgatcctgtgccaaggctgcctggcgagcagtggtgagcagcggccggcaagctaatccttggcgtcagcggctctctttccgtgagacgggcggtggagcctctctgcccctcgcctcctctccctcgccatggggccgcgggagggcttgatcgtggcgtgcggcggcaggcggtggcgcccacccttccggtgggaggggaggcggcggataggggcggtgtccttccctccgccggatctggcggtggggagggcgcagtgggaggggagccggcggtggccaggtgtccctgcgacggtggcggcggttcggcggtgacggcggtagtctccccttagatctagctgcatgggaatttttggataaaatttgtgtgtatatgcttcagttttatttgtgcgatggaattctgaccgggaatttttttttgggggcggggttggggattgtgtgacagaatatcttcagaaatagaaataggaggctttgacttttgc

SEQ ID NO: 10585 - DNA, 553 bp, Oryza sativa
  ref <308>: DATABASE ACCESSION NUMBER: AK107933
  ref <309>: DATABASE ENTRY DATE: 2002-08-28
accgtgtgctcagtgttcatcttctccaaaacttcaatcaggttgtccctctgatctcctgaagaagaatggattcaatccagaggcaggactcctttgatgacttgattaacctcgccgacgatgtggttgtggaggcgcctactctctccagcgaggagatggaccgtgcaaggagggaggctctggagatactgagaaacaactcccctgaagaggctttcaggattttcacccagggtttaatagggcaggtggttcagagccctgtggtgggcaatgctactactcctcctactaccaatcaggccgtgaccgtgagcgtccctcccaaggccggcgacggcgagcccaagaccgcaccccgtcctccgaacaactgaccgagatcgactcgcggccggtcgggtcgagaagcctacctgctcctgcggtgcgtgcgccgtccagctcctctacccgctctgtgcctgagaataatcgtgtctagtgtgctgaacaccagccgtttcctttagagaagttaaaccatgtttgcttgttttggccgccc

SEQ ID NO: 10586 - DNA, 952 bp, Oryza sativa
  ref <308>: DATABASE ACCESSION NUMBER: AK107934
  ref <309>: DATABASE ENTRY DATE: 2002-08-28
aactcacccaacagcagctagccgagccgagccaaccaacggacgaacacctctctggctctctcccccaccgcgtcgtcgtcgtcgtcgtcgccgatggccaaatgcagcaagatccgctacatcgtctggctccggcagacgctgcggcggtggcggtcccgggccgcggcgcgcgcggcggcggaggcggtgccggcggggcacgtggcggtgtgcgtgggcggggcgtcgcggcggttcgtggtgcgggcggcgcacctgaaccacccggtgttcagggagctgctccggcaggcggaggaggagtacggcttcccgtcgggcgcctactgtggccccatcgcgctcccctgcgacgagggcctcttcgagcacgtcctccggcacctctcctcgccgtcctccgccgcgcggttcgtcaccctcgaggacatccagagcggcgccctctcctgctgctgcgccgccgccggcgacgccctcccgctcctccgcggcattgccaccgacaaggccgtgtggtgaatgcgatgtgtgatcccacccctagctagccgctccgctcgccattgcgcgtgcgtgcatgcgcgcgaccgttcttgccaccattttttttttctcttctcttcttgtcctcttttttcccctctccctccatggccatttgagaggagctgagactcgccggagcaagagaaagagagagaaatcggcgaccggccggcggtggcggtgaagtgagatggctgagaaagtcttaggattttgagacggccaagtctagtcatccattcccttgtcaaatccgggaaaattatttagcaccggagatttttattctttcttcttcttcttcttattttcacttaataattcgccagtgtaaataactgtactactgcgattattctgccaccatttcaagtgaattgaaacattctttctttac

SEQ ID NO: 10587 - DNA, 893 bp, Oryza sativa
  ref <308>: DATABASE ACCESSION NUMBER: AK107935
  ref <309>: DATABASE ENTRY DATE: 2002-08-28
actccaagatccaaatctcgcagagctcagctcagccatgtgctgctgctgctgcgagtgcgggtgctacgagtgctacgacgcgtgctgcgaccgctgctgctgcggctgcgtctcctacgacacccgggagaccatcttctactgcgccgtctgcctcctcctcgtcgccgccgtcgtcctcctcgccgtcctcctcgccgcctacggcttcatccgccacgtctccatcaccgtcgagtccgcgtccctcacgcggttcaacctctcctccccgtcggaggccaccgctctcgcctacaacctctcgctcacgctcgccgtccgcaacaagaactgggccatgagcatcaagaacaccaaggacctggaggccgggtacagcttcgacgggcagcggttcgagcgcgtcaagctcgccggcgagggggagaagcacccggcggggaagacgcgggtgtaccacctcgactccagcagcgacaacgcatacgcggcgctcgggaacgccggcgtcgccgagttcaagaaggagaacgcgacgggggtgttcgaggtggaggtggcggtcaccggcgaggtcaggtaccaggcgcactacaccaagtgcaagctcgccgcgacgtgcccgctcaagctgcagctcgcgccgccgggcacgccggcggtggtgttccagaaggtcaagtgcaagctcgccgccgccgacaagaactgctagcgcgtcgccatggctgtgcctaagctttgctagtgattatttatgcgattggtttgtttgttcctctggttcagtttgtgattcaattcctctcgggatttgtggtggatttgaaggaattgcactattgcggtgtttgattcaattcaattcaattctctgatgattgtgg

SEQ ID NO: 10588 - DNA, 637 bp, Oryza sativa
  ref <308>: DATABASE ACCESSION NUMBER: AK107936
  ref <309>: DATABASE ENTRY DATE: 2002-08-28
agagtcgagacatgcagatcgagaattgaattgaatggcggccgcgaaggcgatgaagctgttgcaggttgccgcagcgcttgtgttggcctgcttggcgctgcaggcgaccacggcggcggcgcatttcacgctgggcgtgtccgacgatcactacacggaacgttcgcagttgacccccaggctccacagcgagcccctcttgcttcacctcatcgacaggattaagtaccgacgtcccctccgacggagttaccgcgatgaacaaccaaacacttaatgggaggaagaagatgaacaagagatgggaggagacaaaggaacgatgtcttgttcgttggatgctctgttcgcttgccggagcccgatgcatgattactcccatatatatatatcatcgttccatcactacataagcctttcttttttaaagcctcgattgttcttaaaaaaaagcctcgatcaatgccacgctgcatctggcatagtggcctgggcccaaatctatataaaaaagaagaccatcgataaggtacataatatgcaggtaatgtaccaactgtatacgcgcgcgtgcgccggcacatgtaaggtatgtataactaaaaaaaatatgtgggcatatgtttactttttt

SEQ ID NO: 10589 - DNA, 1039 bp, Oryza sativa
  ref <308>: DATABASE ACCESSION NUMBER: AK107937
  ref <309>: DATABASE ENTRY DATE: 2002-08-28
gtcactcgtcaccatcctccccctttgctttccacgactctctttcgccgcagtctctgcttccgtgcatccatcggcgttcggcgactcggtgtatagtagtattgccaactgtgcgtagcaagctcgatacagcggcgatcatggggttccctctggtgtgctactgcatggcgatccccaagccgctcatcgccttggccaagctcctcgccgccatcagggaggccctccagctgatgctcttcgtcgtcgggatctgccaccacccggagcgatcgggccgcccggctgccgtcgacgccccgctgcccgacgaggtgaaggaccgcctcccgcccctcgagttcgcccagctgctcgcggcctcggagcacggctgtcatggctgcgacgacgacgaggcggtggcggggtgcatcgtgtgcctggagaggctggaggcggatgacgtggtgcggcggctgggcaactgcgcgcacgcgttccaccgcggctgcatcgaccggtggatcgacctcggctggttgacgtgcccgctgtgccgctccaccctgctgccgcgcgcgcgccccgccgccggcccgcgcgggcgactgggccgcctcgccacccgcctcacgggcgtcgtttggtgaatcaatatttggcccgcgcgaccgcgacgcgacacgggatcggttgggtgggagggcagtcgcgccatttcacagcctaagctagcttactgctgctgttaatcaacggagacaaagctctctttccctttcgtttcctttttctttttctgccgaggattatccagctggaggagagtggtacgtgtcggaatgcggtggaatatatcgatgattagacggtaggaacaattaattagaagcaggcaagcagctggttggttggcccggcctggcacctggcatgatcattgggaggttcatgtaattactgcgatgattagatactgcatgtaagtaaatcatgtcatagagataatacacctgtgtacagtggtataatgataaacggttcatttggt

SEQ ID NO: 10590 - DNA, 555 bp, Oryza sativa
  ref <308>: DATABASE ACCESSION NUMBER: AK107938
  ref <309>: DATABASE ENTRY DATE: 2002-08-28
caggagaggagagcaacacagctttctttccctgatcgatcgattactcgaggcgataccgcgttagatcgatcgatcgatcttcgtttagtttctggatggagcggagcagctcgttcggcacgtcgtgggccgaccagtgggactatggcggcgacccgagcccgcgggcggcggcgcggcgggacggccacggcggcggcaagaagcagggcggcgtggagaagaccaaggcggcggcggcgacggggctgaggaaggtgaaggagggcacggcgcacgggttccagtggatcaaggacaaatgccagaagaagaacgccggcggcggcaagaagcagcaggctgacgaggaatcggggatcgctgggtactaggctgtttttactgtcagaccaacgatttggttggttgattaggtagacgcagttttattcgtagggttgtgcttatgcatgtgtgtataataatagttggggcatgccagcttatttgctggattttgtacagtaactttctccgtttcacaatataagtcattctagcatttctcat

SEQ ID NO: 10591 - DNA, 622 bp, Oryza sativa
  ref <308>: DATABASE ACCESSION NUMBER: AK107939
  ref <309>: DATABASE ENTRY DATE: 2002-08-28
ctgatgtgtagttgcagttggagaccatctgcttggcggcttgggcgaggcaggcgtcgcagtcgccgccggagacgtcgccgcggcactgcgcgaggccgtagaagacctcggagcccctgccggccttggaggtggcgaatccgccgccggtgcgcgccttggcgacgaggtcggagacgacgaagttgacggcgcgccgcctggtgacggcctcgctgctgttgagatcgccgtagttcatccacgtctccgagcagaagctgccgatgggatcatacgtcgtcgccgccatgcccagtgggagcaaggcaaccaatgagacgacggcgaccagtaccagctggcttaatgccgccatggatggcgccaattatgtactctcacactctcacttcacctagattcaattcttgctagctactggagtagtagagatcgatcgatgtcgatcagcagatgtaggtggctatagctgggttgtgtgttcgatcgggagcaatggctggagcttataaaggcgaggattggaagggaaggagagagagatcgatgtgcttgcagtatattgcaggggaacatagtagacagacatagtatcacaacccttgttcttgcttgc

SEQ ID NO: 10592 - DNA, 769 bp, Oryza sativa
  ref <308>: DATABASE ACCESSION NUMBER: AK107940
  ref <309>: DATABASE ENTRY DATE: 2002-08-28
atcgcccgcctcgccgcctcccccacttggaagttgcaaagcgaagcccaccaacctcaaaaacccaaaccctagctctcctcgccgccatcccatggcgcgcctccacctcgtggtcgtggccatggccgcgctcttcgccgccgcggcggtggcgcagggcccgagcgcctccccgacgccggctccgaaggcgcagccaccggtggcgaccccgccgactcggccgccggccgtggcgccggtgtctcctcccgccgcccagccgccagtgacgacgcctcccccggtttccgcgcccgcgcccgtgcccgccccgagcgccgccgcgacaccgtcaccccaggcctcggcgccgaccgcggagccccccgtcctctcgccgcccgcgccggctccggggtcgatctcccagtccccgacggaggccccgacgtctccgccgccaccgagcgccgcgtccggagtctccccctccgccgccgccgtcgtcgccgcctgggccgccgtggcagccgtcgcggcgttctactgagatccggctcccggagatgagttcctcgccgccgccgatatcatcaccgccattactgccgttaatttattattgttattattagctatttccccccttcgctctggggttgctaatcccattgcgttttaatctagatctagcttttgtgagtgagagagagactgtgcttgccattgtataatcctcccccaccggattcttttctttaatctactttcggacattattagt

SEQ ID NO: 10593 - DNA, 689 bp, Oryza sativa
  ref <308>: DATABASE ACCESSION NUMBER: AK107941
  ref <309>: DATABASE ENTRY DATE: 2002-08-28
acgaaaccgacctcgcgccgcctcccaccttcccgtttcttctttcttgcgccgcaagaacgcgaatagctttatctaccgccgctctcttccactccggctcgccgcgcgtcgcctgcctcgctcccaccgtttccgtctcgccggaatcctcccccctccgcccgcggatacagttgtccccggtcggtgtcgatatggctactcccttggtagctgggttgtcagtagctgctgctgcaatgggaagcagatatatgctccaggcatggcaagccttccggacccgtgcagcaatgccacgagtgcggcggttctaccctggtggattcgagagagaaatgacaagaagagaggcggcactgatccttggcgtaagagaacgtgctgcattcgataagatcaaggaggctcacaagagggtaatggtagccaatcaccctgatgctggtgggagccaatacatcgcttcgaagataaatgaggcaaaggacatgctgatggggaaaggaaaatctggttccatgttttaatctgtctaaaaggaaacagaattttgtttttgccatgaccatgatgacttgtagtggttcatgttaatcgaccttaacatgctgtgctgattgtaccatagatctgaaccaaaaaacaaatgcaagttactggattgagtaactcaatatcctgct

SEQ ID NO: 10594 - DNA, 464 bp, Oryza sativa
  ref <308>: DATABASE ACCESSION NUMBER: AK107942
  ref <309>: DATABASE ENTRY DATE: 2002-08-28
ctcacttctctgctctgcgttctgcaatgcgggagaggaggcggcggcgacgatggcgtcgcacgaggcggatgggtgcgcggaggagggaggggacgagacccacgaggcggcgacgggggagggctacgcgcgggcggcggggcagccgctgctggtgccgctcaagtgcgggtgcccctcccgctcgcccaatgcatactcgcctatgcagtaccagatcaacgccggcgacaccttttggatcgtctccaccaccaagctgcagaacttgaagcagtaccaggccgtcgagcgggtgaaccccacgctggtacccaccaacctcggcattggccagatcgacatgttccccgccgcttgttcccctccgttccccgctgcgtgttcccctccgtttgtcgccgcagcctggtcgcctccctccgaacgctgccgctgcctggtcgcgggagggcgtcggc

SEQ ID NO: 10595 - DNA, 588 bp, Oryza sativa
  ref <308>: DATABASE ACCESSION NUMBER: AK107943
  ref <309>: DATABASE ENTRY DATE: 2002-08-28
acctgccgcgaaatctgcccagctactgtcgtccatggtcgccgccgccgaatttccgtcctacgtctccgtgccgccgtccgacctgcaccgccacctcggcaagctgctcaccagtggggacggcacggacgtcactctcgaggccggcggcgagacgtacaaggcgcacaggtccgtgctcgccgcccgctcgtccgtgctcaaggcggagctcctcggcccgatggcgcagccgcggagcaccgccgccgccacgccaacgcgcatcaacgacatcgaggcgccggtgttcagggcgatgctgcacttcatatacaccgaccacctgagctcgaccatggcgaccgacggcttcgagcatctcaccacaagctgccctgccattctcaaggagctcatgtccaagcttgttgttcactgaacactgaatattcagcagaagcatattaagtaggatggtgtcaattcagagctagtgtgtgattctactctggagtgtcaaatagctagacctatgtataattatcgtcatctggttcgatctggtgctaatcccgtgtataattattatctgtcatctaggct

SEQ ID NO: 10596 - DNA, 1069 bp, Oryza sativa
  ref <308>: DATABASE ACCESSION NUMBER: AK107944
  ref <309>: DATABASE ENTRY DATE: 2002-08-28
aaaaaaatcatttgcggcttcatttgatcggtcgccgtcagtgaccggccggctgttcgccgcggcggcgatggcgcgccgggtgctggaggtgacgctggtctcggccaagaacctcaagaaggtgacgatgttctccaagatgcgcgtgtacgccgtggcgtccatctccggcggcgacccgcgggtgccgacgcaccggacgcacgccgaccgggagggcggccggagccccatgtggcacgcgccgctccgcttccccatccccgacgccggcgccgacatgcgcgccatcgcgctgcacgtgctgctccgcgccgagcgcgtcttcggcgacagcgacgtcggggaggtgttcgtcccggtcaaggacctcgtcgccgcggcgcccgagggcggcgagcacaggcacctcagctaccacgtgcgccgccccgtcagcggccggaagtgcggcgtgctccacatatcgtaccagatcaccgacgaagccgccgagccggcgtccgccgccggcgcccgcggcgcgtcgtcgacgcggcatgtcagcgggaagggcctccagctcagcgcgatcaccgcgtacccgtcggccgggcgccacagcggcggccgccgcggcgcggcgcagtcgccaacgctggcgtaccaccacggctcgccctacggcggcggcggcggcggcgcgcacgcgcagcaccaccatcaccaccaccaccattacgggtacggctatggcccagcgccgtacggccatggcgcggcgagtcacggcggtggaggagggatggggatgggggcggggctcggcatgggggtcgtcggcggcgcggtcgcagggatggtgctcgccgacatgctcgccgacggcgagatggacacgcccttggacgccggcatgagctgctgatccatccgtacgtgctgcacgactcttgatgtaattaataataatcaggtgtcacaatgggcattgcactgtttggcagtgacatgaatatatcatggaagtttttatccctttctaatttgcacatatgaatttggaacaaagatctatgtcaaaatg

SEQ ID NO: 10597 - DNA, 811 bp, Oryza sativa
  ref <308>: DATABASE ACCESSION NUMBER: AK107945
  ref <309>: DATABASE ENTRY DATE: 2002-08-28
atccacatctctgtgtatcccatcccatatcattctctctctctcgtatcccttctctctttcccccggcgagtggcggcggcaacgcacggtagtaagcggtggcaccggttggtagagggagggagcaccggtggcagcggcggaccgtggagggagggaggggcatggatctgctgcggtgccggctgtggagggagggagcaccggcgacggtggcaggccgtggagggaggtaggggatccgcgcagacggtggttgcgtatggcggcggtgggagtcagttgcggctgcttcgcggggtagcggtgggaggctactgctgagcggggcggcggcaggacttggccgcggctgctgctgagtgtggtggtggtgggaggcagccgcggctgctgctgatgcggcagcggcgggactcggctgctgctgcgcgtggcggcggaactcggctactgctgctgcgcgtggcggcggtgggaggcggccgtggctgctactgagcgcggcggcgacgggactcgactgctgctgctgtgcatggtggcggtgggaggtggcttctgctgtggcacatggtggcagcgggatgtcggcggttgctggtgtgcgcggtggtggtgggagcgcggattcagctacaactgtgtatatgcttccttgaatttgttggacatgaatttggttgttggttttgactttaactatgtatattcttccttgaatttgttggacatgaatttgttgttgtatttgactttaactgtgtatatgcttacttaaatgcaattttggatcacaaaatacgat

SEQ ID NO: 10598 - DNA, 871 bp, Oryza sativa
  ref <308>: DATABASE ACCESSION NUMBER: AK107946
  ref <309>: DATABASE ENTRY DATE: 2002-08-28
tggtttccccggctcgcccgatgtcgctggtcgcctacggcgcctcgtccgacgaggaagacgccggcggcgagccgccggccgccgcggcggcttctcccgctcccgtcccctcatccttcggacctcggccgaggcctccctctccctcgacgtcggtcggcgccgctcctcagcctccgccccacagccagaatgtttcttccactagttcaagtaatatctccctgcccacaccgtcactagaccttccagatgttgcagatctgttttcttccccttctctgccctctagaggatctacttctatgatggacagcacatcaaggaaacgagaatcaaatggatctgcatttcaagacccacgcagtaaatttccaagggttcaatcgggacaatctcgtggtgccaggatcgctgctgggaacacgttagttccaccacagcttagtggaaggagcaacgttgtcactgaagatatgaccaagttgtttgtggctagacgcaaagagtagtgctgatgtttttgttagcctctaattgtaaaccatcaacgaatctacggcgccccatggacagaaggacctgattggacgatttgctatttgcgaattgtgatctataatcctagacagctggattgggaatgctctcttttttcacattatctagtgcccatgcaattgatgttcacttgtgtttatgagcaatccgtgatatgttaaagcatgtgacagtgttaggagaactagaaacttgtctattcttaagaactagatgttgttcatcatctggttagtaagtagtaatggattactatccgctatgtggcaagttctacctttacttagaaatatgtgcattatagcgt

SEQ ID NO: 10599 - DNA, 1042 bp, Oryza sativa
  ref <308>: DATABASE ACCESSION NUMBER: AK107947
  ref <309>: DATABASE ENTRY DATE: 2002-08-28
agctcggtcgcaagcaccacagaaactgaagttttctcaaggtgaacactgaagagcactgtgggtgaaggatgttgagagcaacgcaactcgttgtcaggagggagaagagcggagctatgggagctctgtgtggtttgggcagccacttctcgactgcctcgagttgccagaggttacccggcaaggtcgcggtgatcaccggcgcggccagcggcatcggcaaggcgacggccgccgagttcatccgcaacggcgccaaggtcatcctggccgatatacaggacgacctcggccgcgccgtcgcggccgagctgggcccggacgccgcgtacacccgctgcgacgtcaccgacgaggcgcagatcgccgcggcggtggacctcgccgtggcgcggcacggccgcctcgacatcctctacagcaacgccggcatctcgggctcctcggcgcccgcgccgctcgcgtcgctcgacctcgcggacttcgaccgcgtcatggcggccaacgcgcggtccgcggtggcggccgtcaagcacgccgcgcgcgtcatggtgccccggcgcggcggctgcgtcctctgcacggggagcaccacgggcatgctcggcgggctcgcggcgctgccgtacagcctctcgaaggcggcggtggtgggcgtggtgcggctggcggcggccgagctggcgcgctccggcgtgcgcgtgaacgccatctcgccgcacgccatcgcgacgccgctgctggtccggtcgctggcgaggatgaacccgggggtcagcgacgagcagctgaaggagatggtggagagggggatgagcgagctccatggcgcggtgctggagctggaggacgtggcgagggcggccgtctacctggcgtccgacgaggccaagttcgtcaccgggcagaaccacgtcatcgacggcgggttcacggtcgggaagccgatggacatgcgggttccacgttgacgagccagagatgttgtctgcaaatgcctccagcaacagatcaataataatttctgcattctatgggt

SEQ ID NO: 10600 - DNA, 967 bp, Oryza sativa
  ref <308>: DATABASE ACCESSION NUMBER: AK107948
  ref <309>: DATABASE ENTRY DATE: 2002-08-28
gtggcattgtgcagttgtgatcggtcgaacaggtggtgggcggcaatggcggcgggcgcggaggcggcggcggagtccatgttcttgccgttcttggcgatgttcgcggctatatacctcgtcgggtacctcgtcgtgttccggcggtggggcggcgcgcagagggcggaggcgtcgagctgcttcgcgtcgctgttccacggcacgccggcggcggcgctcgcgctccgcgccgtgctgtccaacccgcgcggctgctgcgtcggcgtcgccggcgacctcgcggcgcccaacacgcgcgccgacgagctcgccctcgacttcagcacggcctacttcgccgtcgacctggcgcactacctcgtcctcctcccgggcgagcgcctcttcgtggcgcaccacctcgccacgctctacgtgctcgccacctgccgcgccgcggcgcgccgcggcgcctgcgcgctgctcgtcatggaggtgctcgccgaggccaccagcctcgcgcagaacctgtggacgctcgccggcatgcggcgcgccggctcgcccgcggcggccgcggcgcacgcgcggctgtcgctcccgttctacgccgcgtacaccgccatgagggcggtgctcgggccggcgtggttcgtgaggatggtgcggttctactacgcgtcggacggcggcggcggcgccggcggcgaggcgttgccggcgtgggcgcgggcgtcgtggacggtggtgatcggcgccgggatcgtggtgagcgtgctctgggtgagcaacctgtggctggaattcttcagagaaaacaaaagaaaagagagcagcaaggagcagtgactgcatttctgcacttctgttgaaattttttttgcatgatttggatggatgcaattttacaggattttcataagaatcaaactaattcatgtgaaattcttgtaagatcccttcgttccaaagtatactcatttag

SEQ ID NO: 10601 - DNA, 722 bp, Oryza sativa
  ref <308>: DATABASE ACCESSION NUMBER: AK107949
  ref <309>: DATABASE ENTRY DATE: 2002-08-28
atcgtcgtgaattagcttaggttatactagctgccaatggcgtcgtcgggagtgggcggcgtgccggggtcgccgtgcggggcgtgcaagttcctgcggcgcaagtgcgcggcggagtgcgtgttcgcgccctacttctgcgcggaggacggggcggcgcagttcgcggcgatacacaaggtgttcggcgccagcaacgcggcgaagctgctgcagcaggtggcgccgggcgaccggagcgaggtcgccgccaccgtcacctacgaggcgcaggccaggccgcgcgaccccgtctacggctgcgtcgcccacatcttcgcgctgcagcagcagctggcgacgctgcaggtgcaggtggcgcaggcgaagacgcaggtggcgcagacgctggcggcggccggcatgctgacggctgggaaccctctcctccagcatcagcagcagcagcagcaggcgtggcagattgagcacgagtcgacgatgacctcgacgcagagctccggctgctacagcgcgccgcgctccgacgggtcgacgtcgctgcaggacatgtactgcttcggcgagcaggaggaaggcagctactcaagatgaaaacgaaaccaaaaaaacaaaagtttcttcttaatttgcagctttcgtttgcttcacaagtatcataagttcagattgtaccatgacttcccttcttgagcttaatttcgctggaaaagcactgtgtc

SEQ ID NO: 10602 - DNA, 719 bp, Oryza sativa
  ref <308>: DATABASE ACCESSION NUMBER: AK107950
  ref <309>: DATABASE ENTRY DATE: 2002-08-28
acttcacccccaacaagcatcccgaccaccaccaccccccgctaccccaggagagattcacccgcaatgtccgacgaggccaccaggcgcttggccgggggcggcgggggcggcgcggcgctgagggcctcctccgacgtcgaccgcaagccggccgccgcgggctccccgcctcctggcgccgccgccgccgcggggcacaagatccagctcaagagcgccgacatgaaggaggagatgcgccaggaggccttcgacatcgcccgcgtcgcgttcgagaagcacaccatggagaaggacatcgcggagtacatcaagaaggagttcgacaagaaccacggccctacctggcactgcatcgtcggccgcaacttcgggtcctacgtaacacacgagacgaactactttgtgtatttttacatcgattctaaagccgtcttgctattcaaatctgggtgattggcgtagctaatatcccctgcgcttgttgtcttgtatgcctctttcctccgcgttgtctgcaaccaaagctggaagcctggaattctgagagcctgcatgttgttgatgtatcagccgcggatcttttccatattccagcaaatgtgagattagattgtgtgtctattttacgtctgatacatctaggtggtgtcctgacattgccttattgtaatctgattgccggaaagtcagacagaggttgtcatcaacaaggt

SEQ ID NO: 10603 - DNA, 1026 bp, Oryza sativa
  ref <308>: DATABASE ACCESSION NUMBER: AK107951
  ref <309>: DATABASE ENTRY DATE: 2002-08-28
ctcaccgcgagctcagacacctcaaatccacgcacgccgccggcgaaaatggccgtctacatccgcctcgacgacgccgtccgcgcgcggctccgcggggacgccgggtcgtcggcgagcagcggcagcgagcacgaggcctccgcgtgcctgtccgggctcgtgcaggcgtttcttgagacggagggcgccgcggcgggagaggacggcgccgggccggcgagcaagggcggcgaagggtatgactccgatgatggcgacggtccggaacgcgcggcggcggcggcggagtccgtgagggagctgctcgacccgccggtggaggaggacccgttccgggtcaggctggctgctgccgtggcggccgcgatggaggcggagccggcgctgaggaggtacggggcggcgttccggcgcgccgtggcgcggcggctgcgggccgccgggtacgacgccggcgtgtgcaagtcgcggtgggaggcttccggtggcatcacggccgggacgtacgagtacgtcgacgtggtcgcgccggcggcgagggggcagaagagcaggtacattgtggacgcggacttccgggcggggctggaggtcgcgcgcgcgacggcggagtacgccgtcgtcgtggccgccgtgccggcgtcggtggtggtggcgcgggaggaggccgtcgggcgcgccgtgcgcgtcgcggccgacgcggcgcggcggtcgctccgttcgcacggcctgcacgtcccgccgtggcgcaagacccggtacatgctcgccaagtggctcggcccctacaagaggtcgacggccacctcgccgtcggccgccggagcaatgccgatgcccgccgccgccgccgggatggacgtcaagtgccgcgccgtcgggttcttcacgccgccgccggccgctccggcggcgaggatcaagtagactcggcgatgaaacatcataatcaaggcattaattaacggtgtttgtagatgtagagattaattagagcgagagttcctttcaactttgagttgc

SEQ ID NO: 10604 - DNA, 892 bp, Oryza sativa
  ref <308>: DATABASE ACCESSION NUMBER: AK107952
  ref <309>: DATABASE ENTRY DATE: 2002-08-28
acccttctcccctctccaacccttcgcctccgcgtcgagccgttgaccagcgactccggcgagcaacctcctcctccgccgccgccgccgttagctccgccatgtcaagcggcggcaaccaggagaggacctgctgcggcagcctgttcaccttcatcgtcaccggcggcttcgtggtgctcatctactgggccatcttccagccccaccacatccgcgccaccgtcgcctccgccgacctcaccaacctcaccgtcgccggcgccgccgtctcctacaagctcgccgtcaggctcaacctctacaaccccagcctccgcgtcaacatctactacgacgagctcgactccgagctccgcttccgcggcgagcgcctcggccacgccaccggcgccaccccggccgagttctaccagcggcggaagagctccgacgacgtgacgtttgagttcgccgggacaggcgtcgccgtcgccggcgacgccgccggcgagctggggaaggagaaggggaagggcagcgtgagcctggaggtggccgtcgacggcaaggtgaggtacaggttcggcagcatcaagatccggcagaagccgaggatatggtgctcgctcaccatccccgtcacggccgacggcggcggccgcctcgactccggcgaccggtgtagcgtcaagtactagaggagctagctagctagtgggcaatgatttgagtgtattaaattgtttttctttctttcagatttgtgagccacttgttgatttgtttctgtgaaaatacattcatatttttgtatttttttttgggtgtagggtgtcagtgataatcgttcgttccaactgtattatgtgatactactatccttgaatttcaatctacaattttttgaacg

SEQ ID NO: 10605 - DNA, 905 bp, Oryza sativa
  ref <308>: DATABASE ACCESSION NUMBER: AK107953
  ref <309>: DATABASE ENTRY DATE: 2002-08-28
ctttttctatcttcacctcgtcctcccgtcgtggcagcggcatcagcggagcaggcgggtcccagccctcgtctctcctccctcctccctccggcggccatcggctccaggtcgtcctcgcagcggcgatgcgcgccgttcatcctcacaggggcggagcggcgatggccaggcggaacgctcccgccggcggcttatggcgcggcccatcctcgcgacggcgttgctcggggcggagtgcgcccgctggcggctcgcggcacgactccttgcgacggctgtggtcggggcggagcggcggtggcaggcggagcacacccgccggcggctcgcggcacagttcatcctcgtggcggcgatgctcggaacggagcagcgggaactgcgacgaccgcgctccaccgcggactcgccccgccggccgcactccgccctgacgccactacgggcccactacgcctcctccccgacggcgcgctccgacgacgctccccgacggtgctccccgacggcgcgctccgaccgcgccccgacggcgctcccgccccgccgcgggagctccgcctcgccgcaccagctccgcctcaccctggcccaccgcgcgactgcgcgagctccgttccagtgttttgcgtcggtagagagaggaaacggatatttgcctagcgctttggccgctacccaatatacgtatcgtatttgcctctcccgttggaggctgttttttttacccaaaatcagtgtgcacgacggataaatgagtatgcgtcgcgttgttggagacggtctaaaacgtttttaagctctgttgtaatttggcagaccagtggactgaacctgaaacgcacacatgattaattggtgtgtgttcagtcaaaaatactgtttggttgatgttttcagtc

SEQ ID NO: 10606 - DNA, 945 bp, Oryza sativa
  ref <308>: DATABASE ACCESSION NUMBER: AK107954
  ref <309>: DATABASE ENTRY DATE: 2002-08-28
acccaaaaccggcgaaccacccgcccgcccaatccccgcctcaaataaccccccctcgccgtggcccccacccccaacaaactaccaaaaacgaaaaaaaacgtaacaaatccgcacagccacacgccacgccacgccacggccaccgccgccgcgcgacgcgacgcgaacccggagaaaacgggggcgaaggaatccgccaccgcaatggaggccgcggcctccccgtcgccgcccccttccggggcgtcgccgctgcggctcaacccggccgcgttcctcctccgcaccaccaccaccaccaccaccgtccagccgaccacatctgccgacgcgcccccgcccccgccgccgacgcggcagacggccggggtcgaccggctcatctcgttcctctcctccctaatcccccgccgcgggcagcgggcgaagcagccgaccagcccccctcccaccgccgccatctaccgctccatgtgcatcttcgggctcaagacgatactgataccgtaccgtacgaacctggtgcggctgcaaaccgggccgaattacgccgacgccttcgccgatttcgtcaagagggtcgcctcgtcgtcggggaggccgaccggtggcaacaagcagagaatgtgagagcatttgtgatcacaatggcgcaggatgaatccaactaattggaattggatattcagccattcaggtcgtcgtagtagttgtgtatagctcaagttttgattcgaacccggcgaggcggcgtcgcggcgaggggattgtttgtatcctgttctaatgggtattagttgatgagaatcttgggatcttcactgtgaatatagcttagcacatgatttattatatcaaaatgtagcctcccttgatatcaaaattcagaatcaatggatgcaagtttctatttctgaaccaaaatggatcaagttctatttc

SEQ ID NO: 10607 - DNA, 815 bp, Oryza sativa
  ref <308>: DATABASE ACCESSION NUMBER: AK107955
  ref <309>: DATABASE ENTRY DATE: 2002-08-28
agcgcgccaagccaccacatcacgttcgcgcccaagcgagggcggcgaccgatcgtcgaccatggcgcgccgccgcctcgccgcggcgacgacgaccgtgccggcgatcggcgtcctcatcctcctcctcgcattggcgccgtcgccggcgacggccacggtgcccgcccgccgcagcgccgtgtcctactacgcctcggtggagaaccgcctccctgccgcggccggcatggagctcgtctgccgcgcgctcggcccgggattcgacgtctacccggagctcagcgtggtgccgcgcggccgcgttccccgcggcggcgcgcgcgtcgccgaggtcctcatcgagccggggcccgagcgggtcgcttgggtgctctgcagctggggctacgaggggaactacctcgccaacctgaagctgttcgacaccgagtggccggaggcggcggcgtgccaggacccggcggcgagcggcggcgagctgtgccgcctcgtgttcgaggacgacgcggtgtccgtcgtggcgcccggcggcgagcggcgcgtcgtcggcgacctgccggtgaagcgctgccggcgacactggctgctgttcagcaccgggtgcacgtaccccgaccacccaaacccgtacgccggccggctcctccgcaacgccttggagttcttcgccgtctgaagaatctgacggactgatcagatttttttttgtaataaatttctgattagttttgttaggatttagatcagaagcatcccaaggtgtcgatgtttgcgagataaatcaaccaatttcgtatggattttggtgcctt

SEQ ID NO: 10608 - DNA, 639 bp, Oryza sativa
  ref <308>: DATABASE ACCESSION NUMBER: AK107956
  ref <309>: DATABASE ENTRY DATE: 2002-08-28
aggaggaagaagaatagaagcagcgggtgttggagttgggcggcgatggcggcacgggtagcgctgcgccgcgcgttctcggcggcggtggcggcctcgccgtctccgggtctgggtgcgacggcttcaccggtagggtttcagcacggacccctcctccggcgcctcatcaactctgatgcatctgctgccctaaagaacaacaagcatggcttttcttcagaatctagggatgctcgaatggatatcaagaggcgttgtgagctgaaggaacatgagtttttccatctagttgaagaggccttgaaaaccgctgatccagtaaaggcacgccttgtttttgagaagagaaaagagttatctgacctggttcgtgagtacaaggccaactcagggctcaagacagcaaacagacgtttgaacttggctgtgattatttcagccgttgtttcaggctacttcgttgccggcatgatcgcgtcgaattgacgaagatgaggtttagaagcaccggcgatcgatatgagaaacatgcaaccaacctttatgattatccttggtaatgtgtatgggcagctgttgtgtataattaagcaccttaagttatccaactctaatgtagctagcttctgttgaacc

SEQ ID NO: 10609 - DNA, 819 bp, Oryza sativa
  ref <308>: DATABASE ACCESSION NUMBER: AK107957
  ref <309>: DATABASE ENTRY DATE: 2002-08-28
aacacaacacagctcacggtttcgtctcgtttcaggaaaaaaaaatggatcgcctcacgtctcgtcccctcgccatcatctccatggaccacgccgacgacgaccaccgccgacgccgcggccacgttccgccgccgccgccgccggccgcggcggaggcggaagaacgcaccggcgactccgagtacgacgacgctgcagccgccgtgtcgtcgtcgtcgtcgctcaccaccggcgagggatcatcggtggcggatgacgacgacgacgacgcggagtcctgcagcggcggcagcggcggaggatacgggaggaagaacggcaatggccaatacgtcgtcggcggcggcgaggaggaggagggcgtggagagtgcggtggatgagaaggccggtgtcatgatgacaccggtgccgtggtggtgctgggcggcggagaaggcgccggtgacggcggcgaaagcgaaggccaccgacggcggcgctcgtcgtgcgccgccggcggcggaggcggtggaggactccggaggccacacggccgagagcaacaggctcttctgggaggcctgcattgcccatggctactaatagtttttttggattgattacgtgcgaataattcagttcgtgccaatcagcagtaatccatatgtacacagctagctagcagctttggatttgtttcccaattgtacaaggttgcatgagatgagagtgatgcagaacatgcatgcttcactggtcaagatcttcaaaagattcaggacatgtaagagcaaatccttttaattttgttgcactgaattgtaggggttaaggt

SEQ ID NO: 10610 - DNA, 560 bp, Oryza sativa
  ref <308>: DATABASE ACCESSION NUMBER: AK107958
  ref <309>: DATABASE ENTRY DATE: 2002-08-28
atataggagggtgcgcatgcgcggctggtggcgagccgagccggcacccggcagatcgggcgcgcctcacgtctatatagacactcacgggggccgcgtcgtctccatgccctcaccctcgcgcactcccattcccatcctccacatcccgcgccatcgacctcctctccccgggaccgcgtcgctcgcgcgttgcctccacctccagtagcaagtatcaatggcggactccggcaagaagcgggacgggtcggccaacggcgccgagaagaaggcgtcgccgacgccgaagccgccgtcctcctccacatccggttcgtcgttcgttcgtcctctcccctccctccttctaggaacacgcgtgctgcggcctgcgtgcgcccatcgcctttttgctttgttaatttctcgtgttcaacgcagcgtttgtttcgtagtacgtcgtcgtagcctgttcgtgatttgccaccgctccctgtttttacaattttgctgtataatcagctcggttgcggtctcgatctcaagattgacactatctcacataaattaattatgat

SEQ ID NO: 10611 - DNA, 1037 bp, Oryza sativa
  ref <308>: DATABASE ACCESSION NUMBER: AK107959
  ref <309>: DATABASE ENTRY DATE: 2002-08-28
aaaaaaagcccaaaccttcaagttcacctttgcttaattgcaccagcttagccgtcatggtgaagcctgcagccgtcctcctgctcctctaccttccccttctcgccaccccgacgaggatcggcctcagccgcaaccccttcgtccctcctcccaactctgtacctaccatagacaggacggagatggacgtgagcacgtcgccgtaccgcgacttgatcaagaaatggcgagacctcgtgctcctcaacactcgcccggaggtcatggtgccggaagaccatccggtgctggctccccagtacgacgacaccgtcccgccggaacggttgctgttgccgaagctggtggccaacggggacaagacggccacgctcgccctccgcgactccaacatctacttcataggtttcgccaacaaagcagggcaatggttctctttcaaggacaggaacgacctgccgccttcctttcgggccaggcctctcagctttggagtggactacgcatcgatcgccggcttccggaaaaaccttccaaactaccctctcggtaggcgtcaaacggagtgggcggtaaaagttctttcagaatacgatccaaatcgcactgatgaagcaaccataaaacgtgcggtagtgatcatccttcttaccttctgcgaagctctcaggttctttcctataagaaatgcggttgaaataggttgggactccgttgcctacattacctcaaccgatgcggatcgtctcgtatgttggggacaaatctcatatatgcttgaatatagttttatgtccggtcattcatgggactcggaggaacaacgtactcgcctcaagaatctagcacgagattgtaaaatctttaacgaacctcaggcacttgaaaccgttgatgtgttagagtacggagctatcttaggtgctaaaagtacaaattggttgtattaatgcaaggtgtaagcgccctcctagctaatataggcgcacttccacaatttatgtactccaatattatgcaactcacatggtgtg

SEQ ID NO: 10612 - DNA, 803 bp, Oryza sativa
  ref <308>: DATABASE ACCESSION NUMBER: AK107960
  ref <309>: DATABASE ENTRY DATE: 2002-08-28
accaataaacgtcgtttcaacagttgagctcaccgcgcaactagcgagcgagttcgtcccgtccgtccgtgttcaagctcaacagcaatcccccggccccgcgtgttcgacgagaaacaaaccaacatcaatggcggcagcaaacgacggagccgacgccggcgacagcaagatccttctgatcagctcggacgggcagcacttccaggtgacggaggcggaggcgagcatgtcgaagctagtgagcaacatgatcgaggacgactgcacggagaacggcgtccctctccccaacgtcgcctccaacgtcctcgccaaggtgctcgactactgcaagaaacacgccgccgccgccgccgccgctgccgaggacgtcgccgtgaaggatcaggagctgaagagcttcgatgccagcttcatcgatgtcgacaacacgatgctgttcggcctgatcttggccgccaactacttgaacgtaccgtctctacttgatcttgcgtgtcaacacacggctgacttgatcaagggcaagacggtacaggagatcagggacacgttcgggatcgtcaacgacttcacaccagaggaggaggaggagatccgcaaggagaacgaatgggccttcgagaactgaaccatttcctttttcttagaagaatttccaggctagtagggaagaagtttgatcggaataaatataaaatctttttcttaatactatttaatgattgacaagatatttagtcatttgttatgtgttgtttactattccctctgttttattttatactatcttcgttttt

SEQ ID NO: 10613 - DNA, 809 bp, Oryza sativa
  ref <308>: DATABASE ACCESSION NUMBER: AK107961
  ref <309>: DATABASE ENTRY DATE: 2002-08-28
attctcacgcaccacccgcgcgccccgcttgatcggagaggagggggtttatattgatttttgcgatcactgcatacgtcgtcttctttgcggatttgagaccgaggatcgatggcggccggagggatgctgtgcgtgtcgtcgtcgccgacggcgtcggcgtcggtggcgagggggcggcggcagcggcggaggagcgtcgaggtgaggtgcagctccgtggcggccgccgggccggggggccccgtggaggatcactaccggactctgcggctgccgccgggggcaccaagggcgaggtcaagagggccttccgccgcctcgcgctcacgtatcatccagacgtttcaaaggagagcgatagcggcgtccatttccagcggatcaacgtggcctaccagatggtgatgggcaacatgagggaggccgaggagaggctggagtactggaggctcaagtacggcctcgacgacgaggacctggacaagtacaggaaccacctcaacgacgaagacgacgatgaatggttcgacgtctaatctgaggatcgtgaatcgctgcctggactgacgggatcaacgagcgcagatgcaaaccatctcgttgatctccatcattgatactagaaatttaatcttgtttatagcactgaaaaatctgttcatttgtatgtatgcctgtatgtagaacagtagtagtagcagctagaactgaaaaaatctgtttatttgtatgtatgcctttcccccggttttattgtaggggaaggggtacgattagactgatatatatataactcaattggtact

SEQ ID NO: 10614 - DNA, 509 bp, Oryza sativa
  ref <308>: DATABASE ACCESSION NUMBER: AK107962
  ref <309>: DATABASE ENTRY DATE: 2002-08-28
cagatgaagcccttgctgctcacgccggccgcgcggctcgcggccgcggcgccgtcaacgctctcgcggctgctccgcctacaaagcggtcgccaccatgcgcacgcctcctcctcctccaaccgcctattgccccctctcctccgtcctcctcgcgacggtttccgcggcggccgcctcatcgcctcctcctcctcctcctcctctcagatggcggcgcctgccgatgcaccgggcggatccgcggacgcgttcgaggtgatccgcgctcaccaggtgcggcccttagcatcgtgatcgcccttttattccttggacacctcactccttgtttgtgatgtccccgaggagcgaggaacctaaccaggcagtagcttatgcaactaggggtgaaaacgattggaaacggttggaatcgctagcatctcttcggaaacgatgcttgatcggccggtaattgaccatatttatcatttaaactacacagtatcgacattaatatgatgcag

SEQ ID NO: 10615 - DNA, 743 bp, Oryza sativa
  ref <308>: DATABASE ACCESSION NUMBER: AK107963
  ref <309>: DATABASE ENTRY DATE: 2002-08-28
aagtcggagtgaactcgcaagattcacgcgaagaagcttaggagaacatcaacaatgtctttggtgctctcgcggatgctgctcgacaggttcttccccggcgccggcggcgtcgtcgccggtgaagcccggccgccgatggactggagggagacgccggtggcgcacgtgttcgagatggacctccccgggctggccaaggaccaggtcgccgtcgaggtggtggacggccacatcctccgcgtccgcgccggcggcgaacacgaggacgccaataacgcagccaaggcggggaaggccagcggcgaggaggaggaggaaaacgacggcgtgaggtggcattgcagggagagggcggcggggaggcggcgcgcggcggacgaggcgagcgcgcggatggcggacggggtgctcacggtgaccgtgccgaagcggaagggcaagaagcggcacgccggcaacggcaaggcggccggcgacgacaagccagtgtgctgccgcttctggccgtgacaccgccgaggccgcggcgcgcgccggctcgtgtgcccgcgtcgcgtcgcgttgagtcacccgcacgacacgagcctgtagtagtacatgtcaagcctacccgtcaaaaatcttgtcctttcgccattggaattgccgtgccagtatggcgcatgagtgcacttgtacaaaatataaattgggcctgtttagttccaaagtttttttctaaacttctaactttccatcgc

SEQ ID NO: 10616 - DNA, 577 bp, Oryza sativa
  ref <308>: DATABASE ACCESSION NUMBER: AK107964
  ref <309>: DATABASE ENTRY DATE: 2002-08-28
ctactatttgccgccgcggcgagtgcgcgggtggagctggacggagtggcggaacgggacgctggagatgtgcgacgcgagcgtgccgtgggagcaagggtgggaggcgctgtttgacgaggtcgccggcgaggaggcggcggcggtgcggcggagggtggcgaccatgggcgcggacgattgcgtggcggaggtggcggcgctcatgacgcgcgccgagcggtgggacgcgcccgcccccgccgagatctgccgcgccggccgcctccgcctcgccactcgctccgcttctgccaatgccactgtcactgccaagcccaaccaaaattgatttgaccatttttttccctcaggaacaccaaaccaaaggcagaaaaggaatagaaagaaagaagagaatacaagttggatagtggtaactgatacatatttttgtacaaatttcatagagatttagctagagatcactgatgaagaatactgaatacacacacagtgtatatagcgtcaaaattcattaattgcatgatcagttgttcgtttcttgtacttacaaatgatactaaaacataaacct

SEQ ID NO: 10617 - DNA, 608 bp, Oryza sativa
  ref <308>: DATABASE ACCESSION NUMBER: AK107965
  ref <309>: DATABASE ENTRY DATE: 2002-08-28
attttatttttacgctcatcgtcatcacacgtcgccgtccctttcggtttcatcatcgatcggtttcatccactatcttcccctccccaataagaattcgatctttcggttctcggtgaaccaccccccgtgttttcttcgtatatagcggatcttctgggtctctgatcctgtgaacttcgggaatttttgtgatcgatcgatcgatccatggcggggctgcagcggtcgagcgagacgttccggcggtcgggctcgtcggggctcgtgcgggacgacaggcacctgtccggggagatcaagccgccgtcgccggcggcaaggccaaggctaggcgccactcgtcgtcgtgatccgtcgagagctagagcgactcatcgtctcatcatctgtacatacatgcaattccccatctgatcggatcatgctccaatccattagtccatttcgtagcctttttattttttcatatagtttctttgcttatcttgtaaattgtttcatgtcaagtaggtgattagcactagaaaactatgacgtgcaagcaactatgaactattaagtatttttcatgtgaacagtgaatgtgtccgtggagtatcatctgc

SEQ ID NO: 10618 - DNA, 823 bp, Oryza sativa
  ref <308>: DATABASE ACCESSION NUMBER: AK107966
  ref <309>: DATABASE ENTRY DATE: 2002-08-28
agctacaccaccacaagcctagcgagcttggttgatttttcgtgtgcgtgcggttgtgtaggcgaaatcctccggttttttctcgtagtttgggatcgatcgatggcgtcgttgggtggtggtggtggtgggcaggggccgcccaacggcagcggcgtcccaaccaaccggccggtgttcaccatcgagggccgtgtcgtggagccgcccacccttaccgcggcgcagctggacatgattaggtcaatgcatctctcgtcgcttggtgtgccacctgtcaacggattctatccgggcgcagtacagtacccgagaggagtgttcgtcccttcaaacgagtacgaggcggcaggggcaactcgggctgccaaaagggccaagcagactgacatttccgctgagaacgagctggccgcgaagaccaccggcaccaccccgccaccagccgcgccgaagaagtgatgcccgcgagatggatacatggcgcgcgcggccggccggcgtcgagctccatcgattcctccggcgaccggccggcgtgcgtgcaggcgaccgacccagcgagcgaacgaataaaatcaggggcgcctccagccgggcggcctctgagcgttactatctactactattagctgtagttttgctattttcagcgtgaagactgcgtgataattaaataagtgagacccggcagaaaccatgcgtttgtgtgtggtgtgtggcatggtggacaactcatatgccggttgatttacctgtatgtactctgtgtgaatgtgtgatcgatagatatgctcgcctgcagtgtgttgtggtttttaat

SEQ ID NO: 10619 - DNA, 566 bp, Oryza sativa
  ref <308>: DATABASE ACCESSION NUMBER: AK107967
  ref <309>: DATABASE ENTRY DATE: 2002-08-28
ctcttcttcttcctagcttcctccccttcctcctcctagttcgtggacactagtacgatggttgggccgatcgtgatagcgtcggcggggctggggatgctggcgggggtggccatggcgaaccggaccatgggcggcggcggcgacgggcggcagctgccggcggcgtcgaggtgggacgcgcggccacggtgcgccacgtgcggcggcagcggccgcgtcgactgcctctgcaaccgctggtccgacggcgactccggctgccgcacctgcgccggctccggccggatgccctgccgcagctgcggcggctccggcaccggcaggccgctccccgcccgcctcatcgcccgcggccaccaccaccaccacaacccgccgccgtcgtcagcgccgggacgaggcggtgactacagctgatgatagccaagccaagaagacaaaaaagtatatatatgtacatgtccatattcatgtgtggatcttgattatatatatacatatatgtatatatgtatcgatcttcatcgtcgatactgcttgctcatctacaagatcgactatgc

SEQ ID NO: 10620 - DNA, 557 bp, Oryza sativa
  ref <308>: DATABASE ACCESSION NUMBER: AK107968
  ref <309>: DATABASE ENTRY DATE: 2002-08-28
accgagagaagtccaaatcctggacgctccgcgaaaaccctaggaacagcacgcacgctgtccccaagcaccaccagcgcctccacgccacgcgcttgcctttgcctttgctccagctcgcgagacgccggggatggagcacgacgcgcacgccccgccgcctgccgcgcaggagctcggcgacgcctccgcctccgcctccgtcgtcgacgactgggcgcgcgacgaggacaccgagccgatggccgtggatccccaccacgccgccgccgccgccgccaccgccactgaggacggcgagggcgtggcggatgccgctcctcccgcggccccggctgaagatgttacagaaattcaatcatcactacagtccttggagttgaagacgaatgctgctgcacatgaggatgctcaagaggtagtagaggaggaaaaggaaacaaagcggcatttgaatgtggttttcattggtcatgttgatgctggaaaatcaactgccggagggcaaatacttttcttgagtggtcaagtcgatgacaggaccatccagaagtatg

SEQ ID NO: 10621 - DNA, 951 bp, Oryza sativa
  ref <308>: DATABASE ACCESSION NUMBER: AK107969
  ref <309>: DATABASE ENTRY DATE: 2002-08-28
acctaatctgcggttacagcgatagtttccccccttccgatgagagagagaagggaacaaaccacctctccactccgctgcttctccccacaccgcgcgccggcgatgccatacccgcgcccgcttcctccgccgctgcactccgcgcccgcgcagcgcgccgtcctctcaacgccgtgcgccagcgctgtcctccccgcgcccgctccgccgctgcccttccagcaccaccccgctggctctccctcgccgcctcgcgccgttgccggatccccgctgtcagggtgccgtcgatacatcgtcgtctagtctccgtcaagccgcttcgcccttgtgtctgcaccgcacctcgccgtcgatcccacgcagtccggccaccgtcgatccctcgccgtctggtttccgtcgacccgcatcagcctagcgccggcaccggatctcctgctgtccggccgcgccgccaccgcgactcctcgctgcccccttcgcaaactcatctggatcacgtctccctcgctgctcctgtctaagacaaaggtgaatttatattgagttccagccggacaactgtgggcgaagaggtaaaaagttaatggctcacgaaggccagcggagactggagtttaacgatgaagcagcggtaagtggaatccctatattccatagccaattagctcctccactgaagacattctctatgtttgttgcccctctaaaatcaacttaggatttttgtaatataaattgatagcggatgcacaacttactatatgtgtgcaatggagcttacgaaatcacaagccatttagtaaaaagattgatatttcagtgtcaatgtatgggagcaaatttgcccctgcagaagtttggttttgtctccaatgcaatctgagtgtagtatctatgatcaacttcttctcaatataatggacaaaactcatgtctttattc

SEQ ID NO: 10622 - DNA, 563 bp, Oryza sativa
  ref <308>: DATABASE ACCESSION NUMBER: AK107970
  ref <309>: DATABASE ENTRY DATE: 2002-08-28
gcgtcgccgcctcgcgaggcgctgccgctattagcgcagggcattcgggagcagcagcgtatcgccatatgatccacccgctgtcgcgaggcgcgcgcaagcaaggccaaggcggtatatgcacagcgcagccagcgcgcagcggccggccgggcggtgcggcggtgtgccgatgcgagggcgtacgtgacaaatcatcgtttgccgcgcgcgccgccggatcggtctgcttactggtgggtggtggcgccttgtgcgcgtaacctcccggaacatggcgagcgaaacggcaagattccaaggcgccgaggtacaattgtacttcggatacgtacaacgactaaaaatttggggcggataatgcgagattgattactctgccaccacgacgtgcatgccggatcgagccacgtcgtattcggttgaggcttggagagataaccttttgtaaaaagaaagctagtgtttgttttgagggatatgtggactcgtgatcggttttgctgatgatttttccttaaaagatgatggtacaaggtataaattaagtcaggtttgtcacc

SEQ ID NO: 10623 - DNA, 784 bp, Oryza sativa
  ref <308>: DATABASE ACCESSION NUMBER: AK107971
  ref <309>: DATABASE ENTRY DATE: 2002-08-28
gcactaccatctaggcctgcgccgacgccggaaacgctgccgctccgtctccggcgccacctttgtccagcctccttgcctcacctagccacgcataggccaccacggcgacgagggagctcagccgcattgctcagcgctggtgatagccaccccgcacacgcctggccgtacgcgtgctgccggccgccgcagcgcctccaccacggtgctggcctccgcagccgccagcctccgccgtcgccggccagccacctccgcacgagctccgccgctgcacagcggaagccacctccgcgcgcctccgtcggccgccgtcgcgcgagctgccaccacctcccctcgccggccgcagccgacgcgctgcccgcctccactggcagccggacgcagagcaccgtcatcggccacatccgcgcccgggggggtcggatccgtctccggcgtgcccggatccgtcgcagccacctccatcgaccgccgcctccgtcgaccaccgccccgtcgacgctgctccgcctccaacgccgaggaagggctccccgaggatgttctccccgccgccgccttcccggccggccgcgcggtttccggcggctggctccggcggcggcgaggcggctagaggccggcgaggtggcggcgcgggcggctagggttttctcccccgagccgcccgcgtgagggcgacgtgagggtcaccatcgatcatcatcacacaactttagtaccatatatgtgctgaatgaaagcaggatagaaataaattggcatttttgttatc

SEQ ID NO: 10624 - DNA, 901 bp, Oryza sativa
  ref <308>: DATABASE ACCESSION NUMBER: AK107972
  ref <309>: DATABASE ENTRY DATE: 2002-08-28
aacttcgtcgcaggtggcttgctaccttcctctccctcctccggcaaaccttctcccttcacaaagtccccaaaaaatcaaccatggctccggatcttctggctgcccgcagcaacaacggcggcatcgaaggccgtggccgtggccgccatcatgggggagaagggcggggcaacgtggggcttgtggcggacaatggcggtgcggtggtgcggacttgggggagaagtcctacggcggtgcagccgtggtggtcgcggctgtagtgctcacgagcctcgcgacggtgagtcggtgaacgcgctcgcggtggtcgcggcatcccagcgctggtgaggctccttcgctgcggcggcgacgacgatgtggcgcacgggagcgccagatgctcccacgaccctgtacgagctctgcaagctgctcatcctccattgatgccctctgcaagctgctcatcctcccggagctgaccgaaggagggaggaggaagaagatgacgatgcctgttggtgttcagagtaatattgtggatttcctttgggttggaaatgggttgagaatgggttgaatccatttgtctgcacttggtttggattggtttgggcttgctctgtgagtggattggattggtttggtttctgcaaactatgaattgaattggattggtttagaagtgtactatagagacaagtgaactggggcggttttggtctggatctcagtccattagcaggcttagatgtaccgaatctagttcattcctctttttaaattgctatccggcagaaaatttctcaatctgtatgtttagctatctcagaactctgggttcagcccatattcgataagattaaacctggtctatctcctgttcttgaattatgtaaagattattacaact

SEQ ID NO: 10625 - DNA, 554 bp, Oryza sativa
  ref <308>: DATABASE ACCESSION NUMBER: AK107973
  ref <309>: DATABASE ENTRY DATE: 2002-08-28
atacgcactgcaagcttagcttggtgaggatcgatcgatcggagaagatcatcagattgataattaaagtaagaaaggtcgaggatgcaggcggtgaaggagaaggtgaaggacaaggtgagcgcggtgaaggcgaaggggaaggtgagcaaggccaaggccgacgagaagaaggaggtggcgacggcgaggtcccacgccgagagggagctggcgcacgagcgcgctaaggccagggtcgccgccgccaagatggagctgcaccaggacaaggccctccaccgcgaggaggccatccagcacaggctccataagcatggcgccggaaccaccgccggcgttcgtccgaccgccgcggcgccggcgccgcacctcccacctgctagctactactagtagctagtatgcacgcatgtctctctgtgctgctaattatcgtaacagtttccactaatcaatctacttacaataaataataagccagccagtgtgcatgtaatctgtactgtgtgccagacaagatatcagtgatatatctatcgaggttgttaatt

SEQ ID NO: 10626 - DNA, 622 bp, Oryza sativa
  ref <308>: DATABASE ACCESSION NUMBER: AK107974
  ref <309>: DATABASE ENTRY DATE: 2002-08-28
acatcaatcaccagctatctcgatcgtgagagctcctcacagcttagcatctctctctctctctctctctttctctctctctgaagatgcctcgcttgctgctcttctgcttggtgtcgagccagctcgccatgaccgccgtgatgggccggccattccctctcttctacggcggcggcggcggcgcggcggcgagcatcgcagatgcgcctactacttcttcttcttcagatggtggtggtggtggtggtcatctactgcatgtgtattctcttctcgagtcgagcttcgcggagtcgccgatgagctcgcaccaccgcaaccacagcccgttcgaccggaagttcgccggcggcaaggtgatactgggcggcctggcggcggccatcttcgccgccgtcttctgctacatccggatcacgaggaggaagaagatcgagcccaaatcttgattactctatcgcatcacgcctcaaaaaagaaaaaaaacaaactctttaatttttttcttttcttacagtgaggagacatgaacaaacgcatgtaaccctcctcatagattcgttgcaaaacactgtaaagaatccattgctgatgaaataggtgacaaatttcctcctac

SEQ ID NO: 10627 - DNA, 1020 bp, Oryza sativa
  ref <308>: DATABASE ACCESSION NUMBER: AK107975
  ref <309>: DATABASE ENTRY DATE: 2002-08-28
aagatcaacccctcatctgtttctctcttccccaaagctcttgctccatctcagaggaaagaaaacacgccgccgccgggtgtcgaacacctggtgggcgggggccgcgccgccgccgcagggcctctcggccggtgtgggtggcagggtgtgttgaggaggtgcccgcgttgctgttgctactgttggaaggagccaggagccgctacgcgagggaggacgagcgtcaaacacctgcaaacgtcgccgaccgtcgtctgcccctgtttcggttgcaccacgccgcgcgccgtcaaactccgccgttccgccacttcgtcgtaagccctcgcgcctgtagtattgcctggacacctagaagccagcggccccctcgatttggggtgtgcgccgccgtaaccgtgccgactccggccgccaccgcgccatggccgagctcatcatggagggacctcgttccaatacaacctaggctagatttttgcttctatatgctccatgtggaccctagatggttgaatcgtcgttggttacgctcacattggtcctcattgtgccgccgccgattttgggatctcggcgccgtcgaccgccgtcgcgccgcgcgccggacgatcgccgcgcttcgccgccgccggcggcgggtctctggtgatgcgccaccgctcgccccaccgtgcgccgagccgttccggctcgggccgtcgcatcatcacgcgccgctcctctgctccgtcgcgagcggaaggaagaagacgacggggagaaagaaaagaacgagagagggagagattatgacatgtggaccccacttcattagtgtacagtaatcctcaaactaatgatattattgtgaacctatgacatgtaggcccggatgcttagaaatctaattaaattggtttttaagtaaatgtctcaatgacatgagggtcccaccaaaggttaaaggtccggcttgacctcaccaacagggggccggacccacctgtcaatgacacagcaggatttcctttaaag

SEQ ID NO: 10628 - DNA, 669 bp, Oryza sativa
  ref <308>: DATABASE ACCESSION NUMBER: AK107976
  ref <309>: DATABASE ENTRY DATE: 2002-08-28
atatatggccactcctctcaaccttctcattgctctcctcttcatcgtcgtctccgttcaagggacaaatggggccgatcgctgcgccgcgtcgagcagcatcgatgtgcagaccatcaacaccggcgaggccgcggccggcggcggcgacacggtgttcgaggtgcaggtgaagaacctgtgcggctgcagcgtcagggacgtccggctcgacggcggcggcttcgcgacgacggtggaggtcgacccggccgtgttccgcgccgccgacgacggcggcgactactacctggtgaacggcggcgggccgatcgccagcatggccaccgtcagcttccgctacacctgggaccacttcttccagatcactccccggagcatggaggaagatcagtgctagctatagctagctacatacacttgggtacatatgcaaagttggagggaataatattcttgcgtgagctaatacacatgtgttgcagtgttagctagtactatatatactaatgttccatgaaaagctaggtcaagtgtggaagaattattcctgcatgggtttatatatgtgtagtacagtggtctaatgtgtactgagtgagggatcgaatattacaaaaaaagtttagctcaataatgtatacggtcttttgcatctcaataaatggt

SEQ ID NO: 10629 - DNA, 606 bp, Oryza sativa
  ref <308>: DATABASE ACCESSION NUMBER: AK107977
  ref <309>: DATABASE ENTRY DATE: 2002-08-28
aaaccctagcttcatttctcatcccttccttctctcttcttcggtggtggctggaggaggtggtggcgctgcctcggggcccctcgcctgggaggtgacagcggtagatgtgggtggtggtgggaggggaggatgcgacggcgtcagagacgggcggtggcgggaggggaggcggctgaggcctcggatgggggaggcggtggcggcggttgcggcagctcgcgcgcgcatatccggcggcgacggccattcgggcgtgctgatctggctacccccctccctggcgcctgcttcttcgcggcgatggtggtggcggcccggcggcaggaggtggtggtggcccggcggcgggacgagatgtggcggcgacctccctccattggatctggagggagggcatgcggcggcagcccggcggcaggaggtggtggcagtggcggcgccctcctctcaatttttttctgactaggccctcctctcaattttgtgaatgatttttgtgaaagattcaatgttagtgaaagattttagtgatgtttttcaatgtttgttgttctgtgatttgtttgttgttctgtgaaagattttagtgatttgtttgttgtt

SEQ ID NO: 10630 - DNA, 745 bp, Oryza sativa
  ref <308>: DATABASE ACCESSION NUMBER: AK107978
  ref <309>: DATABASE ENTRY DATE: 2002-08-28
atgttatatatatcgtgttatctgcaattgctgggatcattccaaactccttgagctccacagatgactggaatctaggaacaaacactgtatctatatccagcagctagcatgtgttctggctcctggaacagcaagaataagatctatctgtctttggttgtattcaggcaggacaatcaacagcagcagcagagaaagcagccggctcatgcccccatggctctcaggaggaagaggctaaggctgaggaggaggagagagaccatgaggagatctgatggaatggagatggagatggtgaacctgaagctctacctggagaacaggtgcatcctggaggagaacgagaggctgagggagaaggccagcgcgctccaccgggagaacctcgcgctgcgcgccgacctgcgcaacacatcgtcgccggcgacgacggcggccgccgcctccagctgctgaactgagcactcgccgcctccttgctagctactacagcttgtgcggtgtttttgtgctggtttgcctataaaaccgtagctttcttggtctcttggtgatcatggttggctggctggttctagctatatattagctaccggtgctatcagctttggtttcttcgtgtcaggccagttatgatcagccagacagccactaggtttttggagctcttctgtgtgttcttgtggcataatgcttgtacattggaagtttgtgagagttaactagattttgtttggct

SEQ ID NO: 10631 - DNA, 904 bp, Oryza sativa
  ref <308>: DATABASE ACCESSION NUMBER: AK107979
  ref <309>: DATABASE ENTRY DATE: 2002-08-28
atctccctctcttcaactctctctctcccctctcctctctcgcggtggagaggcagcggcgctcggcgtgcggcggccggcgggagaggaaggggcggcgggaggtggctctagctgccgcagccgttgagcccacagagcgtcggcgagcgcgcagaggagcgtcgacccggcggcggggggagcggccgcggcgtcgttgtccgcggtagcgctgccaaggcaagcggagccgctggtgcggtggctactgcagccggccgacttcctccaccgatggggcgtcgacatccgccgggctccgtggccacaggacgtccccatccgccgggggatgggcccctcaccgccgcccgtctctccacttgccgacccccgagctcctccgcctacgccgttgccggtcgctggatctcctctatcctctactccaagccgttgccgggtggccggatcccctccgagcctggtcgatggggcctcgcctcatgctgttcgctggggcaccgaggacggcgctcgtcaccggcctttgctccgctccacagctggtcgccaccgtcgacctacgcccggccgggcgtggtccactcttgcgtcgtcacggcgggagcgggagtggcggaggacggcgggagcagcaacaagggaaccgtcttaccccgagcggccacggcgggttagggaggtgggtggtgccgccggtcgccgggctgcggcagcggctggggtcatgtcgtcgcctcgtcggtgagtgccggcgggcgcgggctgcgaggatgcggtggaacagggcggtggaggaaaggggggggggagagaatgacatgtggggctcacgtgggccccaccttttttataatttctatgtgaaactgacatgtgggtcccgcgaggtttattt

SEQ ID NO: 10632 - DNA, 1091 bp, Oryza sativa
  ref <308>: DATABASE ACCESSION NUMBER: AK107980
  ref <309>: DATABASE ENTRY DATE: 2002-08-28
gatcagatcaggcacagcactgcagtgaaatcgatcactagtcgtggtggtatcaactatcaagtgtgcaagaaaaaatggcgggagcagtggcaactgtcagtgtggggctcgcgtggttgggtctcatggccgcagcggcgagcgcgacgcagttcagagtcggaggaggcagaggctggagcgtccccgacgccaacgccgagccgtacaactcgtgggccggcaggatgaggttccagatcggcgaccagctgctgttcgtgtacccgaaggagatggacgcggtggtggtggtggatcagggggcgtacgacgcgtgcaacacgtcgtcgtcggtggccggcggcggcggcggaaggtacgacgacggcaacacggtgttcacgttcgacaggtcggggcccttcttcttcatcagcggcaacgaggccaactgccgcgccggcgagaaactcgtcgtcgtcgtcatggcagaccgcggcggccgccacgcgcctccgccgtcgccgccggctgtgcctcctcccgtcgcgccggtgccgatgccgagcccggcgtcgtcgccaccgtcgcctgcgccagccgccgccaccccgagcttggcgccgtctccggtagctacgacgccgagcccatcgccgtcggtttcacctatggcgccggcgcctgctccgacgacgtcaacaccgagctcgccaccggcgccagcggccatggcaccgtcgccgtcaactacccctggaggcgtggcccagccgccgccgccgccggggaccgatggggcgaacgcgacgacgccggcggcgcccgcagccaacgaccggagtggcgccgccgccgctgctccggtggtggccggcgtcgtcgtcacgtcgctgggagcatacatcggctacgccatgctagctatctgaagctttctgcttctgcagtgacgtgttcttttatttgtgcagtgtaaagttaaatgaaatcgagtggtatattgttacagataccgtagagactagagaggattatctctggatttgtttttgcattggtggaataatgatagtgaaataaaaatgtggttgagtacttgagtc

SEQ ID NO: 10633 - DNA, 550 bp, Oryza sativa
  ref <308>: DATABASE ACCESSION NUMBER: AK107981
  ref <309>: DATABASE ENTRY DATE: 2002-08-28
ttaaacctgccggatcgatccgatccgatcacgacgggagaatcaaccgggatcgcaatggcgtcgaggagagccgcggcggcggcgctgctgctggtcgcggcggtggtggcggcagcggcggtgggcgctggcgcggagggggaggagacgaccggcgacgccggcgagctggactgcttctgcgactgcatgaagaaccagtgcatgacgctgggcgcggcgcccaacaagttcgactgcgccgacgcctgcacccagggctgcacgcagatcggcaagccgggccagcccagcgacaaggacttctgcggcttctgatccgaccgatcgagccccgcctcccagccccagcccacggtgccgagaaggccggacggtctcggtggtccggcccatctgccgcatcagttttctgttcttctgttttttttttttgaacatgttaagaattgtatacgagatctgagggtttaaaccacacacccttcgttgtattatcaagtacatctctatgcgaatcattccttattgggccgtttttgagggt

SEQ ID NO: 10634 - DNA, 494 bp, Oryza sativa
  ref <308>: DATABASE ACCESSION NUMBER: AK107982
  ref <309>: DATABASE ENTRY DATE: 2002-08-28
ctctaaggcccgagtccctcgggccgatccgggcggaagacattgtcaggtggggagtttggctggggagcggcggcgtcgggggatcggaagggaaccccggcgggacgtcgtcgagagcgggggccatgggcgccgccgggaaggcgtccggcatggacggcggcggcggggcgcgcgcgtcgtcgcggcgcttgagcaggtactggtccttcttcttggccctgggcttcatcgccgccgcgctgggcatgatcttctccatgagcctcgccgccgtgctggccgcgctgcccttccggcggcggccgccgggattctccgccgccttcttgcggcccttcgccggacgacctgcaaacgcatcgtagccacacatcaagaccaagtcaacgcaaatggttttccatttttatatatatgaaatataaaacaacaataaactaatttaaatattgtgattgagctagtggaaattatatcaacattaaaat

SEQ ID NO: 10635 - DNA, 630 bp, Oryza sativa
  ref <308>: DATABASE ACCESSION NUMBER: AK107983
  ref <309>: DATABASE ENTRY DATE: 2002-08-28
aacacagttcatcggcatcttctcacactctagctcacagcttcgcggtttccacgcacttgaaaactcacgtttccaagccggaaaaccatggctcgcttcgccgtagtcgccgccatcgtcgccctcctcgcggtcacggccgccgcgcaggccccgggagcggcccccgtcccggcgcccaagatggccccgctgcccgctcccccggcgaggtccccggccaccgcccccgcgccggtcgccaccccgcccaccgccgcgtcgccgtcccccatggcgtctccaccggccccgcccactgacgcccccgccgccaatgccccctccgccgtcaccccgtccgcggtcaccccctcctccgtctccgccccgaccggcgcccccgctgcctcctccacgtacaccgccaccgccagcttcgttgccgtcgccggcgcggtcgccgccgccatcgtgttctagatggatggatggatgatttgatcgacgcgttgtttatacggcgagattcttttttgtgattctgttctatttacagacagcgagacactgatattcagatgtttacacttgtcatgtttgatgagatgattatcgatggaatatattctttcatttattattacc

SEQ ID NO: 10636 - DNA, 956 bp, Oryza sativa
  ref <308>: DATABASE ACCESSION NUMBER: AK107984
  ref <309>: DATABASE ENTRY DATE: 2002-08-28
gtgagtttcagaggctaaaagctagctaggtgtagatagcttcttgtgatatattgcctctgcttgccatggcggtagctcaccttcttatccaactcatctccatggctggcaatggtgttggagcctgcagggtgcagattattccggccattatctttcttcagctcctctttagagctcttggcgcggatggcgcgtcgtcgttcagcttcaccaacagctgccagtatccggtgtgggtgggcgtgctccacggcgccagctcgccggcgctggcgcgctccggcttctacctcgcgccgtcgggcacgtaccacctcgccgcgccgtcgtcggggacatggtccggcacgttctgggcgcgcaccggctgcgccgtcgactcctccaccggccgcttcacctgcgccaccgcggactgcggctccggcgacgtcgcctgcaacggccgcggcccgtcgccgccggtcacgctcgccgagatcaccctcgccgcgccgggctccggcggccaggacttctacgacgtcagcctcgtcgacgggttcaacgtgccggtgcgcctcgcgccgtcgtcgtcgggcggcggcgggggcgactgccacgccgtgtcgtgcgcgggcgacgttaacgccgcgtgcccctccgacctccgcgtcgtgtccggcgccggcgccgtcgtggcgtgccggagcgcgtgcgacgcgtaccggagcgcgcgctactgctgcaccggcgcctacggctcgccggcggcgtgcgggcccaccgactactcgcaggtgttcaaggccgcgtgcccggcggcgtacagctacgcctacgatgacgccagcagcacgttcacctgcttcggagcatccagctatgacgtcaccttctgccctcgatcttaattacaatgtgattgttgctatataagttatatgaaactatatcatcaattcatcatt

SEQ ID NO: 10637 - DNA, 518 bp, Oryza sativa
  ref <308>: DATABASE ACCESSION NUMBER: AK107985
  ref <309>: DATABASE ENTRY DATE: 2002-08-28
agcatatccttcctgactagcaaaaccctaccctttcacccgatctggacggcgcggcggcggcggccacgctgaaggcacggcggcgacggccacgctgaaggcacgacggcgacggtggcccctgcgcggcggcggtggcggcggcgacggcggcccctgcacggcggcgacgacggcggcccctgcgcggcattcgagaagctttggcttgcgctggaccatgctagcacaacaaatccaaccaggcggcagtacgaatggtccagatagagcgaaagttgaggaagacaaaatgaaacttgaatttgaaatggccgccaagattttggcttgtaaagcaacatataagaaaaaaattacaaagctaaacaaagaggcagaccatgttaaaagttggttcatgggttccctacttgttattgcaattcttatgtacaagatcttggagtatatgtacgaactgtattgttatgaatgcaattttttttttctgaaatctcaaataaattagaacc

SEQ ID NO: 10638 - DNA, 959 bp, Oryza sativa
  ref <308>: DATABASE ACCESSION NUMBER: AK107986
  ref <309>: DATABASE ENTRY DATE: 2002-08-28
tggccaggcagagcacgcactccactccacgtctccaccaccaccgcagcgaagcagttgccgccgcaaaccatggcgcccacgtcggccggaaacctagcccccgccaccgccatcctcgtcgtggtggtggcggtggtcctggcggcggcggcggcgagccaggacggcgacgcgctgacggagttcaggaaggggatgagcgaccccgacggcgcgctggcgagctgggaccccgacctggtgaacccctgcacctggttccgcgtcacctgcaacgccgacaaccgcgtcatccgcctagatcttgaggagatgaacctgtccggtcatctgtcggccgatcttgcgcgactggaccagctacaatttatggaaatcgcttcgaacaatattgaaggaccaattccgccagagtttggtaatctggagaatttgattagcctagacttgtgcaacaacaccatttctgggccgatacctccgtcgcttgggaaactcaggtccttaaaattcatgagaattgatcacaaccttttaactgggccaatcccaaacgagctggctgggctgtcaaacctcatgatcctaaatgtatccaacaacgatctctgtgggacaatcccgacgtccgggccgttcgatcacttccctccgagcagctttgccagcaacccgcggctgaggtaccccgggatggacgacgatgacaccggccgctagatcatggcagcatgaattaacgaataaaaagaagaggacggcggcggcgtcaggttcttcaccggaagcaagcctcgtcggcgtcgatcggtgcagactctgtcgacctggagcttcttagcattagagtagcttggccgtaatggtaatgctaatgagtaatgacaatgattattatctcagcattacgtacttctgtttactggcatagtatatgaaatcgatcgtcttagctc

SEQ ID NO: 10639 - DNA, 869 bp, Oryza sativa
  ref <308>: DATABASE ACCESSION NUMBER: AK107987
  ref <309>: DATABASE ENTRY DATE: 2002-08-28
acgccccaattcgagatcgatcagctccagctcgtggagtgtgcgtagcttgattgcacttgcgcagcgaggttaatcagctgcaacggcggcgaggtcgtcgtcgcggaggagaggacggcgtctgtttcggtggttggtgcttccgccatgctgcagggggaggagaagaaggccgggaaggtgaagaaagggtggctggcggtgagggtcggggtggagggcgccgacggcggcgacggcggcgggttccggcggttcgtcatcccgatcgcctacctctaccaccccttgttccgccgcctgcttgaggcggcgcgcgacgcctacggctacgactcggccggcccgctccggctcccctgctccgtcgacgagttcctccgcctccgctcgctcgtggagcgggagacccacgcggccggcggcggcggcggcggctcgtcgtcgccgcaccgcgtccacgccggcggcggatcgcaccaccaccaccactactccttctccccgtgcacccgcgccaaagtcagctcctgatcgatcgagctcgcttccgtgcgccatggcggagtcgatctgccggcgaggacgccccgcgtacgtgtacagtagcgattagctatagctagcagagacagtacacgacgagaggagagtggagtggcatacagtagctaggtgattagtgatttgctccgggttttcgatctcatgattttggtctcttgatttccccttcttcttcttgatctttttgatcgatcttgtatagacgcatgtatgataggattgacaggtcgacttatgtatgtataattatcagttgaactcacagttcatagctattatattctcttcacacattttat

SEQ ID NO: 10640 - DNA, 918 bp, Oryza sativa
  ref <308>: DATABASE ACCESSION NUMBER: AK107988
  ref <309>: DATABASE ENTRY DATE: 2002-08-28
acacacacacacattgatacacagatcggcagaaaggaaggagaagcagccaagcagaggccccggtcttgtcaccggaaagagagaaaaagagaagtgaaattgaggaagaggaggagaatgtgatggcgcagcagcagcggcggcggcggcgcgggggctctctcgccgtgctcctcctcctcctcctcctcgcggcgctgctgctctccctctccctcctcgctcgcgtcgacgccgccgccacggtttcgtcagcgaatctcgattggaatgagggagaggtggcggtggcgactccgctaggacaggaggcggtggcggcggcggaggaggagggtgaccggccgccggagagggtggagatggagtccatcaacgactacggccaagccagcgccaacaaccgccacaacccgcatccgtgacatgacctgccaaccggagctggatcttaattagctactactagttaattatctatgcaatgttctcctcattatctaaaaaaaatgtaatgtgttctcctcagtataatactctctccgtcctacaatataagagattttaattttttatttgtaacgtttgaccactcgtcttattcaattttttttgcaaatataaaaaacgaaaagttgtgcttcaagtacggtagataataaagcaagtcacgaataaaataaataataattttaaaaaattttgaataaaataagtggtcaaacgttacaaacaaaaattcaaaatcccttatattataggacagaggagagagagtacttgttagtgccaagctcacacaccactctccctgctggtcaacctgtacttgtagaggcatgcatgtaccttcacctttgcttcgttttcgtattagaaagagagatcaagagaagcatcgatttctagctttgt

SEQ ID NO: 10641 - DNA, 382 bp, Oryza sativa
  ref <308>: DATABASE ACCESSION NUMBER: AK107989
  ref <309>: DATABASE ENTRY DATE: 2002-08-28
cgtaagctgatcgatcgctagctccggccatggacggcgccgtggcgagcttggagtgcagccatggcgcgcgcccggcgcggtacacgcatggctgccgcgtggtggtgtccgtgacgtcacgtgcgaaggatatggccttaatcctgaattagatagggtgttctttgattaattcgctaaacttcgtaatattaggtaatcgatttggctttcggccaaatattgaattctttcgttctattgctgctcaggtgatcgatgatcatagtagcttcattgcgatttgtcaatgaaatgatataaatatgtattaattacaagttgaagagtactaatgaagaacatcagaggctcagagcaattgagcgcacatctcgtt

SEQ ID NO: 10642 - DNA, 627 bp, Oryza sativa
  ref <308>: DATABASE ACCESSION NUMBER: AK107990
  ref <309>: DATABASE ENTRY DATE: 2002-08-28
gtcgtcgtcttcttgcaggagaaagatggagctcccactgcggtgttttcatggcgctaaggtggcggcggtggcggcggcgggtgatggcggagtcgccggccgtgcggctgttccggcgaagggcggcggcggcggcgttgcgcggggggtgaaggtggtggtaagagggctcgtcggcaaggccggcaaggtgttcggccggtcgatcccggcggcaaggttcggccacctcgcctacataaggtgaaggcgcagctgcgtcctgaaacgtcagtgatctgatcttcttctcctctctcactctctgccatcgagggaggtgtgctttgtactagcttttttcttcttcttcttcttcttcttcttcttcttcttctttttttttgtttttgggccaatgatactttgtgctagctaggtgctcgacaaaatgcgtccttgattgatgcttggtgattttcactagatctgttcatacgacttgtaaatagtagaacatgctaggtacaaggtacttttcagattacactgttcttcagttcttgtacttagtacgttttcttttttttttcttcttctgtatgaaatacgctcgtaataacatcgatcttattaaggttgttt

SEQ ID NO: 10643 - DNA, 670 bp, Oryza sativa
  ref <308>: DATABASE ACCESSION NUMBER: AK107991
  ref <309>: DATABASE ENTRY DATE: 2002-08-28
aaaaacccaacgcccaaaacaagcaaccgccaatccccaatggtccgcatggcggcggcggcggcctccaccttcctcctcatcgccgccctcgtcgtccctaccgcctccgcctccgcctccgccgccgaatccgccgcggggccctacgacccgccgacggtgccggagctcatggaccggttcggcctcccgcgcgctctgctcccggtcaccgcccggcggtacctcctccacgacgacggctccttccagctcttcctcgacggcggctgcgtggccgaggccggcggctaccgcgtcggctacggcgtcaagctctccggcgcggtggcgcccgggcgggccacggggctcgggggcgtccgcgtccgcgtgctgttcgcctgggtgcccgtcaccgccgtcgaggtggccggcggggaggtcaccgtcagcctcggcccgatcaagaagtcgttcccggccgccgggttcaagtccagcccccgctgcatcgccggcgcggcgacgccggcgacggcgagcgatggatgattcttgattagcctttggtttctagagcagttagttcgttgctatttgctaggacagggttggtgtacttgttcctgtgaacaacacttgttcataagattacacacacgattaaacgctataaatcagtgcc

SEQ ID NO: 10644 - DNA, 480 bp, Oryza sativa
  ref <308>: DATABASE ACCESSION NUMBER: AK107992
  ref <309>: DATABASE ENTRY DATE: 2002-08-28
atcttctatttttactctcttattcttttctttgccttatcctctccttccttcaagccttatcctctccttcctgccttctctcgttgcagatcgagcggcggcggagggcggcaagcgccggcgtggccgagcggcggcggctgtggagggtggtggcggctggtcgagcggcagcggctacggagggcggcggcggcgggccgagcggcggtgggcggtcgagtggcggcggctgtggagggcagtggcggtgggcggcaggcgctggtgtggctgagcggcggcgactgcggagggcggcggcaggcaggcccacgcgcggcggcgagcaggcggttggcggccgattcgtttgtttgttttttttttgcaatttgtgattccattaagatgtgtaatttttttttgagaatttgtgatttattgtatgtatctgagatgcaatatgtgatgtatttgatttgtggtatttttttt

SEQ ID NO: 10645 - DNA, 837 bp, Oryza sativa
  ref <308>: DATABASE ACCESSION NUMBER: AK107993
  ref <309>: DATABASE ENTRY DATE: 2002-08-28
agaaacaaactgtctaagtcgaagtgtcgaacacccaccgagcgagcgagcgagagcgacatggcggcggaggcgtggagatcgcggttccgggagcgtgtggtggaggcggcggagcgctgggagagcgtgggcgagagcctcgccacggcgctgacgcacctgaagtcgccgatgcacgcgggcgacgaggaggaggcggccgccgcgcgcaccaggatccagctcgcgatgggagagctcgtggacgcgtccagaaatctcgcctccgcgatgtccctcatgaaggtggccgagctcctcgcgctccacggcggcagcgtcaacccgtcgacgcatctgggcgagatcagcctccttggcgaccagtacctcgcggagcggaacgctggaatcaagctccttgaagccggcaaggacgcccgaaaagcgtacatcagtgttgacgggtgccgcggcaacctggatgcgatcctcctcctgctggaccatcctcgtgtcccttgcgtcgacgacttcatcgaggaggagctcttcgtcgccggcgataacctccagggcgcgatcgggaatgcgaagttgggcaccgagagggccgtcggcgcccggcaggatgtatccggcgccaactgattccgtcgagacttcatatgctggattcctcgttggtctgtcgatctctttctcgtgtttgccattccacctgttcctgctttatgacctgttcgtgacgtctgatcgatgaattctgaaacattggttgaacatattggttgattttgtgcagttgtgctacctctatatcgatcctcacctggattctgtggatttttttat

SEQ ID NO: 10646 - DNA, 663 bp, Oryza sativa
  ref <308>: DATABASE ACCESSION NUMBER: AK107994
  ref <309>: DATABASE ENTRY DATE: 2002-08-28
accttcccctctctctcctccccgcccttcccacgctccaccacgcgcccgccctggcgctcgagccggcgaagcctacgccgtcggctgccgccctctccaccacctccatgtcggccgtggcccggtggcgcggcgcaaatgcagctagccgcagcgcgctgcttcgacgggagagggccggcggagggcgccgatgccggcgaggctaccaagaggaagggctgaggccgatgggagcggagatcgatcgagcctcttatttaagcagaaggaatgtgttccgtacctcattgtcgatgcgccatggacgccaggatgtttctacaggtagcccaagaatatctagtgcatattgtgttgacgtgaccgaacaaactgcatccatatcaccactggcatgcaagggtagagttgaaattaaggggtaataactaatatgtgttttaagtcaatagcttagaaacatagatatatacctgtacagccatatccttgtgccacttgaaattagtgtcttgattgatggcagcattgtctctggtgagtctttccagttatcaaatataagtccactgcttgaggggaatatttaaatttgttagaagcttcaaatgttgacttttacttgatacacatctagtaagaggcagcttgggagtc

SEQ ID NO: 10647 - DNA, 427 bp, Oryza sativa
  ref <308>: DATABASE ACCESSION NUMBER: AK107995
  ref <309>: DATABASE ENTRY DATE: 2002-08-28
cgcatcgctcacacgccgcctccgccggcctcatcctcccgtccccgctgtccgccacggagagatcgagtgccgccgcatcctccagcaagtgccgcttcgatggtggctacgtcacccgctagccgcccgtgcagctgcggcccctccgcctgcgcccacccacgcgccgctctgccgcccgccgcctgcgcgcgccgggcgccgcccgtggagaagagagagagagaggggagaggtgaagaggagatgagaagaagagactgacacatggggcccacgtgggtctcacgctgactcagccatcgatggccgtggtcaaagcgccacgtaggacaaaaaccgggatgaagggacctcggatgaccggttttgtatagttaagggacatcgcatatctagttttgtggtttgagtatgttttttt

SEQ ID NO: 10648 - DNA, 771 bp, Oryza sativa
  ref <308>: DATABASE ACCESSION NUMBER: AK107996
  ref <309>: DATABASE ENTRY DATE: 2002-08-28
ctgcgcggcgccgcggggcgcgtgagggccccacccaccccggcgccccctcgtcctcatcaccttccgcctgcgccgccgtcgccggcgggcgctggcggcgcggcggcacaggatcgtctccgtgtcttccaggatgatgtcacaacacaaccaaaagatgcccctggtgtacttaaggagcgtgatccaagttatgatgagatgcttaagcacatggttgggagaatcactacaaagcctggaggaaagccagaaatgggtgaagctttcgtcgtagatcagtacaacaggccactcccaagggttagaacatccagacctgaacccggggaaggcggacacagacaactacctccaggaaccattagcgtcgctcatgtccatgaaatcatccaactgtaccaaggaaagtccagtaaccaccctggcccaatgagcgtggacaagattgcctcaaagttcagagtcgaagcctcagtggttcaaaacatcgtgcagttcgtctcacttccgcaggaagaacatgttaccaagaaagaggaatactgagagtctataggatatagcgatcttgcaggctgtctaacacaattcctttgttcatgtttccgagtttgttctgtggtggactactaggaacacaatgtttcgtagcttaggttctttcttcttgttgttgctgctgctgctgagatagtgaggtgagatgatgatggaactggaaatatatatgctgtatgaataaaggtgaaggacgtgttttggccc

SEQ ID NO: 10649 - DNA, 1095 bp, Oryza sativa
  ref <308>: DATABASE ACCESSION NUMBER: AK107997
  ref <309>: DATABASE ENTRY DATE: 2002-08-28
agtcatctcacatctcatccattctttttctcatcttcttcttgcttccatcgcaacagcagcagagcagctactactagttgatctcacttgagagaaagggatccatccatccatccatcaagatggggaagaagagcaagaacggcggcggaggaggaggcgagaagaaggcgacgacgacggaggtggtgctgacggtggccatgcactgcaaatgcaatggctgcaaggacaagatccgtaatggcgtcaaggaactcgccctcgtcccaggggtggaggcggtggacaagtcggcggtggaaagcaaaggggaggtgaggctggtggtggcggccgcgacggcgaagcccgagaagctcaaggaccgcctccacagggtcaccggcaagaaagtcgacctcctcgtcatcgcgccgcccaagcctgccgccgccgccgacgacgacgacaaggccgccgccgccgaagcggttgccgcgctgatcaggcaggcgcaggcgcaggcgggcgtccacgtcgtcccgggcgcgtgggcgggcggcggcgcggtggcgtacccggcgtggggaatgcagcagccggagggcgggtactactactcgccgtcgacttaccctgcaggcggcttggtctacccctacgcggcggcgtatccacctcccggtcagcagctgctcggcaatggcggcggcgtggtgtcgccatggtacactcatggctactagcttagtagtacactaattcgtagtattagcgatgtttgttttgtaattagtgatacagtacgagctagtacttgtatccagatgagtatcagtagtggatcgagcaggagagtactccagttagtaatggtggttgtcatctatagttaattttggtggggtgatgaggctcatgtgtgagcacatgtagtggtggttataacaagtgtgttaaatctctgtctcatcggaactgatggtattatacgtagaatcgcgatcgtattcggctggcagttgccaccttccccctgtttgaaatcatcatcatacaatgtgctagtatgctatacgacgaagcaaaaaaggcttttggattcggttc

SEQ ID NO: 10650 - DNA, 651 bp, Oryza sativa
  ref <308>: DATABASE ACCESSION NUMBER: AK107998
  ref <309>: DATABASE ENTRY DATE: 2002-08-28
ctatagatatccatgagctgaggggtggtcagagacatgacaaatggatatcactcaagaatgtcaagaaaggaaggattcacttggcaataacagttgaagatatatcagaggaggacggcggtggcgcgaatctggagcggcggcgtgggaggacaacggcgacgcgccccgacttcgccgccaatctcttccccgcctactcctccgccgggcgcccagtccttgccgccgcggagctccgagctcggccccctacctagctataggctgcaggagcctccgtccacgcggggattccacttcaagttcgtcatcctggagggtgctggttccctcgcggtggcgtcgtcgctggtcttcatgtacgccaggcaccgcagcgtccgcgacgcgccgtgaggctgttcgacgaaatgcccgagaggctgttgaatgtgataccaacagtttgttttccataatttcttcttgttaaggtttgggcagactacgattaggtcaaccagcacattgttatttaaccgaacacttaatcggtgaaaattcatcagatgcaaatgcattaatcatcatgtacggaaagagtggaaattatgatcttgcaccgaaaatatttggttcggtcaaaacaaaaacatatgttgtcac

SEQ ID NO: 10651 - DNA, 694 bp, Oryza sativa
  ref <308>: DATABASE ACCESSION NUMBER: AK107999
  ref <309>: DATABASE ENTRY DATE: 2002-08-28
ctcccctcctcttacccttccattggctccctgggttgagctcggcggcggcgcaatggcgtgccacctgctgctcgtcgccgtcgtcgccggcttcgccgtgagcctcgccggtgcgacggaccatatcgtcggcgctaaccacggctggaacccaaacatcgactactccctctggtccggcaaccagaccttctacgtcggcgacctcatctcgttcaggtaccagaaggggacgcacaacgtgttcgaggtgaaccagacggggtacgacaactgcaccatggccggggtcgccggcaactggacctccggcaaggacttcatcccgctcaacgactcacgccgctactacttcatctgcggcaacggcttctgccaggccggcatgaaggtcgccatcaccgtccacccgctgaagcacaatgccaccggcgacggcgccaagaaccacggcggcgacggagccgcacaggaggccgccgctgccgccatgccgggcgccgccgtgtggatggcagtgctcgccgtggccgccgcagctgtcgccatattgccatgattaattaatctctgcacttgtgcttggaagaactcaagaacattggcacattgtgtgttttgcttgcatttttatcagggacttgattaatgtagcaccaaaatcagatttatattcaagtattaattcagc

SEQ ID NO: 10652 - DNA, 872 bp, Oryza sativa
  ref <308>: DATABASE ACCESSION NUMBER: AK108000
  ref <309>: DATABASE ENTRY DATE: 2002-08-28
gtctgaacctctgaagatagcaaaatgtcctctagcgatcagaacccatcgccaacaccggcgtccggcaccggcacgtccgtgccgccgccaggcagggcgacgacggtatcctcgcagctcctggacatgggcgcgcaagcggtgcaggcgctgaagcccgtgcgccagatgaagcagcacgcgtgcagcttcgcgctgtacgctcacgacctgagccgccaggtcgaggtccaccacttcgtctcccgcctcaaccaggacgtcctccagtgcgccgtctacgactccgacaagccctcggcccgcctcatcggcgtggagtacatcgtgtcggacgccatcttcgagagcctgcctccggaggagcagaagctgtggcactcgcacgcgtacgaggtgaaggccgggctgtggaccgacgtcggcgtgccggagccgctgcagagctcggagatggcgaggatggccaagacgtacggcaagctctggtgcacctggcaggtggaccgcggcgacgcgctgcccctgggcgcgccggcgctcatggtgtcgccgcaggccgtggagcccgggcgggtgcgcgccgagctcgtgcacggccgcgacgagaggtacaagatcgacagctcggcgcaggggctgaagggggccagggttgagatggacgagccggagtggatcaacccgaacgccgactactggcgcctacacggcaaggggttcgccatcgacgtcaccgccaccgagatgaagcgccacgcgcccttcccgtgaaaatgagaggaagacgctcttgatttgccgctgtacttgacaagttcgctgcacacatatgaaacgaaaagtctggatgaaatgtcagcttatct

SEQ ID NO: 10653 - DNA, 621 bp, Oryza sativa
  ref <308>: DATABASE ACCESSION NUMBER: AK108001
  ref <309>: DATABASE ENTRY DATE: 2002-08-28
acccattccgccgcctcctcgcagctcggagaattttttttttcgagaattcgatcgagagcgagccacgcttgcgtgctttggaagaaaatcatatatcaagcagcagcagcagctgtcggagatgtcgcggtacgtggagttgctggacatgggggtgcgcgtcgcggcgaggttccactcccactgcccgcagacggcgcgcatgtactacaagccgccgcagacgacgacgacggccgacggccgccgccgccgcggggacggcgctgcgggcaagcaggcggcggccggcttcgacgcggtctcgtccgccacggcggcgcgcccgttcgcggcggcgggagaggaactcggcggcttccgcgccaccgcgccgtcggggtttgacttcgagttcgacaccgcgcaggccgtcgtctacgacgtcgtcgcgtgagctaggaggaatcgatcgatcgaccttagcttctgctcggagaggattgttttttttctccgggaacaatttttgacacaagaggggaatttgattccgtgaagtgtatatatgtacactccattcttttatttgattgagatttgatagctgaaattaatgaaagaaacattatttggttc

SEQ ID NO: 10654 - DNA, 793 bp, Oryza sativa
  ref <308>: DATABASE ACCESSION NUMBER: AK108002
  ref <309>: DATABASE ENTRY DATE: 2002-08-28
ccgatattttgcaattcgcgacgcgatccgtctctcgctcgatcgccatggcggccatgagtgacactggctcgagcttggcgcagtgggccgagctgtaccacgacgcgtcggctgctcacggcggcgtggtggcgaacggtgcggcggcggcggcgacgagcccggcgtcgccggcgggatcgacaggcgggagcccgacgcgggcgccgggggtggaggggccgcgcgtggggaagccggcgaggaggcggtccagggcgtcgcggcgcgcgcccgtgacgctgctcaacacggacaccaccaacttccgcgccatggtgcagcagatcaccggcatcccggcgccgcccgcgggcgcgttcgcggggcccggcggcgttccggtcatcaacttcggctccgactacggcttcaccggcgccgtcattcccttctccgaccacctccaaccgcgccggccgacgttccaggaccaccaacagctcctccgaccgcagcagcagtacaccggcgcaccgttcggttacggcaacctgcagcaagccggcggcgccggcaccggcgccggcgacatgttcagccacgcgctgagctcggccgaggacaggttgctcctgcagagcctccagtcagctcagatgcctacttccgccgctaaccacagcgctaatggttacttcgcctaattaaccaacggttaatcgaagacacatcacaagcaaagaagatacatggaccagttgtgtttaaccccctacaagttaattttaccctctcctcgatcgtgtgc

SEQ ID NO: 10655 - DNA, 567 bp, Oryza sativa
  ref <308>: DATABASE ACCESSION NUMBER: AK108003
  ref <309>: DATABASE ENTRY DATE: 2002-08-28
actaccatgcatcgcatgccgccattgattagctcacctaactccaacaagaacaacaaagaagaaattaacaggagtagagtacactttgcattagacatccaccaagaagaaacgagctcgatcgccctgaagccatcaatggcgatggggtcctcctcattactacgcggcggtgcggctgatgcgcgggtacgcggcggcgcggagctgggaggcggcgaggtcgctgctgtggctgtcggggcaggccgggatggggtgcgcggcggcgctcgactcgccggcgccggggatggacagggccaacgaggatttcagccggctcaccaccatggccaccgcgctgctcaacagcgtcgccgccaccagcggctgagctctccgctagctccggccacggctgacgtggcatgacatcatcatcccatcgatgcatgacgtggcactcttttttctttctcttttttttcttttgcctttttttttatggtagtagagatgttgtgggagttgtttgatgtaatgtaagctggtgacataaataaataatggcaattgcatttc

SEQ ID NO: 10656 - DNA, 775 bp, Oryza sativa
  ref <308>: DATABASE ACCESSION NUMBER: AK108004
  ref <309>: DATABASE ENTRY DATE: 2002-08-28
ctctttccacgaggcgacgacggcgacgatgagcgcggcggcggcggcggacgtggtgcacagcggcggctgccactgcgggcgggtgcggtggcgggcggaggcgccggcgagcgtggtggtgtggatctgcaactgctccgactgcgccatgcgcgggaacgcccacttcgtcgtcccggcctccaagttcaccctcgccgccggcgccggcgagtccctcaccacctacaccttcggcacccacacggcgaagcacacgttctgcagggtctgcggcatcacctccttctacaccccgcggtccaaccccgacggcgtcgccgtcaccgccgcctgcgtcgacccgggcaccctggcgcacgtcgagtacaggcacgccgacgggaggaactgggagaagtggttctccaggagcgacatctccgacttctccaagcccaaggcgccgccgccgccgccgccgagtaagacctagctgctccggtggtgatggtcgctggatgcaacacgcgttggtgatctttctttcggtgtctgaagtggctgggcacatggaatgaacaattcctgtgggagcaagggcgcattataaaagtgccaggtcacgtccctagcttttgaaggatcttcaggaagccatggataccgagctccactttcggttgtggcagtgactcactggatcgagcaacttttaaacttggtgtttgtggttgtggaagccgttgtccaaatgctaaattgccaagttggaagccatatgcttaaaatg

SEQ ID NO: 10657 - DNA, 627 bp, Oryza sativa
  ref <308>: DATABASE ACCESSION NUMBER: AK108005
  ref <309>: DATABASE ENTRY DATE: 2002-08-28
aatcgatgcggcggccgagagacgggcggaccggcggtaggaagggcggcgccgccaccaccgcatcaagcaggcgcggaagaacgcctagatcccgtcctccggtaatctcctgccgccaccgcctgatgcagcatcccgaggagcagacaacgattctcaaggaagggtgggacaaatagtttgatttcaggagtatatgctcccaatacggatgccattaccagccactgtaggactgatgccattgtgaggtataatccaagaagaggaactctgcttgcaaacaccgtcaatcagatgttttcctcgttgacatgggtagaggaatcaaaatggccggaaagggaccttcgcatccatccgtgatgtatgggttgcccttgtatccatcagagcacttgcaacgataaccgcgaccattggtggcatcgacacagtaactgttgctactaacacaagcgtaggaagttctgttctcttttgcttcctcgcattttttccattcaactgtccaatccaagacagtgggaaccatccccttgtacgtatcactgaatactgtggagtcgacataagtggtactaaagttgaatgctgaagtttccatgactaccatgtagttgc

SEQ ID NO: 10658 - DNA, 768 bp, Oryza sativa
  ref <308>: DATABASE ACCESSION NUMBER: AK108006
  ref <309>: DATABASE ENTRY DATE: 2002-08-28
ctctctctaatttctccttcgtctgggcaagccggcgggcggggcgaggtgggagaagaggtcgggcggccggcgaccggcgacgggcgatgcggcagcggcggccgcggcggcggtggcgatgacgacgacgtgggaataggagggccgccccctatgccgccagcctccgtcgcctctccaccagctcccatggatgatgacggcggcctcctcgctctccccgttgcgctccccatcggctcctcatccttcgtgctccgtgaggacggcgtctcgcgcgccgctgacgaggctgccgccccgcgctgcttgccgctgctgttcgatctgaacctgccggcctcgtccccgtcggctgctgccgccgccgaagtcgacgagatggattggtgttgcgacacgctgctccacctctagcctgcacatcaccaaacaatggcagcaatcgccggcgaactctagcctacgacgacgacgacgacgaccaaccagcaagcaacaagaattggaaatttgttactgggttgctgcgctccaatccaaccatcaccattgttgctgctgctactgcgaagaagctctaccatctcctccatagacacggataattttctttttattttcgttttcctccatctctttttcaccactcaagatttcgtttccgccgcctctcttgtgcatctctgtatccaaaggggatgctgctgctttcagctgtaccaatagctagaaaatggtagagaagatgataaaatttggttc

SEQ ID NO: 10659 - DNA, 681 bp, Oryza sativa
  ref <308>: DATABASE ACCESSION NUMBER: AK108007
  ref <309>: DATABASE ENTRY DATE: 2002-08-28
ggttggtcgatcactccatcgatccatcgatcgatcgctagctactcgccgtcgtcgaccggtcgatccgccattagcgagctgcaaggctctctcgcttataaatcttccgagtaggcaagcctcaatcgatccgagagtttggtcgttgatcgagctgatcgatcgaccggtgagtggtgcgtggtgtgcggccatggacgacggcggcggcggcggcggcgacgactcgtcgccggcttcgtacatcagattggtgcagcatctgatcgagaagtgcatctgctacaacatgaacaaggaggaatgcatggagacgctggagaagcacgccaacatcaagcccgtcatcacctccaccgtgtggaaggagcttgagaaggagaacagcgagttcttcgccacgtacaagaagggccaaggagaggaaccagcggagagcaagagcagtagttcttcacaggaagctgctggttccaagagatcaggcggagacgacgactaggtgcatgcatggcacccacgagagagggggctacttgtacagtaggatatccatcaagtcgtagtacctcgtactgtcttacatctagctgttcatagtacatagcgtatagtagtaatgtagccgttattatgtacgttttgccccgaaaataattaagattcggattcgcagct

SEQ ID NO: 10660 - DNA, 576 bp, Oryza sativa
  ref <308>: DATABASE ACCESSION NUMBER: AK108008
  ref <309>: DATABASE ENTRY DATE: 2002-08-28
cgacgccccggcctccttccgccgcgtagggccgaccggcgccgccgtcgcctcggcccggtcgttgtcgtcgtcgtcgtcgcagcgttgttgccgacatcttcatcgagcagcgatgccgccgccgccgtcgtcgcagcgccccgtcgtcgtctgtggtggcacagccgcgcactaacgccggccaccggtggcggcggcacaaggccgacgcggcgaggatgcgagagatgtggtggctcagcaccacggccgccgttgtcacccttcgcctcgccgaccgcagcggcatcgccggcgactcccctcccgcttctttgctgctgctgcatttgagggagagaggagagtgctaggaggcctaagggcaattaagtcatttggcgcagccgttatccaccgttaggataaaaacggacggaatgatgcggagggcgcgataaaattcgacgatgtcacagagggaggctcgaactttttagtggcacagaggcagacaccatctttttttaatggcataccgggaaaaacctcacaatctgacatcccgttcttcgtagatgctatccaaatgtc

SEQ ID NO: 10661 - DNA, 775 bp, Oryza sativa
  ref <308>: DATABASE ACCESSION NUMBER: AK108009
  ref <309>: DATABASE ENTRY DATE: 2002-08-28
gcggcgagagccatggcgcaagttcaagcccgacgaccaagaggaggagaatgccaaggtcatcaggtagtacagcctgatggcggcgacggcgacgccgagcggcggctcatcgccccggcggacgcctcggggcaggccgcgcactgcggcggccccgtcgtggaggtcgacgacgcgtacgacagcaaggtcaagatcggcgaggcgctggaggcggcggcgagggcggtcggggaccagcccgtgcgcgggtccgacgcggcggcgataagctccgcggaggcgagcgcgggcgcgggcgtcgtccccggcggcgtcgccgagcaggcgcaggcggcggcggacgccaacgccggtgccgcgccgcccgcggaggacacggcgatcaccatcggcgacgtcctcgcgtggaacgcgacggcgatgctgccgacggagaaggcggtgacggcggaggacgcggcggcggcggcgggagcggaggtggagaaggaccccggcgaggggaccaggccctacggtgtgagcgcggcgctcgccgcggcggcgaagcacaaccgggaggacgccgagtgccagtcgaagaggagcgcgcagccacgggcagccgacgaatgtacacccgctctggccgagcagttcgaccaaatctagcgaatttagcatgcgtttgattatgtattagcgcgcggtttgccgaacgctaagcgaatttagcgagtgcttgaatccaataaaataattaataatatgcgtttgatcaagtattact

SEQ ID NO: 10662 - DNA, 656 bp, Oryza sativa
  ref <308>: DATABASE ACCESSION NUMBER: AK108010
  ref <309>: DATABASE ENTRY DATE: 2002-08-28
catcccatcccattccgttgcgaaatttttgcgagctcgcgacgcgaaccccctacgccgcagccgcaggcttcctcttcatctcctcctcctccagacctccacgcgagcgtgccccggggtggaagcggaggcggcggcggctcgagcgcaatctggtggcgtgggggcgcgtcacgatggcggcggcgctggcgaggcgtggcggtggggggctggcgcgcgccctggcgcgggggagggggatgtgctcggccacggcggcggagcgcgccgccggggcggcgctgacgtccgaggagctcatgcggatggagcgcgagcgcagcgcgcacaactaccatccaattccggtggtgttctccaagggagaaggttcacatatattggatcctgaaggcaacaaatacattgatttcctgtctgcttattctgcagtcaatcagggccattgccatccaaaagtcctgagagcgttgaaagagcaggcagaaaggctcacactgagttctagagctttctacaatgacaaattcccaatctttgcagaatacctgacaagcatgtttgggtatgaaatgatgttgccgatgaatactggagctgaaggagtggaaacagctatcaaattggtgaggaaatggggttatgagaag

SEQ ID NO: 10663 - DNA, 884 bp, Oryza sativa
  ref <308>: DATABASE ACCESSION NUMBER: AK108011
  ref <309>: DATABASE ENTRY DATE: 2002-08-28
acatcaaggagctaagctagccaagtagtagccatggctctggccttcgccgtgctcgccaccttcgccgcggcggcgacgccgaccaccaccaccaacctcaccctccacaacctctgcacccaccctgtctggccgctcgtcaccgccaacgccggcctccccgccatcgccgacgccgccggcgcggccacccgcctcgacggcaacggcgacggcctcgccaccctcgcgttcccgccgggggcgtggtccgggcgcgtggtggcgcgcaccggctgcagaggcaacggcagcagcaggtgcgacacgggcgacgcgccgccggtgacggtggcgcaggtgagcgtgcacggggcgggcgggctggcggagtacagcgtgagcctggtggacgggttcaacgtggcggtggtggtgacgccgcacgggttcgagcaggggcggctgtgcccgtcgctcgggtgcgccgtggacctcgccgcggactgccccggcgacgggggcaggggggggtgcatggcggcggggcaggcggaggcgttcaaggcgaggtgcccggacacgaggacgacgccgacggacgtggaggtgacgccgcagcggtgcatccagccagccgagctcaaggtcgtcttctgcccgccggacaacacctcctccactcactgactgattcattgatggttagcaaggaggagtagtgattagtcgcaaataataatcctaattagcacgtagtaagaggcttcatgcgctgatggtgattgcattaagaaggcgcgcgtctgttcgtcgccggtagctacacttgttactgttagaaatgcatgctgtacgtgtgattcattcaataaatggtttaactccgaatctgccagttc

SEQ ID NO: 10664 - DNA, 644 bp, Oryza sativa
  ref <308>: DATABASE ACCESSION NUMBER: AK108012
  ref <309>: DATABASE ENTRY DATE: 2002-08-28
cttacagctagttactactagcatatactttatatcctctttatctctaataagcttaatttgacacgtacgtacggcatgcatactccatcaatggatcagccggcggcgtcgaatggtgatgaggcgcctcgcatggagatgtgcccgtcgctgtatcgcgctgcacggagcgggcgagcggaggaggtcatggcgttgcttctgcagcaacggcccggcgatggtgcagcagcacatcgtcaagtcgctgaaggctgccaagaagatggcgctagtgtcagggaagaatctgatgacagttgggaagaagagcagcaggggcctaggggaggaagagggccaccgatgcccgtcgccggcggcggagagatggctccttggttcgctctcgctcgaggatagaattcaaacaaaacgattcgttccgtaattataaatggattgcatggtgggtaatttgttatcaaatttaatggcactggatattctccaacccacaagagccagaaaaagcacctttctatgggctttcggcttttagttatagggtggcttaggcttttttaaaagccagatgaaaaagcctgccctttgtttgggctttagcttttctggctataaactgaagcttaagcctaaac

SEQ ID NO: 10665 - DNA, 484 bp, Oryza sativa
  ref <308>: DATABASE ACCESSION NUMBER: AK108013
  ref <309>: DATABASE ENTRY DATE: 2002-08-28
atcctctcccctcactctctttctttccttaactctctttctctcctctccactcctcctagggcggcggtggcaggagctggcagcggcgacggctagggtttctttttttgaattctttttggaatttttttttcgcgatttagtgggtggccggcatcgatggtgtggccagtggccggcgtcgtccgcgtcgtctgtggtggtggcggcggcgaaaatggtgggggcgaggacggagcgagagaggaagggcggcgagatggcgggggcgaggtcgcgaggagccgactagccgaggacagcggccagtagtggtgcgctcgacccctggatgcgccgctccgccgccgcctctctctctctctctctcctctctaaggttagccagttagggacttgggttgggctgggaacttggggaggaattatggactatttggatggatctttttaatttcagaaattccgacaaactttccgg

SEQ ID NO: 10666 - DNA, 677 bp, Oryza sativa
  ref <308>: DATABASE ACCESSION NUMBER: AK108014
  ref <309>: DATABASE ENTRY DATE: 2002-08-28
actatatcaaaatgtttgcctcgagccgagcatgtttgttgcatagtgcaatgcaaagaaaattactatatcaaattactatatcaaaagtactccatgccgagggacgcggcgtggacggcgtcctccatgctgacgggctcgcggtggctgcggcgcctgctgctggggcggtcggagaggtcaacacggagctcgtggcccggctgaaggaggccgcgcaggaggtagccgtggaggttgcggcaggcattgcgggccatctcttcgtcgcctacacttgttggtggctaggtcggcggcgaggcagagggaatggacggggccgatgagttcgcaggcatcatagagctcgtcatcggaggcgtcgaaggcgatattgcccacgaagcctccggttctccccgcctatcgccggcagtgctcctcccccgtcgtccgtccgccgcaccggatttccttcccgtcggccctcgcaaataagatggagacccatatgcctatgggacccacgtgggtcccacattgacccacgtcgaacaaaacaaaaacaaagccacattataagttgaggaatgtcatacattggttttttggtttaggaatgattttgtaattcggtgaaagacgagggtcgcatgtacttttttcaactttagccttagtgccaagttctc

SEQ ID NO: 10667 - DNA, 473 bp, Oryza sativa
  ref <308>: DATABASE ACCESSION NUMBER: AK108015
  ref <309>: DATABASE ENTRY DATE: 2002-08-28
gcattcgcattcgcagcagctgagacttgggatatggttatgaattccaagacccttgttgctctcgattccccccctttctttcctcactctccctgagctggtgggtggcggcggcggcggcggccatgagctggaggagaggggacgggggcgtggcgaggagatgggtcctgctgctctgcaccgggagcttcttcctcggcctgctcttcaccgacaggatgtggacactgcctgaggttactgaagttgccaggccaaatggaaggagagagaaggaggatgagcttactgctggagactgtaattctgctaaggtgtaccattccccaaccacaagtaattcctgacagtatttgcatatgtcacatagcgaagaacgaattgcatattatctctttaattagaatactctttatttttttttcttgaaaacgcaagagaattgcatttcatttcattaagggaag

SEQ ID NO: 10668 - DNA, 598 bp, Oryza sativa
  ref <308>: DATABASE ACCESSION NUMBER: AK108016
  ref <309>: DATABASE ENTRY DATE: 2002-08-28
tcgatccctctcgttctttctcgcctctctctctctctcgcctctctgtagcgcgcgacagcggtggggcagcgtcctggcagaggcgtcagcggcggcgagatgggaggcgacggcgccctcccctccgccggatccggcgggaggggaggcggcgggcaacggcgggcagtggcgcgctcccctccgtccgatccggcgggaggggaggcggcgggcagcggcgcgctcccctccgcccgatccggcgggagggtaggcggcgggcgacggcgggcagcggcgcgctcccctccgcccgatccggcgggaggggaggcacaacatggcccgccggcgatgaaacagacgaagtagataagccttgggccgccggcacaagatttttttagatgttttggtggatttgtgaatgattttattggagtatgtttgtgatgtcaatcaattttggtggagatttgtgggtgacttgaggattttaatttgatttgggcgcatggcgatggtgctcagtgaggtcggctccattcgagccggctctctgttttttttttggttcgagcaatgctaaaggtgccggtttaatgattgtcat

SEQ ID NO: 10669 - DNA, 587 bp, Oryza sativa
  ref <308>: DATABASE ACCESSION NUMBER: AK108017
  ref <309>: DATABASE ENTRY DATE: 2002-08-28
aagctacacttccaaatcatcatctcaacttctcaagcacacagtgatcgagaagctactggaagcatctagaaggggttccaggtctcgatcgatggagagggtggcgaagctggcgtcggagagggcggtggtggtgttcacggcgagcaactgcggcatgtgccacgccgtgacgagcctcctcgtcggcgagctgggcgtcaacgccgccgtgcacgagctcgacaaggacccccgcggcagggacatggagagggagctcgccaggaggctcaacggcggcggcggcggcggccgcgccctgccggcggtgttcgtcggaggcaacctcgtcggcggcgccaaccgggtcatgtcgctccacctcgccggcgagctcgtccccatgctcaagaacgccggcgcgctctggctctagtgtatatacgtgtgtgcatgcagaatgcagttaatgcagcgaattaagccaggttttttatgtcctcctgtgctgatgagaataaatcaaatcgatcgatcgagtggtgtaatggtgaagttgttgtaaatgtcgtccatttcgataaataaatttagttctgatg

SEQ ID NO: 10670 - DNA, 667 bp, Oryza sativa
  ref <308>: DATABASE ACCESSION NUMBER: AK108018
  ref <309>: DATABASE ENTRY DATE: 2002-08-28
ctctcgaacttcgccacggcccacggagcagcagcgctcccggcgacggcgaggagcggcggccaccgccctcgcggcggatttggggtaccccgctgccgcccttgcccatggcggccgccgttccggtgccctggtcgccggagtcggagttcgacggcgcggaggaggcgccgtccggagctcgatgccgcaaagagagccctcacgccgcagcggcgctgataactgatgatgccggagtggaaggattcgagatttgatgagcgcatcggagcagcgccaacaatgaggacctggtggtagattcctttaaactatcttgcggttttttttttctagttcttttggatcatacggcttgagtggtactgaattttaggctccaattatatttgtttagtttgttcctgatccataaatcaatcggtaatactggaaagaatttagattcccagttcccacgtcttcgcagtcttgacaaatggcaaatagacatgttcattattaggctgaatacattcaagttttactatcgtctacgttgttagactcaaagggttggtcccaaaaaaaatggatttctcttgtacactatatagaacaaggtttacatgcatagttcaaatggatgcatccttggagtgggatgatgctaggattagtt

SEQ ID NO: 10671 - DNA, 580 bp, Oryza sativa
  ref <308>: DATABASE ACCESSION NUMBER: AK108019
  ref <309>: DATABASE ENTRY DATE: 2002-08-28
aaaccaggcgatcgtagaggaagcgaccgatcagcgcgcgggcgcggacgcgtacgcggggccggcgttcgggtccatgtcgccgtcgccgcgggcgcttccgttgccgcggttctcctcctcctcgtcgtcctctagggctgccgctgcggcggcggcaggggtggacgactcggcgacgcgggagctccggcgcctgctgggcctccactgatcgacgacgaggagccaaaagaacaccattcgagcaagaagcgatcgcgcgacgcattcagcaagaaggggattagcatgtgcggctgtctctctacgactcttccatcgattcatctcgtcctctagctctccctccctctccaatggcgccgtcaaggccatggcccgcgcacgtacatacctctgcttcgatccgcctgccttccctgccgtttttgtaagggcaaagcttggcgcgaagcgagggcgcgtgcccgtgatctggagccggtcgtcggagagggagagaatggcattgtcgggaagatttgatgtgatctagatgttgttaatcgaatcttgacttcaaaggaaaattctttag

SEQ ID NO: 10672 - DNA, 632 bp, Oryza sativa
  ref <308>: DATABASE ACCESSION NUMBER: AK108020
  ref <309>: DATABASE ENTRY DATE: 2002-08-28
ctgctggccacgacgtggcagtgcgtgatcagcgcggcgcagtcgctggcggtggcggcggtggcggcggcgcgggaccccgccgcgtggaggctgcggctcgacactggcctcctcgccgtcgcctactccggcgtcgtcgtcacggccgtggcgttctacctgatggcgtggtgcatcgagaagaaggggcccgtgttcctcgccatgtccaccccgctcgccttcgtcttcaccgtcttctgctgcatcttcttcctcggcgagaccgtccacgccggcagcgtcgtcggcggggtcctcatggtggctggactctacagcgtgctgtggggcaagagcaaggagcaggacaagctcacgctcgccaccgccacgcccaccgtcgccgccgtagaacagaaagaagccgctgcggctgcgccagatgcagacgccagcaatagtggcagcgaactccaccatgggagattggtgtcgctagagcaacaagtctaactagcttgcagccttgcaggcaccagcaaccgtggcagcggagtggattttaaactccgttctcttgtttttgcatatcacttaaatagttttaaaaaattaaataaaaaatgagaagaatatattgacatgtg

SEQ ID NO: 10673 - DNA, 663 bp, Oryza sativa
  ref <308>: DATABASE ACCESSION NUMBER: AK108021
  ref <309>: DATABASE ENTRY DATE: 2002-08-28
atttgtttctctcgcccatccgattgctcctcgccgctcttcgccctcgtctccatcgtcgtcgccgcccaccaccgtctccaacctcgagatccttaaccctcgccgacttctccacagcctccgtctccgtctctacttcacgggctagaaccggcggcctcgagcacgtcgccactcgccaagtcgccatcggatccagcagatagaggctcgacggaggacgctgctgccatatccaatagagggaggcgtgaaggagctcgctggaggtttcggcgactgcccctctctgcgccaccgcctccaacctcgccggccaccggattcctcctcactggtcacggattccccatcttggctgcatctcttcccttccttcatcagccaaaatactaatggatccggcggccacgagctggacgctgccagatccagcagcctcgggctcatggccaccggatcctgttgctccgacagctccgaacagcagcgcacacacgacggcgaacggcaggtcggggcttcggcggagcggcaggcctagcgacatcaacgaagctcctctcctctctgtttctttttctgtttttttttcttttcttttttcaccgactagcaaaccgtgaccatgaaatgtgggaatataatgatgtttactgt

SEQ ID NO: 10674 - DNA, 702 bp, Oryza sativa
  ref <308>: DATABASE ACCESSION NUMBER: AK108022
  ref <309>: DATABASE ENTRY DATE: 2002-08-28
actctttcttctcttcgtttcaatctagcgaccgaacgcgagaagtcgagaagagaagcggcagcgacaccggcgccgcccaccaccactgcatcgccgccgcggcgtgcctcaccggtcccgccccccaacagctgcgccgccgcctctccccggtgagtctcctccccagccgccgcctatcctcagcgaaaccctaggcaccgagccggccgcatcgacgcgtacggccgtgctgtgtccgccggtgaggtgctggcggcgcaccccaaccacgtgcttagccggcagtgctcgtcgcagcagggggcgatgggccggatacacatcgtgtcgccggagtcgaagctggagtgcggcgagatctacttcctcatcccggccgcctccgtccccgacgccaagagaaggacgagcaccggcggcgccgcaggccacgggcaccacgtccgcagcaagtcggagggcaacgccgccgtcgccgattggttgggcagccagtgcagcgcgtcgccggagacgacaaggatgatgagggtgcagaagcaacaccaccaccaacaccggcggcgcatgagcaccgggagccatgcctcgccgtggcagccgcacctctcgtgcatcactgaggacccctgagcttagctttcatttttttttcttctcttctctgaattcatagtggtttttttgcctcctgtg

SEQ ID NO: 10675 - DNA, 671 bp, Oryza sativa
  ref <308>: DATABASE ACCESSION NUMBER: AK108023
  ref <309>: DATABASE ENTRY DATE: 2002-08-28
aacaaaaaaggcactgcaaatcttgttcagataacagcaagtatatattcagattgttcatagttcatttattgttcataattcagataacagcaagtatatatatacagatacagatagttcatagtcgattgatcgatcgaccatgaggcatgttactttcttcgcggcggttcttgttgccatcttcctcacctccggtggcgggaggatgagcagcacggcggcgcggccgacggcggtgggcggcgccggcgcgccgccggccgccgtggcggtggagctggccggcaccggcaccggcaccaacgcgtcgtcgcagccgtcgaactgcacctacggcaacaacgtcggcggccagtgccctcccactcccggcgctggccattagcaagagcagtgcacgtcgctgccatcaaatcgtgcagctgagctgcgtaattacgattagatattgtattaatcttgtgaatttttttttcatccgatcatgtagtattaatctttcctgtagcttgaaggtgattgcatgatcaattgagtctgtaattctgttggtttggttgtatttttttttaacttttttaggtaaaaagtcgggtgaattgatcacctgtttaatatactgtaattatctgttgcatggttaaacagcagtaattgcttcgtgc

SEQ ID NO: 10676 - DNA, 462 bp, Oryza sativa
  ref <308>: DATABASE ACCESSION NUMBER: AK108024
  ref <309>: DATABASE ENTRY DATE: 2002-08-28
aagctaagcagccacacagcccacagcgaaagaattcgccgaacagtggaaagctatagcagcagtcatggccaagcaccacaatcgtcgtctctccgtcgtcgtcgctctgctgatgctagcggcgtcgatcgtcctgctgcttcttgcgccgccctgcgatggtaggagacagctgaggggaagcgaggccaccagaggcggtggagtcggcgaggagaaggcgtcgttgctgccgcctccgatacccaacctgccgctgccgcccatcgtccccgggaatcctcctgctcgcaactccgtcgtcaacaacaaatctccatagctctcttcatcatcatgtctttttaagataagcttgttgttgagaggtagtaataatactctgttgtgtaccaaagcagagagtccttgagaggatcgttgtggtgtgttctttacgtgaaaaccatcggtcttttt

SEQ ID NO: 10677 - DNA, 832 bp, Oryza sativa
  ref <308>: DATABASE ACCESSION NUMBER: AK108025
  ref <309>: DATABASE ENTRY DATE: 2002-08-28
atcccactctctctcacccaacgaattccctcgcaaatccgtccaagttcatcgacacaagaagctcgagctcgctgtgtgtgcttgcaatggcgggggtgcacacgcacagggcgttcctgctctgcaactacctcctcctcggcgccgcctcgggctgcatcttcctcacgctctccctccgcctcctcccgtccccgtgcggcctcctcctcgtcttcctccacgccctcaccgccgtcctcgccgccgcggcctgctcgggctccttcaccgcccccggcggcggcggtggcacgcacacggcgcacaccgcgtccgccgtcctcaccgccatcttccagggtgccgccgcgctgctcgccttcacccgcaccggcgacttcctcgccgagctgcggtcctacgtccgggaggaggacggcgaggtgatcctcgagctcgtcggcgggctcggcgccgccatcttcgtcctcgagtgggccgctctcgccctcgcgttcgcgctccgcctcggcgacgacggcgccgacggcgacgaacacgacggcgggtacgccaagagctggcaatcaggttaccatgtctgatccatcgagactgatgaacagagaagcataagagaggaattcttcgattcttcttttttctttgtgtttatttactgaattcgtgcggctattcagctgtgattacagtgttgctgcaatttttttttactgctctcttcttggcttcttgaactaaagaagtgcaaggcaaatgtattgctttgctgtgtagtattcgttttcctttaccggatctggtataaattagaggaaatcatgtc

SEQ ID NO: 10678 - DNA, 1418 bp, Oryza sativa
  ref <308>: DATABASE ACCESSION NUMBER: AK108026
  ref <309>: DATABASE ENTRY DATE: 2002-08-28
aaaagaagaaaaaaaaaaatcgatccgcaaatgcgtcggcgttgcgtgcgagctccgatctcctaaacctcctccaattccctcaacgaaatctctctctcgatccgactctgctctctatccggcctcgatcacccccaccaacatcctcctccgattccctcgccttctccttctcctcctccaacttctcgatgacttccactatactaagctagctagcccccgccgatccccgcggggttttagtttagctccgcgccacccaatcgccgcaggtgatctttcccggtcaagaactcgcgattcgggggcggatacggaggaaggaaatctgtggtggattcggatcgagctcttcgttttcttgctctttgtataaattgcgatcaggggcggcggaaacaagggttcttctctgtctctcttcattagcgccggcgacgaggtgaggtgaggtggtggtggaggcgatcgaaatggggtcggtgctgtgctgcttggccgacgacggccgccccgtctgctgcttccgcctcccatggccgatcttcaacgccgctcacaaccacaaccacaactcgggttccattgctcgtccaagagcggatacacgagttgcgcctgatcaaggaagaattagtctcactgctccatcacagcatgattcgatggatactttccgctgcccgccaaggcccttgccttgggatgatcctcgattcagccatcatacagagcatcacccactagtaggaggacatgacaaagcttcaacaacgttccacaaatctggtagccttggagaaagcaagaatgctgatagcatatctaattccaaagctgtcaaggatgatgggccttccacagctgtgaaggatgatggatcatcagtaaaacaccattcagatggtctgcacattggcaaagagcaagtacatgatcttttcgactttgaggacgactgtccaatatgcctagaagagtatgattatgagaatccaaagatgacattacaatgcaaccacaatttccatctttgttgtatttatgagtggatggagagaagtcaagcttgcccagtctgctcaaaggtaatgctgttccatgaggattcatgatcataatgctgcaacgtttctgtgatgttggagagtggagactcacggggactggatcacctagatttgtgtacatagcttgacgaaaatcaaagtcgctagattgtttgctgaaacttccagcggcgcaaagattttttattatttttttgtttctgtagagcatataattcttttctcatttttcagaaaaaattggtagcttgtgtcaatccacatatcacatttcgattggatgttacagatgcgcgtttgagtgattgcatttgcttctgatgctgaaatacgaaacttctg

SEQ ID NO: 10679 - DNA, 2223 bp, Oryza sativa
  ref <308>: DATABASE ACCESSION NUMBER: AK108027
  ref <309>: DATABASE ENTRY DATE: 2002-08-28
taaactgaggatgtcgagtgatttcaactgaccgatgtcttgagggatcacaccactgaagttattattgcttagattcagcacttttgggaaagcactggttatccggtattgaaagcccgctgcagatctatatataggtagctcaaatacccttggatccaaacgggtggtattcttctttgttattagcattggcatctccattaaagaagctggaatcccccctataaggctgttatttgataggtctagatggaacagtgactctagtcttttgatccaaggaggtatagatccactgagtcgattatctagcaaaaataacatctccaacttttctagcttcgacagccataaaggtatatttccagacaatgagcaattagctatggaaagaaccttaaggttctgaaaaccatcaattgagttatcttctggcatggcttcgccatagaagttggtcccgataagaagggtggtgaggttcctagaatccttgaggatccatagcatgtttgtgatatttgtcaagttgttgcaaccaaccgataagaaagtaagggacttcaaattacttatttttggcgaaagctgaccttgtaaattgttactagataaccgaagtgcgaccagattggtgcaagagtaaatgctttctggaactgtaccttcaaatttgttgcccatgagatctaaagtttttagattggacaggttggagaagttcacattgctaagattgccgctgaagttgtttctcttgaggttaatcgttatgagatgtgtgcagttgctcagggctgatggaagctccccagatatgttattatcacccaaatggagatcttgcagccttttgagctggcctatagagtctggaatccatccggtaatgttattcccctcaagatcaagagttgacagatttctgaggttcactatgagtgtaccattaattactccattcaactcattatttgggaaagagaggtactccaatgaggtagcgttgaagagatcacccgggagattcccgctgaggttattgtgaccaactttgagcactctgagcttcaagcagttaccaaaaccaggggggatgctgccactaagatgattataacagagtgcaagcgctgtaagggatgctgagctgctgcagaaattactcggtatgtgtcccgtgaagctgttgttgctggcattcagcataaccagattcttcatcatctcccatgtggcagatggaaactgtcctgtaaacgagttgctcgagatgttcagtacctggagaggccggaccggggtggaagacggcagctcatgtatctctcccttgaggtggttgaagctgatgtcaaggacggtgatgctgctggacgccatcaactccagcggcaagccaccggacagcgagttgtgggacaggttgaggcgcagcaggccggtgaggttgccaagggacggcgagatacgcccctcaaggcccttggaagccagcgagacatcggtgaccgtcccatctgcactgcaggtgaccccttcccatttgcagtagtctgcggcattccgccatgacaccgcgagaccgccatcgttggagaggccagagaggaactggaggagggagctcctctcctgctctgtgcatgagctggtgggagaggccagagagagcaatagcagcagcgcaaaggcaagattgaacctaaggaaatctatgaaacatctattgctgcacttcttgcatgaggaatggagttgctgctgcttctgcatggcctccaagcaaatggtgcctacgcctgattctgattggatgtgcaaatgaaatggacctgatgatgctttgaggaagaggaggaagaagaaaacaaagcaagctgcttatgttgcagtcgtattcacaatatagaaaggaggattgggtcaagaataaggtgtagtggccacacatccacactgttgatgatgtgcacaattgccagtaagccactgcaggtgcagcttcctggttcacaccatataccagcacgtttcagttggagctgcctgccacaaaattttattaaaaatgtccaagtgcccaacctttttgtacaaaaaattgttgtctgcttttgcaatttgcatcctccctcgattatgtgattgttcaattggtattaaacaattgttttggtttacatgatgatatgagatgatattatatagtatgac

SEQ ID NO: 10680 - DNA, 1522 bp, Oryza sativa
  ref <308>: DATABASE ACCESSION NUMBER: AK108028
  ref <309>: DATABASE ENTRY DATE: 2002-08-28
atcttcgcggccgccggagagcagccagcagcggggtgcgggcgggcgcgggcgcgacgcgcgtggcgcgggtggagctcggaagcaggcgcagcctccacgggcgcaggcggggttgccgggacgcgcctgggcgggcgggcgggctcgaggttgtggtggggcgtgtggcaggatcctcctcgcgccgccatggatcagaggaaggcgttgttccgggcgaagctccgggagcgcgaggccaaggagaagcaggagaggcgcatcgacccctccctcgtcaggtacaatgaatttgatcagcccatctgcagaatctgcaatgttactctgaaatctgaagcactttggcctgcacatcaagtttcacgaaaacatcatgaggcaaaagccgctgcagctgcatctgctaaagctccatcaggtgcagggtctcgtggcaataaggccaatcatgaacaacctgcagagtctcagaaaccaaaatcttccacattgcctgccaacttttttgaaaaccagggaatgaagaggcatagtgatggcgctggttctgaaggaaggtctgtgcgtcgggaggtagctgatgttcagcaaaaaaccaaagaagcaagcaaaactaagccatctgtcaattttgagaaaataccaaagaaagaaagtcaagccaataccaatgtcaaaggtgttcttccagggaacttttttgactataatgatgaagatgaagatccagctcctactgaggcgaatagtgcacctggaaatcctccaatttcaaatcgcatgcaggtgaaaggtgtacctgatggcttctttgatggcaacaaaaacagcaatggcatgcaacccagtgaaccaagtcaatcgtctaaagccgtaaagagttcagaaacttctgaagtaaaaggatcgctaccagaaggtttctttgataacaaagatgcagatctccgtgctcgtggtatccaacctccgaaaatcgatatcaatgatgcttacaaagaatttgagaaggaaattcaggaggacttgcaggaagttgatgatcgccttgaagaagaggagattgatgctgctgctgagagagaagagtacttgacattagagcaagaggagtataggcagcgggtggatatgctgaagaaacagcttaccgagtcaaaagccgcccgtaccactaaagcaaacagcaaacctgttggtatggacatgttgtcaagcagcgactcatctagtgacgaggaagatgacagcacggattttgctgttgattggagagcacaacatttgaaatgatgtggagatttttgtgattggctacccaccgacgatgacaacatagatctgttagcatccaccattgtgcatccgtgacaatcagatcccagcacctctaggtttctgcttgaggagaagatgatctcttttttttttctgttgcatcttgtcttttatcggaaaaatgttcgagctaatcatgaattaacacgatgagaatagttttggagaaaaaaaaaac

SEQ ID NO: 10681 - DNA, 1723 bp, Oryza sativa
  ref <308>: DATABASE ACCESSION NUMBER: AK108029
  ref <309>: DATABASE ENTRY DATE: 2002-08-28
cacattcagagaaacaaggctgcactcttgctgcagatcaagcggaggacttgcaatggaggcaaccaaggagacccagcagcagcagcagcagaggaagccggacgccggcgacacggtgcagctgccgatggacaccagcccgtacgtgcagtacaagaaggacgacggcctggaggactacaagctgcgcgcctacggcgcccgcggccacctccccgtctccgacgtcccccacggcggctgcggcaccgacgcccccaccatccccggcaccgccgtccccgtcgccacacagcgccgccaccaacaaggcgacaccgccgctgccgccgccggcaccggccgcgttgacaccgccaccgacgccatcaatcaccatggcgtgccatagacggtctgcatcccttggcgccgaagccgatcctctggttggcaacgtcgtacgcgacggcgaacgtcttctgctgcgtgttcccgaggatggcgatggacgagtcgtcggcgttgggcgcgaacgccaggcacgcctgcgacaccttggagacgtagagcacgccggtgaagtcgaggctgacggtggcgccgccggcgaacgccagctccaccgtgggtatctgcgccgtccggtggccggtgaagtcgtagcacgtgtcgaggatggacagcgcgggcgccttcttgtactgcgccatggagcgcgcgaacgccgcgcggagcggcgcgtacgcgcgcggcgggaggcgggtgatcaccgtgccggagtcgatcaccgtgccgccggccgccgcgaacgccgtcgccgggatcctgatcgcgcggccgccgaccttgatgccgacgaggtcgatgtagtagaacgacggcgtcgcgccgtcggccagcgccgtgaactgcgcgttcgccggcggggcgccgccgagggacaggtagcccctgccgctcgacgacgacggtaggcagtaggtgaatccggggccgtagctcggcgcgccctgcgacggcagcgacaccttctccctgccgaggccgaacagcccgtcgacctggccgaacagcccggcgttctggtcgccgcacccgaagacgaagcccgggagcgtgtccgacgccgagagcgtcagcgtgtcgcgcacgaggttgccgtcggtctgcgactggtcgccgtactggacctcgtaccggcacctgctgtccgacgagcagcccgacgcgtcgagctcctggcactccggcgcgccgcacgccacggcggcgtacgtcgacgacagcgacgggtcgaacagcgggtcctgctgctcgtagcagtcggcgcagggcttgcactgcacccacgacaggtcgctgccggtgtcgaagatcacggcgtactgcttcgccggcgtcccgagcccgacggacacgacgtagttgccggtgccgagggagatgcccctctgcgccggcagcgacacgccctgctccgaggcgcgtgccgggtcgaccaccgacggcgcgcccccggcgccggcgaccttgcggtggatggagtcgaccctggcctggtcgcgttccaggatctcggcgtgggtgacagcgccgccgccgccgcgaggacgagcctgcaccggcgagcacggcccgtgccggtgcacgacgccgagagccgacgagttggacgccgctgcaagaaaaacagaatgggaaaatgagaaatgcaatttgtgcaaatgcaactcgaagc

SEQ ID NO: 10682 - DNA, 1309 bp, Oryza sativa
  ref <308>: DATABASE ACCESSION NUMBER: AK108030
  ref <309>: DATABASE ENTRY DATE: 2002-08-28
atcattcgcctcgccgccgcccgcctgttttctcggtcgcgtgctagtcgccctgagaagaagacccgctacagtagggctccaaaatccaatcctccgatgatggctcatctggcgccgctcttcctcctcctcctcctcctcctcctcccgctccacgccgccgccacgccgtccgcccacccggcctaccccaacgagccgccgtcctgcgcggcggcggtgccggtgccggagcggcgggaggcgcatggcggggggcgcatcctggacataacccactactaccgggaggacatgccgtcgtgggagtcggacggcggggtcggccaattcctgtggctccccgcctccatgcgcaacggttcccgcgccaacaactccgagatgcgcctgcccacccacaccggcacccacgtagacgccccgggccacgtcttccagcactacttcgacgccggcttcgacgtcgactccctcgacctcgaagtgctcaatggtctggcattgttagttgatgttccaagagatgataatattacagctaaaatgatggaatcattacatattcctaaaggaattcaacgagtgctatttagaacactaaatactgacaggcaactaatgtggaagaaagaatttgacactagttatgtgggttttatggaggatggcgcacaatggttggtagacaacacagatattaaacttgtcggaatagactatttgtctgttgcagcttttgatgacttgatcccgtcacatttagttcttctcaaaaacagggatatcattcttgtcgagggcctcaaactggaaaatatcatgcctgggatatactccttgcactgcctgccacttcggctgcggggtgctgaaggttcaccaatcagatgcatccttataaagtgaaggggactaggatcagtgcgtttgctagtatcaatgcaacttcagttgcactggatcactgcatgatgcaggtctgccaaataaaattgtgtcatgtcggtgctaagctcttggacttggaagctgtacagcatagtcgtaaaacacacaactatcgatgaactgcacaatgggcacattctgcgacttctcttttgaacaaactcaattgaagtttagggcccctttgatttgtatgaaaaatgtaggaattttggaggatttcaattctatgaaggcctttgaaataaagaattgaatcatatccaattctttaaaattcctatggaataggtaattctatgtacattttgaaggaaagttagtaagaggtctaacctccaagtctatctctctc

SEQ ID NO: 10683 - DNA, 1268 bp, Oryza sativa
  ref <308>: DATABASE ACCESSION NUMBER: AK108031
  ref <309>: DATABASE ENTRY DATE: 2002-08-28
agccaccgacgccgcaccacctcgccgtcgccggcgcaggcgcagccactggaagacgacgacctcctctccgagatcctcctccgcctcccggcgaagccgtcctccctcccccgcgcctccctcgtctgcaagcggtggcgccgcgtcgtctccgacgccgtcttcctccggcgcttccgatcccaccacgggaagccacccctcctcggcttcttcaaggtcagctacagaaatcccatcttcatccccacgctggacccgccggaccggatctccgcggcgcgtttctccctgcagctcccgctccccggtggcggcggtggcagccccccggtttttggtcacttttaccatatgttcgcattccgccacggccgcgcccttatctacgaccggagcttgttgcaaatcacggtgtgggatcccgtcaccggcgaccggcgcgccgttgatatccccgagccgttcggtcgccggccggcgtacgtctccaactgggcgatgcgatgcgtggatgggcatgtgcacggcggctgccactccagtccctttgaggtggtggtaataggcttcaataagtaccggaggcggcttttcacttgcgtttactcatccgacaccggcaattggggcaaggtcatctcaaatgcgtttaattttagggggcacaagactcgttctagtacccctggttgggaattttttttattgcttgttccaaagtgttattgggaccgtcatccttcagtttgatttggatacacaaataccagcctagatcgatgtgctaccagaaatgcatggcgatggaggtgaccagattgcaccagcagaggatggtgggcttctcttccttgctgtgcgggattttagtctcaatctatggaagcataagatcaatagtgacagtgctgctgctggatgggtgctggagaaaactattgaactggacaggctccttcctttcgaaccaaggcctgatactgatacaccggcaccaatgaatattctgggctttgctgaggaacataatgtggtatttctggcaacagctattggtgtcttcatggttaatctggagtctgcaatttaagattcttccccaagccccgggagtaggcatctgtcatccattcactagtttttatactaaaggtaattatttgccatgccttttacactgtacgtatagaaaaatcatgttgttttcgattgctggttgcttgttaatgccttatttgctcagtgacatttattgttccttt

SEQ ID NO: 10684 - DNA, 1474 bp, Oryza sativa
  ref <308>: DATABASE ACCESSION NUMBER: AK108032
  ref <309>: DATABASE ENTRY DATE: 2002-08-28
cgtatcctagctgtgattacttatcacaagaagattctgaaaacagatatagatcggccaactgcttgcaggacttatctcacaaaggcggagtatatgaaagctaagccatggtggttcctaaatgctggtcgtgcgtgggcattattgtcagatttgaggtggtgcaatccagaatggcaggcttactcccgtgcttgtagcgaacgcagggcaaagatgaaaacgccagcccatcgccaaggcagtgctaaccttcatcgttaccacaagaatttggagaagaaaatgggcacaccagtgcatgtattgaaggcttatgctcatgccaatagggtagacccagacgagggctactgtgatgaagattcatctcagaatatgttgctcgaggcctatgctcgcgcttttactgagaggcacggagaagacagtaattggcggactgaacccattgatggtgtggctgtgcacatggctggtggtggcaagaaacatggacgcttcttcctgcttaatggactccttaagacaccagatgttcttgctgatgttgggagaagcaggtgctcacttgatgatccacggcctagcagacggctgaggccaaaccctgatgatagtgcccggattgaggagcttgagcgtcaacttcagtgtgagcgtgaggagagggagcaggagagggagcgggcacgcgaggagagggagcaggagagggagcgggcacgtgaggagagggagcgggcacttgaggaaatggagcggacacgcaaggagatggagcaggagagagagcaggcacgtgtggagcgggtacgtgagcacgagttgttccaggagaaaacaagctattttacatgtgctttggaggtactgcaaagaaagctcaacataaactttctgcctccttgcacacctacgttgactcatccggctacatctggatctgaagtctctattggaaatccagttaccaccactgagtgactggtccatgagccaaatatcccagtgcaagttaacctggatgttggtgccagtaatagcaggcagcagctttaggcgtgcagtatctgaaaatcgctcttcaccgaaagaactagaaattgggaagtcttttgtgataccagaaacttgtgggtgttttggtgtgatgtaactgtgaagtaggactgtgccaagtcctgtttgttctggtgtatgtcctggttgttgtgatgggctcatgttggtacccattggttgttcccactaattatctgtaggtttgttgagcagtactaattggtaccagctgatgaggtagtatattttgtgtagtcgttatcagctgatgaagttgtatattttgtgtatgcctaacggtgctgtgcgctgtggtgagatgcacatttagtggtggtaacttaagtactttgtagggaagaacctatgctgatggaaagtattaatgaagcttatgaacttcatt

SEQ ID NO: 10685 - DNA, 1734 bp, Oryza sativa
  ref <308>: DATABASE ACCESSION NUMBER: AK108033
  ref <309>: DATABASE ENTRY DATE: 2002-08-28
gagcttcacgccgtcctcgctcgccgcgctaaaaatttcgctccgcccgccccccaactctcctctcccgccgccgccgccgctgccgcgcaactcgccggagagagaagggagcggcccatttctcaggcgaacatgtacgacgatggtcctcgcaagggaaaacccggcggcctctccatggacgccgccaccgccgcggggctcgcggcggtctggccggagtacttcccggaggagagcgagttcgccgcggacggccgcagcgcgcgcctcgccgccgacctggtcgacctcttctcctcccccgacgcgagcgacctcctctcgcgagtcgaagatgatggtgatatcctctcccttccagttgatttccagcagctatcgaatttgacctggattactgaagctctccaggaaaatccaaaagaagccttgctttccatgggagctgcagttcatctgattgtgtgtgctagcagggacttgcagttgggcgacatcaacaaaatcaatatcaggctttacaaccacaccaagactattgccttgaagaatttaaaagcggcgtatattaagaaacttgtgacagtgcgtggaacagtcttaaaagtaagtacggtgaagcctctagtgctgcagctgaatttccaatgcatgaaatgcgctacaaaattccctcgtgtgttctgtgatgggaagttttcacctccagtatcgtgcagtattcagggatgcaagagcagaacattcataccaatgagatctactgcaaagttgatggattttcagaaaataaggatacaagagcttgctagtggtgaaagccatgaagaaggcagagtgccacgaactatagagtgtgagcttacagaggatcttgtagattgttgcatccctggagagactgtaacagttactggaatcgtcaaagtactgaacaactacatggatgttggaggagggaaatccaaaagcaggaaccaaggtttatactacctgtacctggaagcaatttcagtaagaaactcaaaggtccatgctgcttcaggaaattcagatgctgctagtggatctttcggttttcaagcttttactgaaaaggatcttgaattcatctccaaatttaaggaagaacacggtgctgatgtttttcgtcaaattcttcactccttttgcccctctatctatggacatgaacttgtaaaagctggtatcacccttgcgcttttcggtggtgtgcagaagcactccattgatcaaaacaaggtcccagtgagaggagacattcatgctgttgttgttggtgatcctggactaggcaagagtcaactgctacaggctgcagcagctgtttctccacggggtatatatgtttgtgggaatacaacaacaaatgctggtctaactgttgctgtggttaaagattctatgtcaaatgattatgcatttgaggctggtgccatggtccttgctgaccgtggaatatgctgtatcgatgagttcgataaaatgtcagcagagcatcaggttttaaccttgtataagcttcactctgaaatgttaattagaaagccctaacctgccacatcatgtttctaatgaatttgagttcataggctttactggaagccatggagcagcaatgtgtatctgtggcaaaggctggccttgtggcaagtttatcagcccgtacttctgtgctagcggctgctaatcctgttggtggtcatt

SEQ ID NO: 10686 - DNA, 1384 bp, Oryza sativa
  ref <308>: DATABASE ACCESSION NUMBER: AK108034
  ref <309>: DATABASE ENTRY DATE: 2002-08-28
cacttactaaatgggctattgaatatgaagaacctgctggggatgcatttggtgaaaaccatccagaagctgcagtatttgtcgaaaactgcaatgtgattctgaaggcaattatggacaagtgtggtgattctgatgattgcatctccacttctgaggctgctgaacgagcagctaaactttctgaggacaagattaagaatctgcccgtgcctggcgaagtagaattcataaatggtggccctccgtgtcagggtttttctgggatgaacagattcaatcaaagtccctggagcaaagtccagtgcgagatgatcttagcattcctgtcatttgcggagtatttccgtcctagattctttctcttagaaaatgttaggaactttgtctcgttcaacaaaggacagaccttcagattgacactggcatcactcctggagatgggataccaggtccgatttggaattttagaggcaggggcttatggtgttgcgcagtccaggaaaagggcattcatttgggccgctgcacctggagagactcttccagagtggcctgaaccaatgcacgtctttgctagccctgagctgaaaataactctacctgatggcaagttctacgccgctgtcaagagcaccgctgcaggagcccctttccgctcaattacagttcgagatacaattggggatctaccagctgtggaaaatggcgccggcaaaccaacaattcagtacggaagcggtcctgtgtcttggttccagaagaagattagaagcgacatggcttcactgaatgaccacatatctaaagagatgaatgagctgaacctcataagatgcaagcacattccaaagcgcccaggttgcgactggcatgacctgccagatgaaaaggtgaagctgtccacagggcagatggtggacttgatcccttggtgcttgcccaacacagccaaaaggcacaatcagtggaaaggactgtacggtaggttggactgggagggcaatttccccacttctgtaacggatcctcagccaatggggaaggtcggcatgtgcttccatcctgagcaggacaggatcattactgtccgtgaatgtgctcgatcccagggcttccccgatagctaccgtttcgctggcaacatccagaacaagcacaggcagatcgggaatgccgtgccaccgccccttgcctatgccctcgggaggaagctcaagcaagccatcgacgccaagcgttgagtggcttttaacttcactgcatcgccctcattttttggtcggtccaaataggtttaactaagcattacagttttctatattttgtgagcaattggactcctaaaattaattctgggatggttacatggattaccttttgt

SEQ ID NO: 10687 - DNA, 1551 bp, Oryza sativa
  ref <308>: DATABASE ACCESSION NUMBER: AK108035
  ref <309>: DATABASE ENTRY DATE: 2002-08-28
attccccacaccccaaaatcccttctcgctcgccgccggcgatggaggcggcggcggcggcagccaagaagcggaggtttggtcggtccacgggcaagggatcgctgggtagtgacggcctcgaccacatcagctgcctccccgaagccatcctcggtgagatcatctccctcctccccaccaaggacgccgcccgcacgcaggccgtctcccgccggtggcgcccgctctggcgctccacgcccctcaacctcgacgtcgactcgctttccacccaggagcgcaagcgcaccatgttcgtctccaggatcctcgcctcccaccctggccccgctcgccgcttgtccctccccttcttccgcctccgcgaccggtacgccaagctggacggatggctccgctcccccgccttcgccgacctccaggagctcgacttcagctacgacatcgaggacgaggaggcgctctacccgctgccgccgtccgcgctgcggttcgctcccaccctccgcgtcgtcgaactccgcacatgccatttccccaacggaatggcaccggcgctgcatttcccacgcctggcgcggctcacgctgtaccgcgtcaccatctcggaggacaccctccatggcttgctctcacgctgctctgcattggagagccttttgctggtggggaatttcggcattcgtcgccttcgcatcaactccccatttctcaggagcttaggcttctctgcttcttcttgggaaggatatcgtgatgccaacttccaggaggtggtcatcgaggacgctccatgcctcgagaggctgatgccactttatcccaatcatggtccggcgaccattcgggtgatcgcggcgcctaaactggaggtactaggtgtgctctctgatggcatatctcaactccaccttggaacaacattttttcagaaaatgattgctgtcaacctgacaacctcgattcgaacggtgaaggttttggttcttgattcaaatggccctaatctggatgtagttgttgacttcctcaaatgcttcccctgcttggagaggctgtatgttgtatctcgcccacataaggttatcaagaatataaggagctatgacccactacatccaatagaatgcatggagctccatctcagaaaagtggtaataagatattatgaaggcaagaggccagatgttgactttgccaagttctttgttctgaatgcaaaagtgctaagagaaatggatttctgtagccctagcaatcgcaatctgaaatggcaggataaccaacacaggcgcctttcattggaaaataaggcttctcaagttgctcaatttacatttaaaactacctctaggactaggaatgagttgactaggaacaggcatacacatgaattgtcaatgtctgatccttttgatttctcttcatgtctatgctcttcatgtcgattcttcttccagttatgatgtgcttacagatgtcttatatcctgttcaaatactagcatattttgtacctgctcttatttgtatcttaaagtttctttgc

SEQ ID NO: 10688 - DNA, 1482 bp, Oryza sativa
  ref <308>: DATABASE ACCESSION NUMBER: AK108036
  ref <309>: DATABASE ENTRY DATE: 2002-08-28
aattccactcgcttcctcacctagccctctctccacgatacgtccagtccagccatacgattcgatcgatcgccatgggaaagctcaccgacgtgacacgctccaacgacatccagctcaagatcgtgggccactccttgacaatggccatggacgacggcgagttcttcagttccaggcggtattgcgtcggcggacacgactgggagatccgcctgcggccgaaggatccctgggttggcaggcgcgaccggccgctcacgctcaagctcgtcctgcgcggcgcgccccgcacaggcagcggcagtgtgaaggcccagctaagctgctgcttggtagatccgacgcagaagctgaggccgtcggagatgaagaccgtgtcgcataagttccacaagcccggtgactactcgccccgtgccgtgttcatggcaagggacgagctggaggcgtcgggctatctcacagacgattcctacgtcgttcagtgcgccatcaccgtgctccgagaacagccggagatagccgcggcggcggcagcggcgggcgacagcgcgaatgcagccgtggcgccgtcgtccgagttgcacgcgtaccttggcgccctcctggagagcaagaccggcgccgacgtcacgttcgtcgtgtccggcgagtcgttcgccgcgcacaaggctatactggcctcgaggtcgccggttttcatggccgagctgttcggggcgatgaaggtgaaggcctcggagcgcgtcgaggtcaaggacatggaggcgccggtcttcaaagccattcttcacttcgtctacactgacaccgttccagagctcgaccaccgtgatggcgaggagacggaggcagcgtcgacggcgacggcgatggcgcagcatctgctcgccggcgccgacaggtacgggctggagaggctcaagctcatctgcgagagcaagctcgccgagcgcatcgacgtcgacacggtgtcgaccacgttggcgttggcggagcagcacgactgctcgcatctgaaggccaagtgcgtcgagttcattgctgccggcacggctgaaaaccttgatgctgtgttggccactgatgggttcaaacatctggaggcgagctgtccctcggtgttgactgaccttgtcaaggttgcccgtggaagaaagaattaaaatgcaggtaataagcagagaagatttcaagttgctcctggatgctggcgatgagctgctgcggacttgctgagagcaaacaaatcttcaatttgcttatatgtttgctctatccttttcttttgtgattttgccattggatctgttgtgtgatgcccatgatcatacggttctcttctgcagtgggcaattcgtagtaattagacgcaaccctgtctaatccctctgctactctgtctgtgtagggcctttcatttcagtttaatctgtaattgaaacgggtatatcccggttcagaaaaacatattggagt

SEQ ID NO: 10689 - DNA, 1326 bp, Oryza sativa
  ref <308>: DATABASE ACCESSION NUMBER: AK108037
  ref <309>: DATABASE ENTRY DATE: 2002-08-28
gtgccagccacacatcaagtaagctaagctactgagctaactcagcttagctaagcttagctagagctcaagtgattaagcaagaacacttagttactcatagataattaattaattaagatttgtgagattaccatggcttcgaggagtagctggcattgctgcttgctggccttcttcctcctctcgtccgccgccggcgccgcctacgggcagcagctgtcgacgacgttctacgcggcgagctgcccgacgctgcaggtggtggtgcgcgccaccgtgctcggcgcgctcctcgccgagcggcggatgggcgcgtccctcgtcaggctcttcttccacgactgcttcgtccagggctgcgacgcctccatcctcctcgacgacgtgccggcgacgagcttcgtcggcgagaagacggcgttccccaacgtcaactccgtccgcggctacgacgtcatcgaccagatcaagcgcaacgtcgagctcctctgccccggcgtcgtctcctgcgccgacatcgtcgccctcgccgcccgcgacagcaccgccctgctcggcgggccaagctgggcggtgccgctggggcggcgggactcgacgacggcgagcctcagcgcggcgaacagcgacctgccggcgccgtcgagcgacctcgccacgctcatcgcggggttcggcaacaagggcctgagcccgcgcgacatgacggcgctctccggcgcgcacaccatcggcttctcgcagtgcgccaacttccgcgaccgcgtctacaacgacaccaacatcgacccggcgttcgccgcgctccgccgccgcggctgccccgccgcgccgggctccggcgactccagcctggcgccgctcgacgcgcagacgcagaacgtgttcgacaacgcctactaccgcaacctgctcgcccagcgcggcctgctccactccgaccaggagctcttcaacggcggctcgcaggacgcgctggtgcagcagtacagctccaacccggcgctgttcgccgccgacttcgccgccgccatgataaagatggggaacatcaaaccgctcaccggagccgccggccagatcaggcgcagctgcagggccgtcaacagcagctgatggattattgcttatataagtgtaattaattaaggcattaaacatgcttaattaatatgttcatggtgattcgcagctttgatgttggttacaaaggtgaccaacccatatatacacatgatatacatggatgaataagtaagctatggaaagtacacatatgaccttgggttgaaaagtgatggatcaaccaagcaaggtcattat

SEQ ID NO: 10690 - DNA, 1094 bp, Oryza sativa
  ref <308>: DATABASE ACCESSION NUMBER: AK108038
  ref <309>: DATABASE ENTRY DATE: 2002-08-28
tcctcgtcgccgtcgcgacggcgtgggagcgggagcggagggcggagggttcggctggcggtgcgccccgcgccggcgtcgcggtcgctgccgcggcgggaggggagcagggccctcgcgcgctccgcgtccgagccggcgctcttgttgagcggcgggcgcgtccaccccgagccgcgggggctctccccgccgtccccgcctccgccgccgctggagcgtccgcacacctgcttcgacgtcttcaccccggactcccccttcggccgctccgcctccgccgcctccctgtccaactgcaatcccagggaggaatcaaaggtggtggtgagcgtgacagtcgaggggagcgtcgggcctgtgaaggcgatggttcggctgggtgcgagtgttggggaggcgatcgcagccgtggtggagaggtacgcgaaggaggggagaagcccacgtttggatccagctgccgcggaggccttccagctccaccactcccacttctgcctccagagtttgaacaaaaacgataagattggagacgtgggaggtagaaatttctacctacacaagaacgatggaaataacaggatttacctccaaagtgaagaatctggtacaaatttggttggtggtgaaattgcacacagctttggaggacaacagattgttgctataaaccacgaccagttctttgccattttcatcaagaagctagataaaattggcaggctgacaaaaaggatttggaggttactaacttgtaattgtacatgacctgaccctgtggatggtttggtaaggatccatccaagtagcagcttaagagtatagggtagagtataaatcttagcatcagtaaaccggtgtggtaccattatacttaggcctagcccaaaatctctcactgctgcaagcatctttcttcagattattaaccttgaagaggatgataggtgaaacacagtactagaggtttcaagcaccttcctactaagatgtcagctccttttatccgtagctgactgtgttgtggattacaagaagtgcaataggaaaacaaaatgggttaccaaaggctttgcatcagttttcgtttt

SEQ ID NO: 10691 - DNA, 1454 bp, Oryza sativa
  ref <308>: DATABASE ACCESSION NUMBER: AK108039
  ref <309>: DATABASE ENTRY DATE: 2002-08-28
atgcctgggtgcgcgttcggcggcgctctcggcgttctcagctgcagccgccggcggcgaacccgatcctgctgctcttgacgtcgtagacgacgctgaacgtctgctgctgcgtgttcccgatgatggcggcgctcctggccggcgcgaacgccaggcacgtggtggagtcgtcgacgtcgacgaggaggttctgcgccgacagcttgagcgccgcgccgccggcgaaggacatggtgaccgccggcgcgctcacccgcgaggcctggcccttgaagcacgtgtcgaggatggagtacgccgacgcgcgggacgtccccttcatggccgccgccaccgccttgctcagcgccgagtacacgctcgtcggcaggcgcgtgatcaccgtgccggagtcgatgatcgtcggcaggctggagtacgccgacgacgacacggacagcggattcccggcgaccgtcatcccggacagcttgatgaagtagagcgagtcgtcgagcgagctggacaccatcggcgtgtacgagtattgccccgggttgtacgacccgagcgacaggtaccccgatgacgacgacgacgggaggcagtaggtgaaggagtagccaaggcttggcgcgagctggtacaggagcgagagcttgttgcgggcgaggccgatgagcccggcggatcggccgaacaacccctcgttgtcctggccacagccgtagtagaagtttggcagcgacgtcgagccgaacgagacggtgtccttgctgaggtagccgacggagaaggagctgtcgccgtagctggcctggtagatgcagacgttggaggaggagcaagccgacgggttgagcgtggcggaggggaggtcgctgcactgctgcgcggagcaccccacggaggcgtaggtgctcgacgacttggggttgaacaccgggccggactgccggtggcacgacacgaggcacggcgagcactgcagccaggtgagcgaggagcccgtgtccacgaccatcacgtactgcgtcgccggcgtgccgaggcccatgcgcgtcacgtagttgcccacgcccacggacgcgccggggctgagcggcacggacgcgagggagccggcgaggccggcgtcggcgtcggcgtccagggaggtggcgcgcgccgacggcgtcttggcgaggcgcgccgccagcgacgagatgcgcgcatcgtcgtgggtgagcaccgccgtgaacgggaggtcggccgggaccggcgccggcgagcaggggctccgcgggtggtgcagctcaaggtgcaggcccgtgctgttcaggtactggaaatctgcacaaaattcaccggcacgtccttaattcgcccgcgtcaattcatccaatttttaccgcaaccatgacaaaaaaaaactactttaaaattagagattctaaacaaattctgccgcggctataaggccatttgcaatt

SEQ ID NO: 10692 - DNA, 1616 bp, Oryza sativa
  ref <308>: DATABASE ACCESSION NUMBER: AK108040
  ref <309>: DATABASE ENTRY DATE: 2002-08-28
atccaccccacttcgctttcgtcagagatcgccgccgtcgccgtcgccgccgtcgccgccgccgccgctggatggaaccggatctgcctgcgcgtgctcgatagcttgcaagaccgatcagttggcgaatcctgaatgccgcagcggcgcagccgcctcggctgcttcccgtcgggcggcgctcccatggaaggatggggattggttccgttaacgcagatggtttcgccttggcctggggctttccatgaataaggcggcgccggcgtgctttgctgctttggacaacgcagcagcggatgcccttcaaagttcaaactcgtcacctggcaagagaaattgggcataccagtagagtcggccaaccggaggtacagattctcaccaatgttggccctcccagtgtcagcaagttcccctgaccaaagcaagcaccttgcctggtcggctccggtcaagttggcgtaagcgtaggccgtgcacgagcagttgcggctgcactcggccgcgcactcatcgaagcttctattccggacatgcaagaacttgtcagggaccttcattccggccatggtcacgaagcgatcatctctgcctcggcatctcaattgctgcttcctccggcatcctctcgaagaagagttggagccatcaggctcaaacccatcgaggcattggcacctcgggatggctgccgttgcgtcgcagtagccgaatggaccacacgaggcgtagggatcgcacacgatggtgggtgatgggcgctggacgacgactgtccatgacgacgcgctgtcgttccaagccaggaacttcaagatgagagaggtactgaatgagaagaccgaagaccacatgctgctaggcccaaatccaataaagcggatatatggtctggtaccgttccaaaggaagatctgaaggtttgagctgggatcaccgctgatggagaagtctccggtggaggggtcatctgggcccttccaagcgatgcaccgcatggcgacttgtgccttgtagctcaccaaaaacctcatgcccatcagaagggtgtcagttgggtgatcaaagctctgccatatggttgtaccattcggcaaccggagaaccaagttccccgagtcgagcagcgccgcgtaagctccgtcgcctccggtggccgtgacgttcgtcgtccaaagggtgtgattgccggaatccgacaggacaaggttagagctgttgctgatggcgagcgttgcgaatgaaggggtggtgattgggttgtcgcggttggcgacccaaacgtacgtgcgctcggactcggagatgttgtggtaccatatgccgaggaagaagctctggttggaggctgttggggagaagaagccgagcgcgaagaccctgcctttggagatgagtacgtcgccgggggagatcagtcgatttgcctgtgtgagctggtcatcgcctttgcaggaagagatgaggaacagcaaggagatgaaaactgggaggcaggccataatctggtaaatctcatatggccttgttcttggctcgcctgtggctatgaagcgtgaacaattggcacctttgatttttgctactaatccatacacgactcttttctgaac

SEQ ID NO: 10693 - DNA, 2128 bp, Oryza sativa
  ref <308>: DATABASE ACCESSION NUMBER: AK108041
  ref <309>: DATABASE ENTRY DATE: 2002-08-28
agtcctctctgtctccattgccggcgttactcatcccctcatcaccgcggctccatcccacccctgccgccgccgtataccccaccggcaccggcgcatcacatccacctctaatctcccgctaccctgaagaaggggggaaagggttgacagatgaatagcgatggcgaggaggagggtatccgcaggagctgcgtccacacctattcaccaaatcggtatccagggcagaacaaccaaggtcactctcttctctattcctcattctctgtttccttctctatcttcctttcttgactgttgattggatgttagcctttcaaatactactatattgatctgtattatatgtatgcaccttatgaattccaatattaattatctttattaggctttatttcataagcccaaaatcgtatcaatttaggctccatgattggctataattacaattgagaaaatcaagtttgggacaactgagtagaactgcaagtatcagcaaataaaaatattttgtagaatgtagatctgtttacctattctcaaagtaaatgattctctaaggtatcgcacaacagatgatgaagtgtatctaaatgtttcatgaatcacaaacaaatacaccaaaagaaaaatcccagctttagcttcagagggaccagacaaattagagactcatgtaaatcgattatagttagtattaatttacagatgcatatactgtacagctcaagtcaccaatgcttaattacactaataatctattcatggagagtggattactatcttcatttatgactgacttagaaaaatatttgctcatggaaaggatttcagcagtttacataagggctgcaataatgtatacacttctatcttgctaaattgtgtgcgctactattaaaaaggataattattcgggtaccagctttagttggtatagccttcctgattcctattatttaatttttttctagaagttatttatatcgctgctactgaagacatctcgactgaaattatttttccctgcgcctgcaacagtagaaagttcagtagcacatgttgatttagggataaccctaactgtttaaacaaaaaaggttaactcacacaagatgtagttttggccaacatcggcccgtattaggatgcttcattctgatcctattttattttgcatcagcaggcactgcacggctgcagcgttgtaattaaatcatcgacatcagtggtggggccttatgcttgggtacgcagcggaggagggagaaataaattatctgtacagaccatcggtaagtaatatttacacctatccttatttttccaagtgccagtaaaatgtcttagactacttgatcaagcatagaattgagctataagagcaatgagtttcaatgatattttgtgtgtgtgtagaagtgtgaatgatgtgtcgacaggaagaatgggttctcgtttaaaattaaacaaggcatatttacaagaaagaattataatacgttaattgctagctttgtgattatgcaccacccataaatcttgcttagaagtttaattaacggtattatggtaatttccacgaacccgtagattctttactgtcctaataggcctaggtgcatttcttatcaatccaaaggcaataccatgcatgctgctattggaatatttggcagagctttagatattggattatcatatgacacctatctatatctgtaatactgtagtactccatactcattaatcattgtacaaattgaggagcatatctttctatcatttttacatgagactatgtccttactggtccttctcatatgagattagctcataagaatttcatactttttgtttttgtgggtgaataccaacgtgcatttggtggaagaacataaatcaactggtcctgctaatctatgatttgctcttaaaaagattatattttttatgtttccaggtgaataccacggtaccaccatgcatttggtggaagaacacaaagctactacatttgtttttgttattttattagatttgggatcaaattttttgtgggcatgtacattataatgtactactacgcatcacaatataaatgcttaggatcaagttgttactc

SEQ ID NO: 10694 - DNA, 1648 bp, Oryza sativa
  ref <308>: DATABASE ACCESSION NUMBER: AK108042
  ref <309>: DATABASE ENTRY DATE: 2002-08-28
aatgctccaggctccagtataaatgtcactgacactgagtgagcgagtgagtacactactcatgcatgacactatcctaattagctttagctagctagattgacgaggccgatcgaattagcatacgatcatgatgagtttcccgtacagctccggcgacctcggcgaggccaccaccgccgccgccgccgccgttgacatgatcacgctcgaccagatgttcagagactatgatgcctccaccggcgacgatctcttcgagttggtctgggaaagctgcggcggcggcgagatcgacagcggcgccggagaggtgcagcctgctggtgttccctgctgccgtcgattgctgccgggatcgtcgccggagccgacctccgaggacgagatggcggcgtggctctccacgattgtcaccggctctggcggcggcggcgacgacgtggctgccggcggagaccatcaagatccggcggtgaagaagcccgacggcgagccgttgacggagaagatggataagaagctcccaacaagaacggaagagaggcggcgcgtcaagcacaaagcaagaagaaatcctggatacgcagaaacacacggcttaacagagaagagacgaaggagcaggataaatgagaagttcaagatgcttcagcggctcgttccagggtgcgataagtgtagccaatcctcgacgctggaccggacaatccattacatgaagtcactgcagcagcaacttcaggcaatgtatccgacgatggtgagaccagcagcagtgtaccccgtcgtgcagccaccgccggcgttcgccgccggcggaccgccggcggcgtcacaaggcggcctccaccgccatcgccggctgatggtggtggtctccgtccaccaccggtgccggtgtttccgtttggggcgccagtgattccgttggtgacgatgatgatgcctgcggcggcggcgcctccatggatctatccttcgtcgtccaccggcgatcaccatcttcttcagggctcaagcagtaatggcagcatagctacgatcacgagcagccgtcatcgccggtagccggccggccggccgtcgccggctagagctgccggttagcagggccggccctggcactatgcagccgaggcgaccgtcgggggccatgatgacgggggccataatggtgggggtgccaacacctaatcctagtaatctagtacctcatccaatgttgagatcaatgatttttattcggaattaaaggtgttgcaagtgagtttatcagattcttcgatgtccgcacctgggattctgaagttttttatggatgcggatttctataaaaatgtttcagttgcctatcgaattctcttaaccgtacatgtgacggtagcttcagctgaaagaagtttctcaaaattaaagttgttgaagaactatttgagatcaactaagtcgcaagaaaggttaaatggcttgactatgtgcttaatcaagaaggatatcttggacactattgatcttaataccgttcttgatgattttgcatcaagaaatgcccgaagaagtatcttttcataggaagcaatggatatgatagggttctattctttattaagttaatgaataatgatattagttccaagttacaaat

SEQ ID NO: 10695 - DNA, 1494 bp, Oryza sativa
  ref <308>: DATABASE ACCESSION NUMBER: AK108043
  ref <309>: DATABASE ENTRY DATE: 2002-08-28
gcatccctcacaccttctgctcctctccttttttggcggctcctccacacccacccctctccctctctctctgtttcggcctctcatactcactcctcggcttctcgtcgtgctctgctctgtggcgcgaggaggatcgagctcgcgcggcgcgcctctccatggagtgggtgcgcgggaaatgcgtcggcaggggggcgttcggcgcggtgcacgtggcggtggacagggccaccgggcgggccttcgcggtgaagtcggtggaggccaagggcggcgcgccggcggcggcgatggcgtgcctcgagagcgagataaggatcttgaggcggctcagctcgccctacgtcgtggagtatctcggggacgacggggacgcggcgacgacgaggaatttgcacatggagctggtccccggcgggagcgccgcggcggcggcggccatgggagggcttggtgagcgcggggctcgtggcgtcgtgcggcgggtggcggccgcgctgcggtacctgcacgacgtggctggcgtggtgcacggggacgtcaaggggaggaacgtgctcgtcggctgcgacggcgacggccgcggtgcgaagctcgcggatttcggcgcggcgaggctggtctccgacgccgcggtgtcccggggcccccgcggcacgccggcttggatggcgccggaggtggcgcgcggcggcgcgccgacgccggcgtcggacgtgtggtccctcggctgcacggcggtggagctgatcaccgggaagcggccgtggtcagagctcggcggcgccagcgaggtcggcgagctgctcttcctcatcgggttcggcgggaagcgccccgagctccccgcgtgcgcctccgactcgtgccgcgacttcctcgacaagtgcctccgccgcgacgccggcgagcggtggacctgcgatcagctgctgcgccacccgttcctctccgccgcggacgtccacgacggcggcgagccgtcgccgttcccgtcgccccgagccgttctcgactgggcggcggcgtccatgtccgattcggactccgacgactcgggcggcgcggaggcgcgcagcgagcacgagatgatggcgcgcgccaagggaaggctcgtcgagttggcgtcaaacgcaagctgggggcgcgagtggggcgcggggcccacctgggaggcggccgacacctgggccccaccgtccagtccggacacgacagcgacgaatgcacccgtcccgtccaaccccgccgcggtcgccgacgccggtgggccacccgccgtgatcgctggcggccgtgacagcgtcctcgccgtcgccaccgccggcgccggccgtgatcgctgtgacagccagcatgggcactataaatgcgagctagctcgcactaggcgagctcggttggctgttgcgtccgtggctgctgtcatgtacagttatctcattgattcaatcatattttgggttcaattcaagccgccgttttctctgc

SEQ ID NO: 10696 - DNA, 1564 bp, Oryza sativa
  ref <308>: DATABASE ACCESSION NUMBER: AK108044
  ref <309>: DATABASE ENTRY DATE: 2002-08-28
aagagagaggggtttttcaatttcgaagtccattcacgcgcagcctacgcgcggcgacacgccgtcacaccgtctgaccgcaccgccgactgcaccatccggcgccgccgcggcgcgctcgcgcgggggtgggcacgatgcgggggctggcgcgggcggggaagcgcgccagcgagatggcgttcaacgccgggggaggcgccgtcaactggttccccggccacatggccgccgcctcgcgcgccatccgcgaccgcctcaagctcgccgacctcgtcctcgaggtccgcgacgcccggattccgttgtcctcagcgaatgaagaccttcaacctgtgcttgcatctaagaggcgtatccttgctctaaacaagaaagatctagcaaatcctaatataatgaataggtggcttcatcattttgaatcatgtaagcaggattgcatttcgataaatgcacatagcaccagttctgttagtcagcttcttgggctagtggagttcaaactaaaggaagcaatctcaaaagagcccacacttcttgttatggttgttggtgttcccaatgttggcaagtctgccctcataaattccattcatagaattgtcacttctcgttttccagtgcaagataagaacaagcgagctacagtaggaccattgcctggtgttactcaagatattgcaggatataagatttcaagccagccgagcatttatgtacttgatacaccaggtgttctagtaccaagcattccagacatggagactggtttaaagcttgctctgacaggagccgtcaaggactctgtggttggagaggagcgtatagcgaaatatttattgtctcttcttaatattagaaaaacccctctacattgggagcgactagtttaccgaagagaacaattcaatgaagatgcattcaatagtaatgaaaaagactatagagattcaccacgaaggaggaggcgaccaaataactctgacgccttatatgtacaggacatggtgatggaggtccagagaacactttgcagtacatttatggacttcgcggacaacactgaggatgagaacgagcttgaaagcctgatagactcacagcttgtcgctcttcgcaaggtgttcaggatacctcacaaaccgtttgatgaaacgcatggtccggcctccaagaagttgttggctcttttcagatcagggaagcttggccctttcatcctcgacgaccttccagataatcagtaaaaggctggggtgcatggcggagcttaggactttaatcctgtgaggtcaattactagtaatttgtatttaagtggagtcatttctctaaattttttgaatttatacatgaaaatcaaggtttgtagggtgttttttaaaaagctgtggggtcagccgacccccacagaatatgcctggatccgccacccgtgcatgtatgaattatatgtatgtttatgagcagctaaggatttctcctgatagagatggctcgatatgataatgatagatggtgatgggcgtccctctagggagcagctttttttttctttttt

SEQ ID NO: 10697 - DNA, 1795 bp, Oryza sativa
  ref <308>: DATABASE ACCESSION NUMBER: AK108045
  ref <309>: DATABASE ENTRY DATE: 2002-08-28
tctcatccagatgccaatgtgcaacgagaaagaggtgtatgagacgtcgatatcgcatgtgtgccagatcgactggccgcgggagaggatgctggtgcaagtgctggacgactcggacgacgagacgtgccagatgctgatcaaggcggaggtgaccaagtggagccagcgcggcgtcaacatcatctaccgccaccgcctcaaccgcaccggttacaaggccggcaacctcaagtccgccatgagctgcgactacgtccgcgactacgagttcgtcgccatcttcgacgctgacttccagcctaaccccgacttcctcaagctcaccgtcccacacttcaagggaaacccggagctagggctggtgcaggcgcggtggagcttcgtgaacaaggacgagaacctgctgacccggctgcagaacataaacctgtgcttccacttcgaggtggagcagcaggtgaatggcgtctacctcagcttcttcgggttcaacggcaccgccggcgtgtggcgcatcaaggccctcgaggactccggcggctggatggagcggaccaccgtcgaggacatggacatcgccgtccgcgcccacctcaacggctggaagttcatcttcctcaacgacgtcaaggtcctctgtgagctgccggagtcgtaccaggcttaccggaagcagcagcaccggtggcactccggccccatgcagctcttccgtctctgcctcccggccgtcttcaagtccaagatctcgacgtggaagaaggcgaacctggttatgctgttcttcctgctgcggaagctgatcctgccattctactcgttcacgctcttctgcgtgatcctgccgctgaccatgttcgtgccggaggcggagctgccgatctgggtgatctgctacgtgccggtgatcatgtcggtgctcaacatcctgccggcgcccaagtcgttccccttcgtcatcccttacctcctcttcgagaacaccatgtccgtcaccaagttcaacgccatggtctccggcctcttccagctggggagctcctacgagtgggtcgtcaccaagaaggccggcaggacctcgtcggagtccgacatcctcgccctcgccgaggccgccgacgccgacgcccggccgccaccggccaagctccaccgcggcgtctccgagggcggcctcaaggagtgggccaagctgcacaaggagcaggaggacgccacggcggcggcggcggcggcggcggcgccggggacgccggtgaagaagagcaaggcggcgaaggctccgaaccggatcttcaagaaggagctcgcgctggcgttcctcctcctcaccgccgccacgcgcagcttgctctcggcgcaggggctgcacttctacttcctcctcttccagggcgtcaccttcctcgccgtcggcctcgacctcatcggcgagcaggtcagctagcgaccaccaccacaataaagaaaaaaaagccaccgccgccgccgctgtcgccgccatgcgtgcacagcgcgccggctggctggccggaggcgaagacgacgacggccagccaagacacttccatggatcgacagaggattacatttttagccttcttctccttatttttatccctttgatatattttttgttcagagataaaaaaaacagagtgcgtctccatgttacaaagaactcttcttttctttgtgctttaattagctagtgctttgttgctaggagaggcaagcaggccgcatcaggttgttaattacattcagattaagttgtgtcaattcagtagcc

SEQ ID NO: 10698 - DNA, 1981 bp, Oryza sativa
  ref <308>: DATABASE ACCESSION NUMBER: AK108046
  ref <309>: DATABASE ENTRY DATE: 2002-08-28
aagaaagaacagctagaacaatcacttgcaagcatacacacaccaagctagctagctcgatcgtcgccaatggcgtcgtcctccctcgtcacctctctcttgttcagcagtagcagcagcagtaacactgcaactagtacaagctcaagaagaagcttcagtcttttctccaagaaccagtactgcaagcctaggcctctcaggcgaagcagtagccgcctcctcgtcaggtgctccttgcaacagcagcaggaggagaaggcggcgccggcggcggagtcgcaccacgccggcggcggacaggacgacgccgccacggcgtcgcaccacgccgtggaaggagagaacggtgtcgcagacgccgacggcggcggcgtgaagaagagcaaggaggagttggaggaggaggagcagcaggaggtggactggaggtcggacgaggagttcaagaggttcatggggaacccgtccatcgaggccgccatcaagctggagaagaagcgcgccgaccggaagctccgcgagctcgaccgcgagcccgacgccaacccgctcgccggcctcctccgcggcctcgctaggggccagctcgcccgcgagaaggagaggctcgagctcgccgagaacaccttcaaggcgcttgacctcaacaagctcaagagctgcttcggctacgacacgttcttcgccgtggacgtccggaggttcggcgacggcggcatcttcatcggcaacctgaggaagcccgtggaggaggtgaggccgaagctggagaagaagatcgccgaggcggccggcacagacgtcaccctctggttcatggaggagaagaacgacgacatcacaaaacaggtctgcatggtccagccgaaggcagagatcgacctgcagctggagatcaccaagctgagcacgccgtggggatacctgagcgccgtggcgctggccgtcacgacgttcgggacgatcgccatcatgagcggcttcttcctcaagcccggcgcgacgttcgacgactacgtctccgacgtgctccctctcttcgccggcttcctctccatcctcggcgtatccgagatcgcgacgaggctgacggcggcgaggtacggcgtgaagctgagcccgtctttcctggtgccgtccaactggacggggtgcctcggcgtgatgaacaactacgagtcgctgctgccgaacaagaaggccctgttcgacatcccggtggcgcgcgcggcgagcgcgtacctcacctcggtggcgctcgccgtctccgcgttcgtctccgacggcagcctgaacggcggcaagaacgcgctgttcgtccggccggagttcttctacaacaacccgctgctgtcgttcgtgcaggcggtgatcgggccgtacgccgacgagctcgggaacgtgctgccgaacgcggtggagggcgtcggcgtgccggtggacccgctggcgttcgcggggctgctcgggatcgtggtgacgtcgctgaacctgctgccgtgcgggaggctggagggcgggcggatcgcgcaggcgctgttcgggcgcggcgcggcggcggtgctgtcgttcgcgacgtcggtggcgctcggcgcgggcgccatcatcggcgggagcgtgctgtgcctggcgtgggggctgttcgcgacgttcgtccgcggcggcgaggagatcccggcgcaggacgagatcacgccgctggggagcgagcgctacgcgtgggggctcgtgctcgccgtcgtctgcctcctcacgctcttccccaacggcggcggcacctactccggcgacttcctcggcgcgccattcttccgcggcggcatctaaggcgcccctcgaggcctcgatcgatctctccatccatggcggcgcgagtaggctttagtgggcgaacaagtagctagagggcgattactctgtttatgcttcgacgcgtatgtgtatataacaacataaatcatacgtattactagtactt

SEQ ID NO: 10699 - DNA, 1456 bp, Oryza sativa
  ref <308>: DATABASE ACCESSION NUMBER: AK108047
  ref <309>: DATABASE ENTRY DATE: 2002-08-28
tttgcatctgccgctggtcctttgcctgcagcggcatgtcatatggccttagttgcgtgcagcagtaggcggaaggttaacgccggcgatccatcctcgtcgtgggcgtctctgcacgaggacttggtgagcctaatcggatagcgagtggcagccggcgacttccgcgactacatccacttccgggccgtgtgtccccagtggcgctccgccaccacctgcccgcgccgccgcggcctccacccgggccacggcaagctccgcggccacgtccgctccttccacctgtcgaccggcgccatcgtccgcgtcaggctgccccatttcagggaccactgcatcctctactccgccgacggcgtcctcctgctgcagagggaccacgacaccgccatccgcctcctccaccccttcaccggcgacaccgcggagctcccgccgctggagaccctcctgccgcgggtgcgctgccgctccgaggtgtctcggtggtgctcccttcgaaacatctgtggcgcctgcatcagcgtgggtgtaggagatggactcgtcagggtaatgatgcggccgatcggcgtgtggaacatatgttttgctacctccggtgatcagcaatggagggtggctacaacctgggatcgcatcaaccaccgttcttctacattgccattccatgggaagctttatgtgctgctgcgacctcattcggtgagaggtgagaatgaggtcatacagatcgacccaccccagcactgtttatcggagccatcaccaaagttgattgcaaaatttagatggccaacaagcgatgaaagctttcgattgtattcctaccgtctggtagaatgcaactctgagattttggtgattggcacaaaatgggatgcggtttactactcagtttacaggctagctgatcttatgctgggaaggactgtccatgtgacatccatagatggcaatgcactcttcattggtaggaggtcactctgtgtcagctctaaggcgttccctaccattgttcctgacaccattgtcatgccagacaccaaaatctatcttagtcaataccacctcagtaatggcacattatcacaagcaacagatggagtaattgcagaagaaaaagatattccaggtccttatagcatcatgtgccatatcataacctgttgctctcctgcatactggaacaaagggaagatatcatgtaaggagttgcccacatggagggtgaagaaaaaatttcgtttcggggcataaataggtcactgcaccatgatgggttactgccgcctggtttcccgactgcttttatatctatctagttatattatcgttgtctctgatatatgttttttctgcactgtaataagttattatattatcgttgtgtgtctctgatagatgtttttatgtaatgtaataaattaatatattattatcgttgtgtgcc

SEQ ID NO: 10700 - DNA, 1344 bp, Oryza sativa
  ref <308>: DATABASE ACCESSION NUMBER: AK108048
  ref <309>: DATABASE ENTRY DATE: 2002-08-28
agtacctcgcactcgaagacgtatgcacgtgaaaccgtttcttcgcctgtatagcggccggcaccgtgcacacgcgcgcgccttcctcgatcgatcggtcggccgcgagctagcccggccggccatggcggcggtaccggaggtggccctgcggcacggcgccgggaggcccatgccggcggtcggcgtgggcacggcggattcggcggcgacgtcgccggagacgaaaaggggcgccgcgctggcggcgctggaggtgggcttccgccacttcgacaccgcggcgctgtacggcacggaggcgccgctcggcgaggccatcgcggaggcgacccgccgcggcctcgtcgcctcccgggaggaggtgttcgtgaccaccaagctgtggtgcacccagtgccacccgggcctcgtgctcccgtccctccgcgaaagcctccggaacctgcagatggagtacgtcgacctgtacctggtccactggccgatcagcgtcaagcccgggccaccgatgttaccggtgaagagagaggacgccgtgccgttcgacttcgagggcgtgtggcgcgcgatggaggagtgccaccgcctcggcctcgccaaggccatcggcgtcagcaacttcaccaccaaacacctcgacaagctgcttgccgtggccaccatcccccctgccgtcaaccaggtggagatgaacccggtgtggcagcagaggacggtgagggagtactgcgccgcgaagggcatccgcgtcgcggcctactcgccgttgggtgggcagaactggataggcgaaggcaacgacgtgatggaatccccggtgctcgcggacatcgccagggccagaggcaagagcatcgcacaggtgtcattgagatggattcatgagcaaggagtgaccccaatccccaagagctacaacaaggagaggctgaaacagaatcttgagatattcgactgggagctgaccaaggaagaccgtctcaagatcagccagatcccgcagaaaaagatcgtcacggctgcacgaatgttctctccggatggtgagttcgcgtcggttgatctatcagacatggaaattgtggaggagtaggtccagatgaagatgcctggctgcccctgctgcagtttttttttcacgtttgtatttatgaaaagattcaattaggatttgtatttgaatactaattttatatggctgcctttttaattcgccttcggatgatcggttatcaaataaataatggatgtatcttaaactataccaatataccaatagtttttgttaaaaaaatatgtaagatgtaattatagtataacttgtatctaatatttaagcat

SEQ ID NO: 10701 - DNA, 802 bp, Oryza sativa
  ref <308>: DATABASE ACCESSION NUMBER: AK108049
  ref <309>: DATABASE ENTRY DATE: 2002-08-28
atctctctcccattgcgagtagcagcggcggcctcacggccaaggcggggtggcggctacctcccccaccgtgagcagcggtggcgacggtgtcaccctcctgcggctttcgatgggcggatccagcgacaaatatggatggcgcctcctcattactgatgttgccctctccgtcggatctatacccttctccgccgacctcccaccccaggcgatggcatccagatcagctcctcagaagacgcgtggtgtgagccgttagcagagggccccatggtagctgtgtcctggaggtcggcgaagcggcctcggcgacggcgcgttcttaacgtcttgagcctctggcgatcgcctctcctcgccatcttcctccgccaccaccgcccattctcacgtcggacgacgagcttgtcaccgtgtcaagacaaataattaagggaggccaatgatgaatcccgatctaaacagatatcgcgaagtggacagtggggcggcggacaagaaaaggtgcgacgggtgaaaaaacgtggtgacgatcgaaaatttaccgattttttatgtagttaagataagatatagaatgcggtaatgagtatctatgatagaagagagaattagtattaattatatttagtgggaataaattttgtagacatatagaatgccgtgtgagaaagcgatcgagcttttgtaaatttaaaatccgttctctatacgggcttgtgccgccggataatcttgcgagtacgtgaacaagcttgccatcgccagcctgagccctgagctagcttgtacacgcagc

SEQ ID NO: 10702 - DNA, 1371 bp, Oryza sativa
  ref <308>: DATABASE ACCESSION NUMBER: AK108050
  ref <309>: DATABASE ENTRY DATE: 2002-08-28
tgatggaagatctgagaagccagttgggttacgcagagtaccagcaatcacctctcaatcctgagtcttggcttttgatatgctgagatctgcagttaattgctttactatcctttaaccttgtccgaagttggttgcgaacttgcaatttgttttcagctggtgctgcaatcttcccatgggtgtttgttttggaagcaaatggttgttggtggtcagtagatagaagttagttagtccttcaaaatgagtcatcgttgttctccagttggcatgggccttcatggttgtaaatggaaacagaaattttttttcttgagtacaatatgaacaaatatcgctcaaagaatgtgtggggtgcagcttacttaatcttattacttggagcagtatccaagagaggatgctcaaaactgattaagccaagagctggtaagtggaaacttcacctaaaactctaggtttcttcttattgaatgctctgtcgtcgacaataatggcacatggtatgcctggctgacacaagtcacaaaatgattcaagaatgaagagcttaatactgatgctgctcagaattcagttcaatacttcaatggcaatgctgatcaatgatcacctagctactaaagagacaacaacactgatcaatattgcttaatggcagaaaagatatgatcacttgcttaattgcctttgttccgcctggcgagcaaggtgctgaacggcgggtggcagtacctgccgtcctggaagaacatgccggcgacgaccctgtacatggcctccgtcatgtggacgccgtcccagttgacgtacttggccggctgcgcgcaggcggtggtcacctccggcgagccgcaggtggagaagatctcgaagttgtaggcgccgccgccggcgccgcagcaagtcttgaagggctccgtgaagccgtacctcgccggggccgccatgacggcgaggtgggcggcgtagtagtcggcgtaggcgatgacggcggccgggtgctgccgccggagccggcggaggctggcctggaggcggcggttgtgggcgtggctctgctggttgacggtggcggcgcagctgatgttgtcgcggtcctccgggcgggccagcgtcatggtcagtggcaggcaaccggttagaggtagcccctgtacgattatgtacttggcccccttcttcagcaatgcctgccatgcatccaattattgttctctctctcgaaggacagaaggtaggtaaaaccaattatacgagaaatgtcaagcggtcttccggttagctccacaatttagtgggctagacgatttgggttcgaagcgccacctctctaattatttgatattaggtcattccctaaaaaac

SEQ ID NO: 10703 - DNA, 1184 bp, Oryza sativa
  ref <308>: DATABASE ACCESSION NUMBER: AK108051
  ref <309>: DATABASE ENTRY DATE: 2002-08-28
gaagatggctaaatgtccattttctcgtgggccaccgggctgtgcgaactcgctacgtggaatacttgggcccttcccttcctttccccaatccgcctcatccgataataccccccacccctctctcgtttcggcggcggcggcgcgcggccggagcccgagctgagaccaccaccacggcaccaccacgaacacgacgatgatggccgcggcagcgagaatggcgttcgcctcatgcggccgcctcctcgccccctcctcgtcgtcatccctccccgccctgccaagaacccggggcagcgtcgccgcagcggcaagcatcccgtctcgttcttggcggcggcgagatccgcctccgtcctctgctactgctccgacgccaccgtcgcgccggccccgcaggcggcggccgcggagggggaaggggaggagggggagaagaaggcggaggttccccccgtggaggaggtggcggcgctgctggacatccgggtggggcgggtggtgaaggcgtggcggcacccggaggcggacacgctgtacgtggaggaggtcgacgtcggcgaggagcagccgcgcaccatctgcagcggcctcgtcaactacctccccatcgaccagctccaggacagcaatgtgattgttcttgcgaacctcaaaccgaggaacatgcgggggataaagtcaaacggcatgcttatggctgcatctgatgcttctcatgaaaatgtcgaattgcttacccctcctgaaggatctgttccaggtgaaagggtatggtttggtactgaagatggaaaggatcgccaatcagaagctgcttcaccaaatcaggttcaaaaaaagaagatttgggaatcagttcagcctcatcttaggacatcagaaaactgcacagcatttcttggcgagcacccgatgcgtacctcagcgggtgtggttttctgcaaaactttgcagggtgcaagagtgtcataagtctctttcaagaagcttttttttttttcttctttggtatccatattgtgtaccttactgaaaataatcatatggtatgagtaaaaatcttagagcaagatggtttctgaggctttatggaggtcgttcacaattttgtagctttctgatgtcaaagctggaacattttacttcaattggagattgatttataatttgatcatgag

SEQ ID NO: 10704 - DNA, 1368 bp, Oryza sativa
  ref <308>: DATABASE ACCESSION NUMBER: AK108052
  ref <309>: DATABASE ENTRY DATE: 2002-08-28
gacaaccccattgccctacgccgccgccgccaccgccgccaccggcgaggaccctgaccagatcggacgcctcccggactgcctcctcaccaccatcctctccctcctccccctcgacgccgccgcgcgcaccaccgctctttcccgtcgctggcgcagcctctggccatccgcgccgctccgcctccacgactccgatctcccctcccgctcccagtatctctccgccgccatctccggcatcctcgcctcccaccgtggcgacgcggtgagcttccgtctctcctcgggtcgcccctcctcagcggacctcgacacctggctccgaatcctcgccggcaaacgcctccaggagctcctcctccagccgccatccgagccccttcccctcccgccgtcactcctcggctgccactccctccgctccgctgacctcaccaattgccgcctgccggcagccgccgcagcaaccgcctcgttcccccacctccacgagctcactctccgctactgcttcgcctcctcccgggcgctccacggcctgctcgccggctgccccgcgctagcggccctgtccctcgaccgtgtcttcggctgccggagcctccgcgtgcgctccaggaccctgcgcagcctgacggtgtcggtctccttgcggcggcgggacgaggtcggcgacgagctgcaggacctcgccgtcgaggatgggcccctcctggagaggctactcgggcacgacgtcaactggggcccgtcgatccatgtcctccacgcgccgaggctggagatgctcggctacttgggcgtcggcatcccatcgcttcagattggggcggcattgttccactcgatgcgggctgttagattggcggcggagttccgatgcttgaagactctggcgctagagatggtcgatccgcaggtgaagcctgtggttgattttctccggtgtttcccgtgcttggaggcgctctatatcacgtcacatatgtttgagccacggagtatggaaacactaaagtgtgataacatggattatccaattgaatgcctcaaccgtcacctcaagaaagtggtgcttgcaggatacgaagggcgaaggcgtgaacttcagcttgccaggtttcttgtttctaatgcaagagtcctacaggttatgaaatttttgtgtgcaaatgattgcaaaccaacatggttggctagccaaaaaaggcagttgtgctgggagagtaggctatctttaggaccacaggttatttttgaggtatacaggaagagccatactaggtttcggaagcatgctagtaacataactttagttgatccttttgatgttaaaacgtaattgttaattgtgcattattttct

SEQ ID NO: 10705 - DNA, 1410 bp, Oryza sativa
  ref <308>: DATABASE ACCESSION NUMBER: AK108053
  ref <309>: DATABASE ENTRY DATE: 2002-08-28
gtgcgcccaccctctcccttctcttgtctctccccttcttcgccctccctcgccatggaggccaccccgatctccgtcaagccgccgtctccggtggcggcggcgccaccgccgccgccggtgcaggtgccggtcccgccccctccgcccccgccgctaccaccggcggcggccgccgtggagcccctgcccccgcagccggtggccgtggtggtggcagaggcggagccctgtagcatgaaccagctggcgctcactcccacccccaagcggcagaaggtggaggagagcgcggatgggaacgggtgcaagcattgcgcctgcaagaagtcgagatgcttgaagctctattgcccatgctttgctggtggaggttattgttctgaaaagtgtggatgccaaccatgcttcaacaaggccttatatgcagaaacagttcagaccactcgcaaggtgcttctttcacggcagaaacggatgtcactgaaaattaatcgaagatctgaggcaaatgcggaagctgtggaagatgctcatcattcttcttcttcaactccgcctaggcgaggttgcaattgcaagaaatcaagttgcctaaagaaatactgtgattgctaccaggatgggactggttgctctttgttttgccgatgtgaggactgcaggaatcctttcgggaaaaatgaaggcataatggcagaagaaagtaagcgctttttatacactggcgcagacctggaccacagtgaggatgaacaagactttatcgtggaacgttcacctcgcctgcagtcaccaatctcaaaagagtcctccttccagcaaactcccccgcatatcagagccacgaacagagatacacacatgttcccgcaggcgatatcgcagtggcagccccgctcatggcattgctccaagaggcagagcaacgaccgggtgatcgacgactcaggggagtacaagaactcgaatcacgactggcagttggccaagccagaggacagctacagcatatcgagatgcgtccagatcctcaacggcatggccgagctatctcaggtggagaaatcggttgcccccgatgtgttcctccaggcggggaaccgggaaatattcatctcgcttaacggtgacgtccgggccctgtggctgaaacgcaagatccagaacctgacttagggcatgccatttgtcaccttagtgttgttttggaggctgagattggagacaccattggatcatcaatccatttaggctatgcatgtcctgctggtcggttgaaaatgtgcaggatcttaggctcttcttgtatactgagttgtatcccaaatttccgtcatcttttctttgtagagagctagcagcagatgcgaactttggtaaccggttataataataaatgagttatgc

SEQ ID NO: 10706 - DNA, 992 bp, Oryza sativa
  ref <308>: DATABASE ACCESSION NUMBER: AK108054
  ref <309>: DATABASE ENTRY DATE: 2002-08-28
gggagccatcagcggccatgaccgagctcgcggctggcgccgtgagctcactgctggtggtcatccgcaacgaggctgtgctgcttggcggcgtccgggacgatgtgcagttcatcaaggaggagatggagagcatgaacagcttcctagggcacctagccaggagcgcgccgcagggtggagagcacgacgagcaggtgcgcacctggatgaaccaggtgcgcctgctcgcgcaggactgcaacaactgcatcgacctctacctctacagcgggaacccggagatccaccgtgccaaaggtagactccggcgacacctctggtgggtctactggtccctgcgcaagatggtcgcgcagcaccgagcggccatccagctccgccagctcaaggaccgggcgcgggacgtcggcgagcgacgactgaggtatggcgttgagatcccagccacgacgaaggcggccgcacctgatgcaacaggtggctatgctgctggggacgatgaagaagaagatgaagatgaccgcgaaggacaatttgctgtggcaacaccaacgttggcccatcattctgctcgatggcccgtctttgagcccccttctctggacgactacgtgaaggccaagttattggagtggattgagggagttcctggaaacgccatcgtgacgttgtccatcgccattgtagcaccagatgcagataataaggaagtccttgctattgcacatgaaactttggttgctccagactactactaccgtcgcagtatcatggtcaacgtcccggcggtgcaccttgattttttaccgcttcgacccaaggaggtcctctactacatcttgcgggagctcgagcgggaagaagcggccggatcgcagaagcagcccacagatcaaggtgaatgggaggaggaggatcctgacccttggcaagattactacaaaaaatgtggcatttaccgtagcaaaaaaggtgtgctcgataaaatc

SEQ ID NO: 10707 - DNA, 1706 bp, Oryza sativa
  ref <308>: DATABASE ACCESSION NUMBER: AK108055
  ref <309>: DATABASE ENTRY DATE: 2002-08-28
aagacgtcaaatgctggacaaattcatcgatgcacctctcttcgcgctccctgtccgccacgatctcctgcagcttccgggcattggcgaagaacgtcttcccctcttcctccaccacgacggcgcggacggctccggcgacgccgcctcggtcgaacgacccgtcctcgtcgttcctcggcaccgccactccgagcttcctcccctcgagaatccgcgcgttcgggccttggtcgcctaagatcggcagcatgatcagcgggtgcccgaactggagcccctcgacgacggagccccacccgcagtgcgtcaggaacgcgcacacggcggcgtgcgccagtatgctcacctgaggagcccaccgcgtcgtgaccagcccgcgctcgccggtgcggcccaggaaccccgctggtaggacgctgtccgcgtcgacgccggcgggcttcctcatggcccagaggaagcgcgtcccggcgaggtccagcccgtgagccagctcgcgcagcaggtccgcgctcatcggcgcctcgcttcccagcgcgacgtagacgaccgacttggccggctgagcgtcgagccactgcatgattgcgtcgtgcttgccgttcttgctgacgccgcgggcgccgtccggccgtggcgggagcaggccgaacgggacgaccggcttgccgtagaacctcgtcaggatcgtgaacgcgccgggctccagctcggggcagctccgcattgcgacgagcttggacctctgcagcgtcaggctgtagcgggtcatgatggacacccccgaggcgccttccgtcgcgaactcctccgtggcgcgcttcgcctcgaagctcggcgccgccgtgcccatggaccggactatcgcctcgcgctggtccgcgctcgactcggttggcggagcagacgaggccacgacggctgcggagcaggggaggatcatggcgcacggcaccccgcgctcctgagatgccagagcgacccagtgatgcatgagatcggcgagaacccaatccggcctcttgccgccggcgcacgcggtgtcgaggaacgcggagaacggcgcggcgagcccgtcgaacgccttcctgtgaagctcgaacttgtcgaacgggacgtcgctggtggcctcggcgccgtcggggagcccgtcgacgcgcggcagtgggagcgccacgaggtcgacgagctctgccagctcggggcgaaccggcgggaggcgggcgaggttgcgcggggtggagacgaaggacacgcggtggccgcgcgcggcgaggcgctcggcgaggtcaaggcaggggagcaggtggccgaaggcgagccacgggaagatgacgacgtgcagcggcgactgcgaggaatgggcgtcgtccattttcggccggcgcgcaccggtcagcactcaggcgtcagcgtgtgtgtgagaagtttggctctgatgatccagtcatgagtgtatagggagtactccgtatgcaaatcgtgctagttaaaggggagaaaacgaggaaagattcccgaacgcgatgcgtattgtcgagcccagccgagtgcgaggcagccgggactactcatctcctccctccatctactacctccctcaaaaaaaaaaaaaaacttttatccagattcattattttaggaggaaacccctccttagagcaggtataatagagtatgataagccagcgatacaagcatcc

SEQ ID NO: 10708 - DNA, 934 bp, Oryza sativa
  ref <308>: DATABASE ACCESSION NUMBER: AK108056
  ref <309>: DATABASE ENTRY DATE: 2002-08-28
aaaaaaataaaaaaaaaaccggcttctccgcctatcgtgcccaggtgtgcgcggctctcttctcctccatcggcgacgagccactcctgcgatgagatgagattgcccgcatcgtcgtcgtcggcggcggggctgcaggagcgcatctgggacctccacgacaatctcagccacgccatcctctccctctccgcctccgcccaccgctgctgccgccgccgcgcccccgaagggcgcgtggtcgtcaaggggtggcggcggcagggaggatgtggggactgcggcctggagcaggaggcggctgcggcggccaccatggcggacgcgcggagccttcacgccgtccgcgccgcgctcgaggacctcgagggccacctccatttcctccacaacattcaattatgtcaggtggcagaacgagatgccgcgattgctaggctgcagcaaagtcgtattctgcttgctacaagattggctgaacataggtggaagaagcatgaagttattgaggaggccttagcttttgttgatgatgcgcttgacaagagtcgatttgtctcaccagaagatgtccgtgggacgcatacacacagccaatcagtagagaaccagtgccccaagatacatgattcaaacttcttggtgcgttttttatcctgtacattagctatagctaagaattctttaagatttgagaggattggtggtgcactcggtaataccgcgatgtttgcagtaagtatgcttgcattcttgcagctgcaacaagtggcctttggtaaacaaactccagcagtacaatgtagacgagtcaattattttcattctcagatgtctgtaaagaacactaaagaaaagcatctggtcgtattgttagctagaggatgaggaaatcatcattgtttgatgtatagataagttttgttctgttcac

SEQ ID NO: 10709 - DNA, 1722 bp, Oryza sativa
  ref <308>: DATABASE ACCESSION NUMBER: AK108057
  ref <309>: DATABASE ENTRY DATE: 2002-08-28
caccagcatcgcctcgccgcccagctgctgccgctgcgcttgcgcgtcctcactggaaagatggcccccctctgctctggcccctctccactgcggtatgaatgaatgatgcgccttttctccctccccccgcccagatcgatcgccagacctgcactttccagttccccatccatgctctgtctgcttcatcctgtcccagcttcttcttcttcttcttcttgttgttgttgttgttcttggtgcgggagggtgttcttggggtagggagcagcatcggcggcggcggcggtcatggcgaaggagaccgagttctacgacgtgctcggcgtctgccccgccgcctccgacgacgagatccgcaaggcctactacatcaaggcgaggcaggtgcatcctgacaagaaccccaatgatccgcaagccgccgagaaattccaggctctcggagaggcctaccaggtgctgagtgatcctcttcagaggaaggcctacgatggctatggcaagaccagcatttccaaggagaacatgctggatggcactgtggtgttcacccttcttttcgggagtgagctgtttgaggactacattggccaccttgcaatggcaacaatggcttcctccgagatggccagcgacaatgacaaccctgaacagcttcaggacaggctcaagggtgtgcaaagggaaagagaagagaagctagcaagattcctcaaggagttcctcttgcaatacgttcgtggtgaccaggaaggattcgcaagccgtgccgaatccgaggccaagaggctgtccagcacttcatctggactagacattcttcgcacaattggatatgtgtactcccggcaagctgcaaaggagcttggcaagaaggccatgtaccttggagtcccattcctggcagagtgggtgaggaacaagggtcacctatggaggtcacagatcaccgcggcgaaaggagccttgcagttgctgcagctgcaagaggaggcctgccggcagagcggtaaggacggcttggccaccgagagggatgtcgatctgcagatgaggatgaacaaagacctgatgatgagctcactgtggaagctgaatattgttgatattgaagtgacccttctacacgtttgtgaaatggtgttgcatgaaaacaatgtcaagaaagaggatctcaaggctcgtgcaatggcactgaaaattcttgggaagatattccagagggacaaggaggcattgccaggaccatcaaaaccgaccattctcgatgatgacagcagctctgatgaaagttcagatgacgacgtggctcggacagtgccttatcggactcctgcagttactcagggaattggcaggttattcagatgcttatgcaacccagcatatgatgttgacgatgactttgaaccacgcaaatgagtggtaaagtagcagagaggttgcaactatttaagagatccctgaatctttccagattatgtgcttctgaacagttggggatcatgcatcaccataatttgtctgggtgtgcattgtagattctactgcagcactggtgatcaggccattagctcaaaatcgttctttttctgtccatgaacagtagattctttcttagtttttgatatagattttatcgaattgtgtggtgtttatgtaattgtttggtttgggagttgtcaaaagaaagaaagcaagaacaagtgtaactgg

SEQ ID NO: 10710 - DNA, 1627 bp, Oryza sativa
  ref <308>: DATABASE ACCESSION NUMBER: AK108058
  ref <309>: DATABASE ENTRY DATE: 2002-08-28
ccactctgccgccgccactccaccaccactccgtcgccgtggtcgcgcccgcgcctactccggtaaccaaaccaacccgatggcgatggagctggagcgcgctaccaagaagaggtgcggcggcatcgacggcgacaaccccgccgccgacctcaccgacgacctcatcgtggagatcctctcgcgtctcccggccaaatccgtctgccgcttcaagtgcgtctcctggcgctggcgccgcctcatctcccaccgcgaccaccgcaagaagctcccccacatgctcgccggcttcatctcccactactccgtgcccctccacgacggcatcgtcttgattccccatttcgacagcatcgatggcggagaagaagatgaagaggagcaccgccttgttcctgacccttccttgtccttcttgcctggatacaggaccatctttcccaaggattgctgcaatggccttctcctttgtttgtgttgcaagaattccccgagagatgaatccgattacgtggtctgcaaccctgccactcagagatggatcatcttgcccgagatcgaccgcgcggacccggtctccaccgtccgtttgggcttcgatccggcattgtcgccgtacttccatgtgtttgcgatccttgagcatgtggatggatgcgtctccggcgtggagattttctcgttggagacgggagcgtggagccacagggagaatggttggggtgacgaggatgaccatacggtgcatcccgacgcgaagtctgcgtttgtcgatggcatggtgaatttcatctcctacaactcggcgatcatagcggttgatacggaggggaagaagtggaagactattccttttcttgaagagatgacctgtgaatgcatctctaatgggatccttgctttcataggccaatcccaagggcacttgtattacatcaatttcagggattgggattcctctatactgtcagtctggactcttgatgattactgcagctgtggatggtccttcaagtacaacattagcacttcccagcttttcggatggacaaatatgaagcttgagcgggagtatagcctgattgcaattcacccagaatgcaatatgattttctatgttttccgggacgagggccagaatactctgctatcatatgacatggaccgtgggaaagttaactcgatatgcaatatgagagatcccttttggaaaacctgggatccatgtcttccgtatgtccccgtgttcatggagtctttgcctgatcatgcctagatgtggtggcatttagaagcagctcatgaagaacaatattttggtcagctaagtttcgctgttagtgatcagtgaagaaaaggttggtccgctggtggattttctgtagctttcaaagaaaaaagagtttctgtctagccaaaagttgccagagctattgattactgaattggtatttttgctattccatttactctgtttacctgtttacttatagagcagagtaagtggagaatattaagttgtgaccttgttaaattcatggtttagcactagggcaagcctatttgatttttgtactacttccttgtgcttttcatgcaatccacctcttagtttgtaaccact

SEQ ID NO: 10711 - DNA, 1528 bp, Oryza sativa
  ref <308>: DATABASE ACCESSION NUMBER: AK108059
  ref <309>: DATABASE ENTRY DATE: 2002-08-28
aagcctccgactccgagcccctcctcctcctcccaatccctcgatcgccaccacccaccaccattcgcgcgccatggccgaagggggctcgccgccgcgtgctccggcgagcacggaggatggcggcggagctccgacgggaaaggggccgggaggagctgcttcttcaccaccggcaccgcctccgacgaccaagcagggaggcactcctccgccgcgggctccgacgggcaaggggccaggaggagctgcttcttcaccaccggcaccgcctccgacgaccaagcagggaggcactcctccgccgcgggctccgacgggcaggggggagacgcaccacagccgcgggatgccaatcagggaggcaccccgactccgatggtcaaggggggaggcgctgcgtcaccaccaccgccgggagctcatcatctgactaccaaggaggaggaggaggacgcgcagcgggatcgggatcgggctcgggacgaggacgacgaggctcctgcacggcgctgctcgtgggtcatactgcaagccgtaacccgcgtcaaggatctcccacccggagaagatttggcgttcaagtcggagaagccacccggcaccagcgtcctctacgtcgacaaggccatcggcttcttcaacttcgtcgtacctcgcgccaagcccttctccgtgaacctgtcacgcccaagaccaaccactcccctcgtcgtcgccgtacacgggtctggaatggtcgtcgcctccgccttcaacggcgtgcgctacttctgcgacgcgcacacacgagtcgccaccatgattccgccaatcccccccatggagccaagcctcattcccccagtcataagcatcggcgtcgtccaagatctgattcgaccagactacactatggttgcttgcctcgtttgcaccaattcgagcccgcagttcatggagctgcgctgctggacttacacctcaggttcccagtgggttgtcaagccccttaccaactgcttgcaacacccagtttggggcagtcaaggcggtgtgctaagccatatgaacaagatttggttcgtcgacctgcccttgggacttcttttctgcgatccgttcattgagaagcccaagctgacttatgtggctcttccggaaggctgccttatgctggtccccgacatcagatcgcgtcacaatcttgagaagcggcgttgcgtcaagatcagccaagacaagatatgctacgttcagttagatgaaggagaggcttgcttatggagtttactctattctgagagtgagagccccgagtggcagcttgagtacaaggcacctcttgcggacatatggggcgacaagatctacaagacctccgggctgacgccgggcaaagttcctgccattgctatgattgacccgacagactgtgctgtactatactttatagaacaagatgtgctgttctcttttgacatacgttccaagagagttttgatgtccaagagcttggagatgcgcactgacttctgttacccatcac
